United States Patent Application Publication US 2004/0265849 A1 - sequence listing, part 14

SEQ ID NO: 41192 - DNA, 201 bp, Homo sapiens
gtgccgtgtagggaccacatatctgatacagatatcattagaccccctgaagaataccagtaatttacattacttctagcttttcaggtttttagctgatytgctttctaggccttgggaagtaggtagtggtggtgagatttcatggccactggagattttctgtcccacattctcttgtttttgttcccagtttgcgga

SEQ ID NO: 41193 - DNA, 201 bp, Homo sapiens
aatttacattacttctagcttttcaggtttttagctgatttgctttctaggccttgggaagtaggtagtggtggtgagatttcatggccactggagatttyctgtcccacattctcttgtttttgttcccagtttgcggagcctgccacattgtaggtgctcaaatatttacataatttttttagtttttatcatggatct

SEQ ID NO: 41194 - DNA, 201 bp, Homo sapiens
gccttgggaagtaggtagtggtggtgagatttcatggccactggagattttctgtcccacattctcttgtttttgttcccagtttgcggagcctgccacaytgtaggtgctcaaatatttacataatttttttagtttttatcatggatctttatttaaaccttccattattatttaacagttcacctgtgagtactttgt

SEQ ID NO: 41195 - DNA, 201 bp, Homo sapiens
gtaaaaaagtataggtggtgtgcacctgtagtcccagctacttgaaaggctgagatgggagggttgcttgagtgtggcaggttgaggctgcagtgagccaraattgtgccacagcactccagcctgcgcgacacagcaagaccctgtctcaaaaaaaaaaaaaaaaaaaaaaaaaaaagagtggctcttctcaagtcacaa

SEQ ID NO: 41196 - DNA, 201 bp, Homo sapiens
tttttagtttttatcatggatctttatttaaaccttccattattatttaacagttcacctgtgagtactttgtattctgaactagagtaagcttccttgcsggcagctgctttgtatacctcagatttgctggctggtgctccaacggcttggtctgattcttcagataaaatgagtattgctagagggagataacagttg

SEQ ID NO: 41197 - DNA, 201 bp, Homo sapiens
caaggcttctgataacaagggcaagcctctttctcttccacaaagccagtcctgagctgcaggagctcattgtcctacattgagtacttaaaagggaaaamccagtttggagaatctgctgaactgatcaagacacaaaagctgtgagggcatcctagagaagcggcagagatttggcaaatggaagaattgatggattct

SEQ ID NO: 41198 - DNA, 201 bp, Homo sapiens
tttaacagttcacctgtgagtactttgtattctgaactagagtaagcttccttgccggcagctgctttgtatacctcagatttgctggctggtgctccaayggcttggtctgattcttcagataaaatgagtattgctagagggagataacagttgttaatgcatgggacaggcaggaggtggtgaccgtttttcttatca

SEQ ID NO: 41199 - DNA, 201 bp, Homo sapiens
tagagggagataacagttgttaatgcatgggacaggcaggaggtggtgaccgtttttcttatcaagagatatcgctaagcaactgctaagcccttccttcrtcagctaattctctcagtcatggtgtgttagcctggataaagtgccataagtcaaaaggatatagacataaaaggaattttctctaaaaattgtcatcac

SEQ ID NO: 41200 - DNA, 201 bp, Homo sapiens
agacataaaaggaattttctctaaaaattgtcatcacaggcatcagatttctgaatccaatgtgctaaattatttttatacaattgacttaaatatattgyttcattaaaaaaaaagaaatagagaaaatgtccaaagaattagtatctttctctctttgaatgccctcctgccaatacctgcccctggttatgttactga

SEQ ID NO: 41201 - DNA, 201 bp, Homo sapiens
gatttgtcatggatggaggtcccaggtgaattcactaaggaccacaatttttgctacagaaaaggtaataatccctcatttgctggtttgatcacctggaygtttcctgcacaaactctgctgcagctgtgcccaaagccctccaaccattcctgattgaaccacgcagggagcagagccagtgctggagcagacagcaga

SEQ ID NO: 41202 - DNA, 201 bp, Homo sapiens
accatataactactattaactaaagtatgagctttgttcagaaccagcttttccactgtcttgtcttctgttccaggatccacccattcctaataggtctyttatttttaataaatcaaggtgaaattacacctgatatttcttttttttcttttctctctttctttctttctttttttttttttttttgatatggagttt

SEQ ID NO: 41203 - DNA, 201 bp, Homo sapiens
tatggtccatatttgcatttccaccgcccccatcccagaaatgtctttttatggcctttttattataaggttgaccttttgaagaaaccaaactagttttytacagactatcataatgttttagttttttctagttgtttccttgtgatgtttagcccaattctctatctcctttgtttcccgtacactgggatttatgct

SEQ ID NO: 41204 - DNA, 201 bp, Homo sapiens
tgggtccaagagctcattaggagtctgggctgcagacacagaggatggttccccaacatatgcatggtagttagaaccaggtgactccactcggtggatcwtctggggtagcagggcgagcacctggagaagggaatgttcacacataaggggttgaggaaggaagagagaaaaacaggctgagctacttagaaatgtttt

SEQ ID NO: 41205 - DNA, 201 bp, Homo sapiens
caggattgattggtgaactgagtgagaaaaagaggagtcaaagataattccggattttcagcctgagaaactgggtgaatagtggttccattttctaatasttaagaagcccaggggatagggtggggtgggggactggtgggaactggtgtagtgttgtccttaaaggaatggtctccagagtccattggcccaagttcc

SEQ ID NO: 41206 - DNA, 201 bp, Homo sapiens
tccattttctaatacttaagaagcccaggggatagggtggggtgggggactggtgggaactggtgtagtgttgtccttaaaggaatggtctccagagtccrttggcccaagttccaatcccaaatccacccctttaagcagatagttaatgccagttttctcatctgtaagccagggattagtcataactgataagatgca

SEQ ID NO: 41207 - DNA, 201 bp, Homo sapiens
agaaatttctacagggtgtgctcaggtaagaaaaggaaatgatcccacaggaaatatctgagaagtaaaatggattattaagctaaggtattagtaaacakgtggtcatatttaaatataccttgactatataaaacagtaataagaatgtctaatgtgtgggttaaaaatgatagaactaaaatattgcataaaaatagc

SEQ ID NO: 41208 - DNA, 201 bp, Homo sapiens
taagatgcatgtgaggattaaatagataagggaaaatgtttttcttagagttgagaaaacgtggtccatagtaatttgtaattatttgtttaatatctacycactctactggaggctccttcggggtgtggtctgcatctcttttgttacccatttattccttgccatagcataaacttggcacttaagaggagtccattc

SEQ ID NO: 41209 - DNA, 201 bp, Homo sapiens
tccctctgcagtgcctggcacatgctggtgctcagtgagtgccatttgctttgttgcctttctcccatgagtgagcatttagattgcatgtcttagatggrgggtgggaagaacagggagaaagaattgtagaaataataatatcagcctttcaaaaagaaaaacattaaatttgccaggagagtagttgtcaggtataaa

SEQ ID NO: 41210 - DNA, 201 bp, Homo sapiens
aacatagtgagaccctgtctctacctttacatatatattttataaatttttttttttaaaagagaattgcagattttcaggccccacctgaaataaaaacyccaatggtaggaccaaccatttgtgttttaacaaaccatgcaggtgattctgatgctgctaaaattcaagaaccgactctcctagaagaactcttgcatc

SEQ ID NO: 41211 - DNA, 201 bp, Homo sapiens
accatgcccaaatttctgacctacagaaacaagataataaacatgtgttgtaagtttgtgtaaattgttacctagtagtagaaaaccaatacacaataccrtataactactattaactaaagtatgagctttgttcagaaccagcttttccactgtcttgtcttctgttccaggatccacccattcctaataggtctctta

SEQ ID NO: 41212 - DNA, 201 bp, Homo sapiens
tgttgttacgctatacatgtctgattggatttatacaacaaactgaagccaggttctattgtagttcatttcccattatccccctgtcctacttttaatayggaagaactcttatcaactgtgtagcatttttatctcatatcttcttctattgttgcctctaccttttgtttcccttggggtcatggtgatggaagaagt

SEQ ID NO: 41213 - DNA, 201 bp, Homo sapiens
aggttctattgtagttcatttcccattatccccctgtcctacttttaatatggaagaactcttatcaactgtgtagcatttttatctcatatcttcttctwttgttgcctctaccttttgtttcccttggggtcatggtgatggaagaagtggataactgtgcttctgaatagtcttttatgtggagaaatacagtttact

SEQ ID NO: 41214 - DNA, 201 bp, Homo sapiens
tttgtttcccttggggtcatggtgatggaagaagtggataactgtgcttctgaatagtcttttatgtggagaaatacagtttactcctctggacatcatgktggtgacccactttatgtattctttaatattctaggggtttttgttcatagagagaagcacctgctactatttgtaatttagcgctcaaactattaaatt

SEQ ID NO: 41215 - DNA, 201 bp, Homo sapiens
ctggtcatctggctaggctccattttatatttgtccacaatttgttacagcagtaagattttggagttatactttccacacaagttctagtttttttgaarcatggtgcttctcccagaatgttttcttttccaagttttgcttggctggcatctcatagtccattgtcctgtcctcctaatctttgcctggttctttgca

SEQ ID NO: 41216 - DNA, 201 bp, Homo sapiens
atcatatggaagctaccatatgatctattactatctccattagtaagacatggaaggggtattatctcctaggatatgagggatgaagtctgtggttaatrcacctcttagaacatttagcgaattcatcatcttgacacacttcgattttctttccccctggtttttaagtatgttaaagccttcctgttattggtctac

SEQ ID NO: 41217 - DNA, 201 bp, Homo sapiens
ttgggaacccacatagctgtcttaaatttaagttggttttgttctctttgtttttgttagaacgggaagtttctctaggaaggaatgagcatgtgattccrccagcagccggcaggtggcaatagtaggcagtagagtgctggcttttcttccccattgcctggctggcagatggccttgttctcagaataaactgggatc

SEQ ID NO: 41218 - DNA, 201 bp, Homo sapiens
aaaaaacaaataaacaaaaaaaaaaaacctggagattacaaagtgatgagaagctgttaaatgaagtcaaaacagctagaagcgtcttgccagaaccggayaggcacatggtgcatgttccaggatctcacggcatcaggtagtgtgctaagaaggaaagtaaataatgactatacatatcgtcatctgatttgtttgtaa

SEQ ID NO: 41219 - DNA, 201 bp, Homo sapiens
aagtcagaagtaagcagaataatgtcttcaaactgctgagggaaaataacagacaatctagaattgcataacaataaagctatcagccaaaatcaaaggtwaaaataaagattttcttaatccaaagactaggtgagcttaccactcacagaccattgttaaaaaaattactaaaaatgtaattcaatggaaggaaattaa

SEQ ID NO: 41220 - DNA, 201 bp, Homo sapiens
gaaggcattctaaggtccttttattttcaggaggacagaaatacgattaacttatatactaaaaatttaacataactgataatagaaataacacttccaawccagttgggggaggggaatattaaagctatccacctgacagaaaacaagaaagaaggaaagaagcacataataaattaaaaacacaaaataagttttcat

SEQ ID NO: 41221 - DNA, 201 bp, Homo sapiens
aaaataagttttcatatgtgtgtgtatatatgactgcaaaatataggtacaggtctaccagtttttgcaataaacaaaattatcatcttagtgactatatrgattttgttttaattagccatgtgctactaataaaatacacttaaaataatgcaaagtttattagctgggcatggtggaatatgccttagtcctagctac

SEQ ID NO: 41222 - DNA, 201 bp, Homo sapiens
gatcacttgaccccaagacttcaaggttacagtgagctatgattatgccactgcactccagcctggatgacagagcgaggccctgtctctgaataataatratgcaaagtttagaagtcctacactgccctgtggatttcataattgaacaatatcagggtgtgaaagtggcattgaaaaacactatgatttcttgcctaa

SEQ ID NO: 41223 - DNA, 201 bp, Homo sapiens
aggttagatggtataaggacaatgttggcctgtaggagatgctcagaagatattagtacctcctccacccgcattcgtttccacgtagtcctttccttttytttttttttaactactggtaagcaaattcccatttcttcttcccttctttctttattattattattattattattacattttaagttctagggtacatgt

SEQ ID NO: 41224 - DNA, 201 bp, Homo sapiens
caggcatattttctcatagcataccataattttctatgtctagtcagctcatacctgggttaaggtgtgttcaggcctgataggcaaataaacttagccasgtttctgaacctaaaaagctcaggtgcagactgatcaatcaccaggataataaacatcactctggtgtggctggtggcctttccccatgtgtttatgtct

SEQ ID NO: 41225 - DNA, 201 bp, Homo sapiens
ctttttgtaaaatcaggaattagtatgtggattaggttagatggtataaggacaatgttggcctgtaggagatgctcagaagatattagtacctcctccayccgcattcgtttccacgtagtcctttccttttttttttttttaactactggtaagcaaattcccatttcttcttcccttctttctttattattattatta

SEQ ID NO: 41226 - DNA, 201 bp, Homo sapiens
gtaaaaggcccacaggctggcttccaagaggacttatacggtgacatttattatcttgatgatttaccagtctggctcttagcttttcaggttcagaaacygatttaatcaagatacagaaaagagattcattatcagagttggtctcaccttaaccaagctcacaagattgatctgtaaagcaaaatgccacttgacatt

SEQ ID NO: 41227 - DNA, 201 bp, Homo sapiens; identical to SEQ ID NO: 6584

SEQ ID NO: 41228 - DNA, 201 bp, Homo sapiens
acagtaactatataaaaacaattatgcagatatacttaagttttacaaagttgccatgcagcccccaacaataaaaattgtattttaatatattgcaatcrtattatttggtagggcttaatacctttcaaaccatttttgtgtgttttattgaatctgaactcctgggctcaattgagccttcctctttggcctcccaac

SEQ ID NO: 41229 - DNA, 201 bp, Homo sapiens
ttcaaaccatttttgtgtgttttattgaatctgaactcctgggctcaattgagccttcctctttggcctcccaacatgtggagattaaaggcgtgagccayggcgcctagcaaatttgaacttatgaataagcctttcaaataggataggcattacatcttttggaaagactgaaacacagacaaggtggtatgcctacca

SEQ ID NO: 41230 - DNA, 201 bp, Homo sapiens
tccacaggtttgaggttctcagctttccttaagcgacccagcagctccgctgttttcagagtgaatatgttaagctttgatgagattctattttcagtaakttagtgcttctgggacacttggagaaagctgtgagagtcattgtctacgcaaagaacaacgaagctgatcctaaaagtgatccaatctaagaaaatggta

SEQ ID NO: 41231 - DNA, 201 bp, Homo sapiens
gcctagcaaatttgaacttatgaataagcctttcaaataggataggcattacatcttttggaaagactgaaacacagacaaggtggtatgcctaccatttrtccagtgctatgctaaggactgcatacttttatgtctaatatttttaaatctgggaggtaggttgtattgtccctgttttatagatgaggacacggaaca

SEQ ID NO: 41232 - DNA, 201 bp, Homo sapiens
tgtgatttgccttttggggaagctgtatgttgcaaatgctggggatagcaggtaagcagatgagctgtctgattcttgctaatttctaatgccttctgatstttttattttgtctcaaaaattaaatgattagaaataattaaagacaggccttctacatcagaatgaaaatgcatttaaggacaatcaggttgatattac

SEQ ID NO: 41233 - DNA, 201 bp, Homo sapiens
gcatcatatataattaaatatttgctgaatgaatatataggtgaatgggttagtgcgagtcctctcaccaaatgtggtaaaatggaacctgctctgggatygcagtaatgacatggatctgggctctgatctgccattcagcaactttgtaactttcacctccctgtgtttcagttgtcttttgcttcagtgggggataat

SEQ ID NO: 41234 - DNA, 201 bp, Homo sapiens
atgactcagtagtctggaacagatgtcccagagcccccatataactcacccagtatataggttcttgatcgctttcacagatgtgtatctgaacagtaaaraatatattcactgaagagtatagtgatccacttgtaattctttcggcaagactcgacaactgctaaccttgtggcacttttagtcaccaaagatatgagt

SEQ ID NO: 41235 - DNA, 201 bp, Homo sapiens
cttgatcgctttcacagatgtgtatctgaacagtaaagaatatattcactgaagagtatagtgatccacttgtaattctttcggcaagactcgacaactgmtaaccttgtggcacttttagtcaccaaagatatgagtcttagttattctaaaggccctctgtcgtgatactaggtaagaacaaaaaagcaccagcctcaa

SEQ ID NO: 41236 - DNA, 201 bp, Homo sapiens
aaactaatggttcatcttattggttgatcttagactggataaatgtaccaggcactgagccttttatgattgctgcttttatggagtttcccatataggtrtgatatgagtatttccattcgtatatggaatgcattttcccagagagagtgtgtaacaagattatgaagaacttacatcacttttaaggaaaaatatgct

SEQ ID NO: 41237 - DNA, 201 bp, Homo sapiens
tttttgatgcccacattgtcccatcttggctagtgatttgtcttttcatcactacccctgagctccatgaacatcttctatcttcctactagccacacgtkgagccttgccaatccctaactttccccgccccaagatatggaactaccctctaagaaaccctggcttctttctctggagaacagtttgacaccaaaatct

SEQ ID NO: 41238 - DNA, 201 bp, Homo sapiens
tgtcccatcttggctagtgatttgtcttttcatcactacccctgagctccatgaacatcttctatcttcctactagccacacgttgagccttgccaatccytaactttccccgccccaagatatggaactaccctctaagaaaccctggcttctttctctggagaacagtttgacaccaaaatctaggtgctagttttatt

SEQ ID NO: 41239 - DNA, 201 bp, Homo sapiens
caacagaatgctctttgctgtgattagaaggcaccaaacttgcaggactagaatctctgctgtgttctgagcaaactacatgatgcaaaaatgtatccggytacatggaaatagaggcggatgactctccaagttctctatgttcccagagcttgtctgggtttaagtggtggtggcagtaagggggaaagaccagagagt

SEQ ID NO: 41240 - DNA, 201 bp, Homo sapiens
ctgggtttaagtggtggtggcagtaagggggaaagaccagagagtttagagagggtgagatctcagatgtgactcggaaattatatcatagcacatggaartagaaatatgtaggggcattgagaaaggcatgctcaaattagtccttgaactctggaaacagaatgtgtaaggtcagcatagcaattgggtatagccttg

SEQ ID NO: 41241 - DNA, 201 bp, Homo sapiens
tgaaggttcagaaagcagcctccatttactgagcactgtggttagacttggggcctgattcctttggaaatacagatggctggcagaaaaaaaggaagcaygaggtggttgccaatcctgcattgctttttgcaggaaggtctcaggagagtgggtgtggggagaggggagtcaagggagagcctctgtggattccagaat

SEQ ID NO: 41242 - DNA, 201 bp, Homo sapiens
taaacttagccatttcctcattgatttaccatctagtttcagttatattgagtttaaatttttaattttttttagtgtttttagggatgggggtctctctrtgttgcctaggctgatctcaaactcctggcctcaagtggtcctcccaccttggcctcccaagtgtctggtattacaggtgtgagccaccacgcccagctt

SEQ ID NO: 41243 - DNA, 201 bp, Homo sapiens
ctgggaatgtggttcacactgcagacaaagtgctggaggagaacagagccaggggccaatatccaagaagtcttagtcttacccaggcatgtggatttgtstgttcgtttccatctgaatgggtctgatcgggagttcatcatccttcgctgttggcctcactcctgagcatgtcctcgggagagtgccacagctctcgct

SEQ ID NO: 41244 - DNA, 201 bp, Homo sapiens
agattgccatgccaaggctgggtgtccttcattgggatcccacaccattccagctattggggctgtcacacacaaggtgtacccatacatgcttcatcagrggctgaagtgtggacaaggttcttacagggtatggacacctgcttgataggtcattgtagacattgtattgtcttaatcaaaggctccaataactgtcta

SEQ ID NO: 41245 - DNA, 201 bp, Homo sapiens
tcactcactcccttgagaattccaccaatctatttgtgagggatctgctcccatggcccaaacacctcccaccatgccccacattcaacattggggatcaratttcaatatgagacttggtggggtcaaacaaacaaaccctatgcaaaccgtagcagtagggcagtagaatttgctttctaatgagtcccaggtgctgct

SEQ ID NO: 41246 - DNA, 201 bp, Homo sapiens
tgagctccttttctctaagatctaacacgtgtgtaattcaaacatgggttcaaaagtgctcatcttgaagtagtctagaaatccaccagcagccactaaayccaacgtagatgagggaacacgggttgcatgtagctgtaaggcaagaagaaggaatggagagaccgagagtgacatcagctggagaactaagggaggtgg

SEQ ID NO: 41247 - DNA, 201 bp, Homo sapiens
ttgcatgtaaaaatcacattaaaggggatatctccttaattctttctgagactattggcttgccctctcttctatgttcagtaaatattcagtatctcttktataccaagcccagtgctaagtcccgctggtgataaagaggacacatagtggaactgctctggggatgccccgctaaatagacgggggtgttgctgaaac

SEQ ID NO: 41248 - DNA, 201 bp, Homo sapiens
cacagagatttcccatattcactcaacccacacacaaaattggcacgatcattgttcactgcagtcttgaccttccaggctcaagcgttcctcccacttcrgcctcctgagtagttgagactacaggtgtgcacaaccacacctggcttatttttttgtttgtaagatggggttgcaccaatgttgcccaggctggtctca

SEQ ID NO: 41249 - DNA, 201 bp, Homo sapiens
gtgtgcacaaccacacctggcttatttttttgtttgtaagatggggttgcaccaatgttgcccaggctggtctcaaatacctgggctcaagcgatccttcyacttcagcctcctaaagtgctgggattacaggcatgagccaccggcatgtccaacctggaacactttttaatatgtttatttgccttctgtttatctttg

SEQ ID NO: 41250 - DNA, 201 bp, Homo sapiens
gtgctgggattacaggcatgagccaccggcatgtccaacctggaacactttttaatatgtttatttgccttctgtttatctttggtgagatgcctgataargtctttggcccattttctaatcaggctgtttttttattgttgagttttaagagttcttagtatgttttcaataataatcctttaccagatatgtctttgg

SEQ ID NO: 41251 - DNA, 201 bp, Homo sapiens
caaatattttctgccagtctgtggtttgtctctccattttcttgacagtgtctattgcagagcagaaatcttaattttaataaagtctagcttatcaattwtttctttcagagatcgtacctttgacattgtattttaaaactcattgccaaactcaaggccacgtagattttctactacgttattttctagaagttttat

SEQ ID NO: 41252 - DNA, 201 bp, Homo sapiens
ttctcagatagtgccctgggtagattctttccatctccatcgtgtgccacaccctgatgggggtcaaagcggggatgaagaacatgtttccttttcagtayaggtaacattttaaaaatagaaacaggcattgagaacaaagtagaatttagtattagacattaaaatagagggcttcaggctgggcgcggtggctcacgc

SEQ ID NO: 41253 - DNA, 201 bp, Homo sapiens
ttgactgtatttatgtgggtctatttctgggctctgtcttctgttccgttggtctactggtatttgttcatttgccaacactagacgttcttgataaatgyaactttacattatatttttatatatatattttttaaatttttttagagacaggatcttgctatgttaccccagatggacttgaactcctgggctcaagta

SEQ ID NO: 41254 - DNA, 201 bp, Homo sapiens
gacttccgtgttacaaaatacaggggttccttgcaagattatttatttagcagtattatagctccatggcccacttcctccttgaaacacccttttcttaygttggcatctctgacgatagtttcttggttttcttctgtcttcctgggatgctgtgtctgaagtttcctttgctggctcttcctttgtctgaacaaccag

SEQ ID NO: 41255 - DNA, 201 bp, Homo sapiens
tccagacccttgactgaaacaactactggacgactccccttggcttcttcctcatgggcagagctctgaattttcaatgcctttgttccctttcctgtaaytcctgcctctccctccattttataaatttcagcaaatggtgccaccatccacctagttgatgaagtggatactcaggctctgttctttgtctcatcatca

SEQ ID NO: 41256 - DNA, 201 bp, Homo sapiens
tgactccactcggtggatcatctggggtagcagggcgagcacctggagaagggaatgttcacacataaggggttgaggaaggaagagagaaaaacaggctkagctacttagaaatgttttgaggtggagctgagcacgggacaagtgaaagaattgtggtggcataagtctgcagaatgacacaattttctcttcccagcc

SEQ ID NO: 41257 - DNA, 201 bp, Homo sapiens
tgggtttctgagtgaatgtacctttcctcgccatcctctttcttacattcaccctgtaagggtgaatcgaagtatttccttcaatttgccttcctaaggtytagtgtgaccttttaagatcagagcaagctcactggtttccatagcaacactcacttttcttctgattaggatttttggggggaattgcctagtaagaac

SEQ ID NO: 41258 - DNA, 201 bp, Homo sapiens
ccatttgtccagtgctatgctaaggactgcatacttttatgtctaatatttttaaatctgggaggtaggttgtattgtccctgttttatagatgaggacayggaacagctaagagtataagtatcttaccaaagctaatttgaggcagaacctggatgtttcctgggatttgttttggggcttttgtccttttcactgcag

SEQ ID NO: 41259 - DNA, 201 bp, Homo sapiens
tgttttatagatgaggacacggaacagctaagagtataagtatcttaccaaagctaatttgaggcagaacctggatgtttcctgggatttgttttggggcktttgtccttttcactgcagccatctactctctgatacaaccctactttcaatatacatactaggagagttccttgttaacacgaggagcaacgttctcat

SEQ ID NO: 41260 - DNA, 201 bp, Homo sapiens
atagtagcctttcacatagcctttttgtaagggttatcttgaattctggactattcacctttatttaaggtaaagcagtagcactgtggtgttctgtaagrcttatctcactaatttgatttgatgtgtgactttagagaagttttatagccctgatgttactataagcaggtgaaatgatacctgatatttcatgaactg

SEQ ID NO: 41261 - DNA, 201 bp, Homo sapiens
aatagtgctgcaataaacatacatgaagcactacagaatattctaatgtgcaaccagaattgaacccctggtttattcatatcgtttacatctattttgargaggagagaagatccaccacagcctccagaggaggatagagaaggaaaatagcgaaagaaacacttcctgctaaacggtgactcattgggacctcctgct

SEQ ID NO: 41262 - DNA, 201 bp, Homo sapiens
aagtgatccacctgcctcggcctcccagagtgctgggattacaggcatgagccaccatgcctggcctcttttttttttttttttttttttttttttaagcrtaatcattgtttcaaacaaaatcttagaactccaacccctaccctccagccaccatcctcccatgggaccctttttaggactggtaggattccttaaaac

SEQ ID NO: 41263 - DNA, 201 bp, Homo sapiens
atgagccaccatgcctggcctcttttttttttttttttttttttttttttaagcataatcattgtttcaaacaaaatcttagaactccaacccctaccctscagccaccatcctcccatgggaccctttttaggactggtaggattccttaaaacacactttaaaaaccagaccatcaagtgttaaagctacttctgtctt

SEQ ID NO: 41264 - DNA, 201 bp, Homo sapiens
gctcccccacctccccttccccctctcctcagatagtttgcacagtggctagatttacaaagccattctcttcgcagtgcccccagtgctgagttcattcytgatggagtcttcccttgctctccctatcacccccttggctctcacctcctgcgcatggtgtcattggtcccggtgccagaatccccaagctggggccca

SEQ ID NO: 41265 - DNA, 201 bp, Homo sapiens
tccacattatttctgtgaagtggcactcagcccccattggaagcctcaaatgatggtgaactcagacttttgggcaacactgtttcaccttgttcagctgrtttccgctcttggggccagttctacgtcctggggacctatactgtacataccctctcccatctgactgcatataatttcaaaacagctctcctgcccact

SEQ ID NO: 41266 - DNA, 201 bp, Homo sapiens
cttccttttccaggctgcatcaccccttcaagttactgtgtgtactattgctccctttttaagaaaatcttcccctccttgtcttagtttgtgttgctgtwaaggaataccaaaggctaggtaatttctaaagaaaaaacatttatttggctcatgattcttctggctggaagattgggcatctggcgaaagcctctggct

SEQ ID NO: 41267 - DNA, 201 bp, Homo sapiens
agacttggtggtacacacctgtaatcccagctactcgagaggctgaggcaggagaatcgcttgaacccgggaggcagaggttgcagtgagccgagatcgckccattgcactccagcctgggggccaagagggagactttgtcttgttaaagaaaaaacaaaaaaagaaaaaaaaattttcaaatgtgcagaaaagttgaaa

SEQ ID NO: 41268 - DNA, 201 bp, Homo sapiens
cttcattccataacactgagctcagatgcctcttcatctgtgatacttcccctgactcttcttttgttgacttgcctcctctgtattctcagatcccttgygacataggccttgagtatggcattaattcaagcaaattgtagtttttgtgagaagggccaatggactaaatgtgtgcatccctcccctcccaatgcatat

SEQ ID NO: 41269 - DNA, 201 bp, Homo sapiens
ttgcaacctgaaattggtaggaaacaaagaatgaccttggagttgcatcatctatgagactttcaaaccaaattattaccatcccgggcaatatttttctyttgcacttctttcctgctgaattagtctcattgcacacacatctctgtttgccttttttttttttttttttttttgaaacggagtttctctcttgttgcc

SEQ ID NO: 41270 - DNA, 201 bp, Homo sapiens
ttctaattaacatgtttatacctcatctcagaaattctgatgagattacaaaagccacacattaaactttaggtttatggagaaacatttggctagaaackgaatgctgtatttattttcatagatccaggtttcaaaagcttagtgagagcttagagcaggactttgtaaatcctgaaagttaatattctgtgacccact

SEQ ID NO: 41271 - DNA, 201 bp, Homo sapiens
aaagcttagtgagagcttagagcaggactttgtaaatcctgaaagttaatattctgtgacccactgtaagagttacagatgccacagacctgccctgtgcyatccatgtgttcttttttgtttttgtttttaattgagatatgatttatatgccgtacagttcacccatttaagatatacaattttggccaggcatggtgg

SEQ ID NO: 41272 - DNA, 201 bp, Homo sapiens
aaacaaatccataagagaaactccaggaagatggttgttttcattgcaatgtacctttatacccttgttcttaatatctaaagccacatatagggtattgrtgaatcagtgtatgacatcatatacagcaaggtgtacctccagaggcacaagtcatgttgttatctgtgtgactgtgtgtacttcgcagcacgtagtggg

SEQ ID NO: 41273 - DNA, 201 bp, Homo sapiens
ggtattgatgaatcagtgtatgacatcatatacagcaaggtgtacctccagaggcacaagtcatgttgttatctgtgtgactgtgtgtacttcgcagcacrtagtgggtacagcacacagtgggtacagtgagtggttcagaccaggtctgggagtcatttacacctggtttttatccaggttcttctagttttggctgtg

SEQ ID NO: 41274 - DNA, 201 bp, Homo sapiens
tgagccgagatcgcgccactgcactccagcctgggtgacagagtgagactctgtctcaaaaaaaaaaaaaaaaaaaaaaaaaaaaaaatagtgctcataaratgtatttcaggagaggaagctactttaaagtcattgtatcagctatgatgagatcctagcgtgttttgtttccctgcggttatatttagcactaatatg

SEQ ID NO: 41275 - DNA, 201 bp, Homo sapiens
tctcaaaaaaaaaaaaaaaaaaaaaaaaaaaaaaatagtgctcataagatgtatttcaggagaggaagctactttaaagtcattgtatcagctatgatgaratcctagcgtgttttgtttccctgcggttatatttagcactaatatgggtctatgggaggaggcaggaaggtgaattcagaaggaaagtaggtaagaggg

SEQ ID NO: 41276 - DNA, 201 bp, Homo sapiens
tacgtcctggggacctatactgtacataccctctcccatctgactgcatataatttcaaaacagctctcctgcccacttgtgttttcttttcctaagttgracatcctcgtgtgtcatggttttaagtctttttaccatcttgattacttgccttcataggttagtttttctctactccttttatgggtagcattaagcac

SEQ ID NO: 41277 - DNA, 201 bp, Homo sapiens
tttaactttttcaggaattgccaaactgttttccaaagtggctgcaccattttaccttcccaccaccagtgataagggttctaatttctccacatccacascaacacttgttattgtatctttttttataatacccagcccagtgggtgtgaagtggtatttcattgtggttttgatatgcatttccctaatgactaaaga

SEQ ID NO: 41278 - DNA, 201 bp, Homo sapiens
atctttttttataatacccagcccagtgggtgtgaagtggtatttcattgtggttttgatatgcatttccctaatgactaaagatgttgagcatttttccmtgtgcttattggccatttgtatgtttctttgcaaaaacgtctattcacatcctttgtccgtatgttctataagagtctaatattagcattaagtccctgg

SEQ ID NO: 41279 - DNA, 201 bp, Homo sapiens
actgcactatgtaattactgtggatgtcctaccctcccttctgcttttgatagttcctgggattagagtagcacttcaagtgtttgttcaacaagtatctrttgaacatctgcaatatgccaggccctgtgttgggtactgggagcatctaaacatggtcctgctcctcgatgaaggattgggaaggcctctctctgaggc

SEQ ID NO: 41280 - DNA, 201 bp, Homo sapiens
accttgggcaagtgcttcagtttgcacatctataaaatggtaccattaatattacatgcccctttgaattctgaggattaagtgaatttatatgtgtaaakaatttagaataaatcttaaaatgaatgaagtgtcaaatataaaaacatttgaaagtaaaagattttaaatgactttaataagagtactaaaacattattt

SEQ ID NO: 41281 - DNA, 201 bp, Homo sapiens
ctggcttctaagaagtctgattggccttgaactgttcttggtattaagaaaactgctttcaatccttggtagcacactgcaggtttaggacaagccagggsaggagggcagttatcatgcatttggcagccttttggtaacctacactgctctcaaccttgtcgaagtcccacagtcctattacatcttgttagacatggt

SEQ ID NO: 41282 - DNA, 201 bp, Homo sapiens
gggcatcataagcaaattccaaaagaacatttgctttctttgctggataaatgtactcataagtcaagaccatcctggctaacacggtgaaaccccgtttytactaaaaatacagaaaaaaaaaaatagccaggtgtggtggcaggcacctgtagtcccagctatttgggaggctgaggcaggagaatggcgtgaatccgg

SEQ ID NO: 41283 - DNA, 201 bp, Homo sapiens
gtcaaggaatttgtgaacaggctttaaaaccaccagaggggataagtgtagatgtcaggaagtaccaaagtcagtgctccaaaccctagtcctggaggaaytggacaggctctttacctcccagtgggatagcaagacatcaaaaggacagggtcggggagccctgctgagatcaagggacacaggaagaagagagtaaaa

SEQ ID NO: 41284 - DNA, 201 bp, Homo sapiens
tccttatgcacttgtattatgtcactgttcacctatgtttgtgcaagcatggctgaaggactaacatcaaaattcagaaactggtttctgtaagaaatttrctctaaatgctgagctgacagagattatgttcagaagaccagtggcagcactgaaaagtcagccatgtgggtgattcttacaagaggcttccatccctgt

SEQ ID NO: 41285 - DNA, 201 bp, Homo sapiens
ctgggagccgcgcgcggcgcgtcccagtggcccgactcgccgtgcgcccggcgcccaccgcagcctgcatgccccgcgctgcgccttgcccggcccccgcmgcctcctgctcgcaccgctgcagccgggcgccggagtaatatgctcactcgagtgaaatctgccgtggccaatttcatgggcggcatcatggctggcagc

SEQ ID NO: 41286 - DNA, 201 bp, Homo sapiens
ctttccttcacatgcctgaaatgttgccaccccccttgtgtggttagcttggccagtaggaaggtctctaatgattccacttagcaattttttcagtgatstggatgaagatggcagggctgcttatcaaatttaacatgatatagcatagacagctgatattttggatggaaggatctgagttcaggaagttgtcagtga

SEQ ID NO: 41287 - DNA, 201 bp, Homo sapiens
ttttgcaacctgaaattggtaggaaacaaagaatgaccttggagttgcatcatctatgagactttcaaaccaaattattaccatcccgggcaatatttttytcttgcacttctttcctgctgaattagtctcattgcacacacatctctgtttgccttttttttttttttttttttttgaaacggagtttctctcttgttg

SEQ ID NO: 41288 - DNA, 201 bp, Homo sapiens
ttttcttgtggactagggtttttcatttgttttcattcagagtctccatatgtaaccctaaaaaaaaatacacataatggaaatagctttgttaatttttwaaaaatgcaaggcccaaatcaaaagaagtaataattttttttcttatttggaccacatcttaagtgttttcagttccgggtaccattttttgaggacact

SEQ ID NO: 41289 - DNA, 201 bp, Homo sapiens
ccagcgggtttgggtcagtttaagaaagaatttcccagagctgttctccaatggaatgggctgacattaagtaccgttaaactcctaggacagtgactttytgtggcagtccattcaggagaggccaggaaccaaggttaggtgtattgtagaagggattcctacacttggggtacagctgtcttggtggcatttcagtct

SEQ ID NO: 41290 - DNA, 201 bp, Homo sapiens
aacatggttaggttttgggctccgtgtagaccagcagtgatttcaatgcaaaaagacatctcaacagaaggaggaataccaaacacaaatatctgatccaygtaggaatcattttttaaacgaacataccccattcatgaaaatgaacacctttcagatcacagtctctggttaagaatcgtgtcagggctaataggcact

SEQ ID NO: 41291 - DNA, 201 bp, Homo sapiens
acttcctttctctcaaataccacccaagtggaggttggttcatttttataatgggttgggaacccattttggctttttttctttttttacctgtttgcccratttttatcctgttgatgaaacagttggtcttagagatgccagcaggcatggaatttgtgcctgaaactacagacgtagggaatgccaaagaatgtgttg

SEQ ID NO: 41292 - DNA, 201 bp, Homo sapiens
tatttctccatggggttgctaaataaaccaaatgtagtgtgcctgtgtttctaccatgacccactgagatcaggtgtagaattctccacttgtgatgtcaygtccgtgctcaaaagttttggatttcagagcattttccagacttttggattaggagtgcccaaactgtaatatgtgcataaatatgtattattattgcct

SEQ ID NO: 41293 - DNA, 201 bp, Homo sapiens
agagctaactcaaaaaaaaaaaaaaaagtactgcaagaaggccggctatggtggctcatacctgtaatcccagcactttgggcggctaaggcaggaggatygcttgagaccagcatgggcaacatagcaggacccttgttcttacaaaaagtaaaaaattagtttgatgtggtggcacatgcctgccccagctactcagaa

SEQ ID NO: 41294 - DNA, 201 bp, Homo sapiens
tgtcacgtccgtgctcaaaagttttggatttcagagcattttccagacttttggattaggagtgcccaaactgtaatatgtgcataaatatgtattattawtgccttttttaactggtgaggaagctgaggcacagagctagaaagtgtagatcttgattcgacccaggcagtctggcctcagtgtctagacttacaccat

SEQ ID NO: 41295 - DNA, 201 bp, Homo sapiens
agtgcccaaactgtaatatgtgcataaatatgtattattattgccttttttaactggtgaggaagctgaggcacagagctagaaagtgtagatcttgattygacccaggcagtctggcctcagtgtctagacttacaccatgctgcctctgtatccattagcagttgagacatggagcaggaaaatctctttgagaaagtc

SEQ ID NO: 41296 - DNA, 201 bp, Homo sapiens
cttccttaaggtggggtaaaaatccctatgttgacaagttgttaggaaaagcaaatgagaacatcagtgaaatgagagcatcagtgagaacaagatgtggkacgtggtcagagatagtaaatattagtcttccttccccaccggcttctggaggtcttcacacttaaagattccttgtattcactttcatattaatagaga

SEQ ID NO: 41297 - DNA, 201 bp, Homo sapiens
atgcgtaagtaaatatccagcatttaaaataactaaaattgcccttggactgttaaataatgtaaatgcttaaaccttgttcatttaccatataaacacaraatcttagagttaataccaaactgaggagatgttcctcctttgccaacagtatgaggggtggatatgccctagctcagaagagattggattgagagagag

SEQ ID NO: 41298 - DNA, 201 bp, Homo sapiens
tatgtaggaacgaggctcagcaaatcaagtacagccagagatggcaatgtctcttcgtttctttggagcccctctgagattcccagggtcccagatgcagrctccttatttgcttggcacacttggcctcagggagctgagaggacacagtcctgggtaaataaagcaagatcaagtcatccccaatcctggagtagggta

SEQ ID NO: 41299 - DNA, 201 bp, Homo sapiens
cggacaggagccagcccacagagcaggctgttagactcataaaagaaaatgaccaaatgttgtgttttaggaaaaatcactctggttgcaactcagattayagagtagaaaaatggactatggcactatgtataaattaaggcaaccttccctctggtggtagggtaggggtggtcaccttagcatagaggttgatggctg

SEQ ID NO: 41300 - DNA, 201 bp, Homo sapiens
gagacacgcatgagagagtgcttagagggctccccccatcctctctgggcctccatttccgcatccctaaaaagttaatttttttttcctagaataaaacrtgagagatattcaacttgaagcctaggaaggccactgtaaaatgttacaaattttaaagttagtggcaaaaataatacatgtgtgataattcaagcaaag

SEQ ID NO: 41301 - DNA, 201 bp, Homo sapiens
gcctccatttccgcatccctaaaaagttaatttttttttcctagaataaaacatgagagatattcaacttgaagcctaggaaggccactgtaaaatgttayaaattttaaagttagtggcaaaaataatacatgtgtgataattcaagcaaagacctatttaaaaaaaaaaaaaaaaagtcagcccctcttccccagccct

SEQ ID NO: 41302 - DNA, 201 bp, Homo sapiens
ggaagcaaacttgttttttccaaccagcttatgattagctttgtacctgaaggcccaagaccttccctgctgttagagaaaaaaaattattctgacacttrttacaatgctggggaagactttactcaagtctgttgcaatataggaaaacaacccagctcaataccacgttgacagctggtacttgtaggcaaagagtag

SEQ ID NO: 41303 - DNA, 201 bp, Homo sapiens
ccccaaactcatataccacagtgtttaaaatagctcatgtgagtatgtaaaaacatcaaagtggttatttccactttgtgttagtttggtagatttggggsaaggaaacagtatatttccttttttgaaaattcaattcctagaatacctctcagctcactcaacagcagcagcatttgttttgccaggcacagtgctaag

SEQ ID NO: 41304 - DNA, 201 bp, Homo sapiens
caaggaatcagccccaaatgtaacacattaacccaatgatgttgggtcctaagaagtcatcttttctcgctgctaattgaaaccttagcgcttttggcacygcagtgttcaaaatctgttgtgactcttgggcttcattccatgacaacctgtttctgctcattgcctcagagataatcctctctgggttctgcgtgtgtc

SEQ ID NO: 41305 - DNA, 201 bp, Homo sapiens
gcaaagggtttaaccatgcaggggggtgtttactatatgtttcagtcccagtttaggtagacatccgcatctctgctatgaccccactatacagtgctttyaattaaggttacagcagtactagttgaaaatgtaaaactgcatactggaattgttgtctaaaaatacattaatgttcaagagttatttttaattctcaat

SEQ ID NO: 41306 - DNA, 201 bp, Homo sapiens
tgatgttgggtcctaagaagtcatcttttctcgctgctaattgaaaccttagcgcttttggcaccgcagtgttcaaaatctgttgtgactcttgggcttcwttccatgacaacctgtttctgctcattgcctcagagataatcctctctgggttctgcgtgtgtctgaagtatagtttgcccctttctgccttcctcaact

SEQ ID NO: 41307 - DNA, 201 bp, Homo sapiens
ttgaggagcctttcccaagttgtttttttagataagtggttttcactagctttccagtttggtactacagtagatactttgcaaattattagcttaagaayggtatagcatttgatttgtttggcccatctcccatataccatatagtgataggattatccctatttatactttattagaggcattaaaaattgctaaatg

SEQ ID NO: 41308 - DNA, 201 bp, Homo sapiens
ttcatttttcacagaagggccctaattggctcagctcagagatcaggtggccatccctaaaccagtcacctctggccatggaaaaaccatatgaatgggayggaggagggtgggaaggaaagatgatgtctaggagaaagggagtctgggcagataaaaacatctctgacaggtatatgcactttacatttatgcattctc

SEQ ID NO: 41309 - DNA, 201 bp, Homo sapiens
atgttgacaagttgttaggaaaagcaaatgagaacatcagtgaaatgagagcatcagtgagaacaagatgtggtacgtggtcagagatagtaaatattagkcttccttccccaccggcttctggaggtcttcacacttaaagattccttgtattcactttcatattaatagagaatgggccaggcacagtggatcacacct

SEQ ID NO: 41310 - DNA, 201 bp, Homo sapiens
tcagtccgggcctgctgtgcaggatttactaagaagagacgacaggttaggaggtttaaatattggtgcctgctggatgtgacaagggcctggacaaggcmtggaaatggggatgtaagtcatagttatgacttagccccgcaggctgagaagctagatgtggggagagtagtaagctgggaggacaaggatgctccttgg

SEQ ID NO: 41311 - DNA, 201 bp, Homo sapiens
aacaagcaccacttacagacaaatagggaccagagaaataactccagggagttcagtgtcccatgtttcatctttccagtcttattgggatagagggcatwcaagagttatatcccaacacaattcctctatgccttttttggttacaaaacaaacctcctccaaaacttagaggctttgcagaacaatttctgattctct

SEQ ID NO: 41312 - DNA, 201 bp, Homo sapiens
tgcttataattaatttttttctatggaatgcagaaatcaaatgaggagaaactccaaatattgtaagctttaagaaatatataggcaggcttagaacaccktcattattctagtctctctcccatggggtgttatggcaaaatgagttcatttgtttattcattcaattaacatttatcgagtacctactccgtgctatgt

SEQ ID NO: 41313 - DNA, 201 bp, Homo sapiens
ggagggaggggagggggaaagaggaaagagggaaagagaaagagagagagagagaaagggagaaagagagaaaaggagaaatgaaaatagtcccaggcagmatcagcaaggcttcttaaaacctagcctaagaagtcccagaacatcatcactgtcacattctgttggtcaaggaaatctctaaggccagtccatgtttga

SEQ ID NO: 41314 - DNA, 201 bp, Homo sapiens
acactgagctcagatgcctcttcatctgtgatacttcccctgactcttcttttgttgacttgcctcctctgtattctcagatcccttgcgacataggcctygagtatggcattaattcaagcaaattgtagtttttgtgagaagggccaatggactaaatgtgtgcatccctcccctcccaatgcatatgttgaaatcctc

SEQ ID NO: 41315 - DNA, 201 bp, Homo sapiens
aggctaaggcaggaggactgcttgagcccagttcactagcctgggcaacatagcaaaacctcatctctctgaaaaatacaaaaatgagctggatgtggtgrcacatgcctgtagtcccagccactcaagaggctgatgctggaggatcatttgagcctgggaggttgaggcttcagtaagtcgtggttgtgccagtgcact

SEQ ID NO: 41316 - DNA, 201 bp, Homo sapiens
gacatgtcatccacgacaccctggctgtctacatcaagaggtgcctgcaggcccaccttgagccaccctcagcccttcccctcggcctccctcccatgctyggtggcgaccaaagtccagaggtggctgagatggcagggagctggcatgtcagtgctgccccaagcccccacacacccagccgggtcacgacagtgacca

SEQ ID NO: 41317 - DNA, 201 bp, Homo sapiens
gaggatggagccctcatgaatgggattagtgcttttagaaaagaggccccagagagctgctttgtctcttctgccatgtgaggtcacagtgagaacacaaycatctatgaaccagaaagggggccctcactggacacaaaaacttgctgatatcttgaacttggatttctcagccttcaaaactgtgagaaatttacaagc

SEQ ID NO: 41318 - DNA, 201 bp, Homo sapiens
cttgtcaaagattagttgacaacatatgtgtgggtttatttctgagctctctattctatcagctatgtcataattgagctccttttctctaagatctaacrcgtgtgtaattcaaacatgggttcaaaagtgctcatcttgaagtagtctagaaatccaccagcagccactaaacccaacgtagatgagggaacacgggtt

SEQ ID NO: 41319 - DNA, 201 bp, Homo sapiens
cacttggctcattcagagcacattagtcaaggttcttgtttgcccccagacttattcctgctcccccacactgaatgtttattggcagctccactgaaaasaaaggaagaaaaggaaagagtttgccacttctgttatatatcagcacattacatttgtttgacgatttggaagtgtctcagttaacaaactaaatctgtt

SEQ ID NO: 41320 - DNA, 201 bp, Homo sapiens
tagtgtgctaagaaggaaagtaaataatgactatacatatcgtcatctgatttgtttgtaaggcaaaaatagttcatatattcacccctcaaatttgcatyctctttttatttaaacgtgtcccttctttggtctcagctttttctctccttgttacagagataacatttaccctttgactagcaggtggtttaaaatgca

SEQ ID NO: 41321 - DNA, 201 bp, Homo sapiens
tagatttacaaagccattctcttcgcagtgcccccagtgctgagttcattcctgatggagtcttcccttgctctccctatcacccccttggctctcacctyctgcgcatggtgtcattggtcccggtgccagaatccccaagctggggcccatcctccccatccctttgtgttgagctgctgttgcaggatgcacactgta

SEQ ID NO: 41322 - DNA, 201 bp, Homo sapiens
aaagcgtactgaaggcagcagaaaggcaggtccacacaggtcccattttttagctgctcagattatattgttctgaaaaactgcaagaatctcaaggattygtctggcttttttctccctttcttggtggatgggaacccgggaaggagccattagaaggtctgaccatgtcccccagtcccacttcaaagccgtttctgt

SEQ ID NO: 41323 - DNA, 201 bp, Homo sapiens
tcatatattcacccctcaaatttgcatcctctttttatttaaacgtgtcccttctttggtctcagctttttctctccttgttacagagataacatttaccmtttgactagcaggtggtttaaaatgcaccttgctgggcgtggtagtggtgcatgcctgtcattccagctactcaggaggctgaggccggaggattgtttg

SEQ ID NO: 41324 - DNA, 201 bp, Homo sapiens
ctttccaagtgatgtccaggagccagcatggcaggatcaaagggaagaatggcccagacagaaggaatgaccaggccccctggtgtgtcaaaaaaaaaaaacaaacaaacaagaaagccattgttacaaggcgtagcagagtgatcgacgatgtcagagtgcaaaggccagatcatggagggcctcatcattggattgtat

SEQ ID NO: 41325 - DNA, 201 bp, Homo sapiens
accccatctcttaaaaaataaaattaagaataaaaatgtaaaaataaaatgcacttctatctcaagactgtctgatagcctgcaaccctgcaatcccaatraaaataccaggaggctggaaaagattatttaggaaaaagggaattaaggtaggaaaattgactcccactcagtcgtggtgtaaaatctcactctctgcct

SEQ ID NO: 41326 - DNA, 201 bp, Homo sapiens
ttgtttaggcatttcagcggcatacctttctcacatttttacttcctctaagctatcctctaaagtagaaataatcccatttttgatcctgttgatgagastgatggcaaatgcaccccagcactgatagtcatccattggagaattgtttcttttgagaaatacttggtaagaagagaaagatccaagttaagtatttct

SEQ ID NO: 41327 - DNA, 201 bp, Homo sapiens
tactcagggggctgaggtgggattgcttgagcccaggaggcagtggttgcagtgagccaagatcgatcacaccactgcactccagcctgggcagcagagcwagactccgtctcaaaacaaacaaaaaaatttaaagcatttaaaataggagtcttaaaagagactaaaaaaatgactaaacaatttttaagaaaatggaat

SEQ ID NO: 41328 - DNA, 201 bp, Homo sapiens
gagccaccgcacccggcctccaacatatattcttatatgtcgactgcctaatattccattgaagggcttcccattcatgaatctcccattgaacatttagrtttacttttaggcttttagtgaatatcttcatatgttttcttcagctcattcagttgtttccttatgattaatttctagacatggaaagcttggttagaa

SEQ ID NO: 41329 - DNA, 201 bp, Homo sapiens
aatgtcacattgactcaggactccacaggggtctcaggctgttcctgcccattaatggctcagggttgctcttaacaactgtgctggcaaagaaaggttcwttcagaaaaatacttaagaggctcatttttaaaatatttctacttttaatgaaccaattcattacctcaaatttttcttggaaacttagtcaccagcaaa

SEQ ID NO: 41330 - DNA, 201 bp, Homo sapiens
acggttttcctgtttatattcatttttctgttgagataatgtttcatatttataagagctctttatattttaaggctgttcacccttggcctattatgttktgatattttttctaacatgttcattttttaacttcattttttttctttgcaatgcaaaatttaatatttgggtggtcatacctaatctcctctatggctt

SEQ ID NO: 41331 - DNA, 201 bp, Homo sapiens
ttaatgaaccaattcattacctcaaatttttcttggaaacttagtcaccagcaaaaacaacaattgtttgcttcattttcatgtgtaattcattcaatcartaatatttgttgagaaccaactagaagccaggcctgactgggaaaagaatattgagccgattaggcaaagaagggtgttaaacaagtaaaatataaatgg

SEQ ID NO: 41332 - DNA, 201 bp, Homo sapiens
ccagggcacgggtgacttctccatgccaccaacaagcaaccagaccacatcaactgtggcttcaattccaattttgaatttttgggagagagactccaatwggttcagtttgtctcagatgtccaccttctccacaggtgattatggctgccaggacccacccctgaaaatgggcagttctttaaaaaggaggtggtggta

SEQ ID NO: 41333 - DNA, 201 bp, Homo sapiens
ccctgtttgttcctttcaggtttacccccatgccctagcttcctcttcacactttttccccccagattgtctgtctaggtccccaacctgcctacagcttrccggggctttgcactgtgaaaggaaaataaaaactgggcccccaatccactatggaaattggaaatcactaggaaaaaaaattaagctgaaagctgagtc

SEQ ID NO: 41334 - DNA, 201 bp, Homo sapiens
tgggctcagaggcctgacactaaccaccacagcatttcatggagaaaagaaattctcttagctctcagatagttcctgtctaggtgacacctgtcttgggytagatgctccttttttttcctccacagttggaaggtttaaataaaatgtagccagtgtggagagtgagatgattgcaattatggaggcagaaggataaga

SEQ ID NO: 41335 - DNA, 201 bp, Homo sapiens
cttggggctcagcaagggttcacaaagaaataatggaagttacaatctctgagatgtgtagtaattggccaaatgaagagggcacctaataccctgccccmacaatcatcctggccaaacttgatctttgcaaattaattcattgactttgttagagcagtatttcacaatgcaggctgctctcaattgggaagatgtctg

SEQ ID NO: 41336 - DNA, 201 bp, Homo sapiens
atttcacaatgcaggctgctctcaattgggaagatgtctgttttctactaaattacatctaaattatatcagagaggtatttatgtgtgtgtgtatatgcmtatgtatacatgtataattgttctattttaacaacttttttctctctctctcctttcaatgagcatgcttaagtcagagtaaaattcattttccaaaggt

SEQ ID NO: 41337 - DNA, 201 bp, Homo sapiens
atattccatctatgccatttgtaaaattcattgtgattttaggagaattgaaatgctagaagtagatcttagaatcaagaacacatcctgtcttgttcttytggttagtgttatatcttggttgctagagcatcacaggctgtaatgtagcatctagaaccatgggcacttcttactttcctcagaacaccactgttgtac

SEQ ID NO: 41338 - DNA, 201 bp, Homo sapiens
cctttaatatttgtcagtgatctgatagatgaaatatacttcattgtaatctgtttgattattgaagaaaatgaataaacagatgtatatacttatatgtyatagatatttattagccatttaaatatctttttgttgttgttgttgttttttgagacagagtcttgctctgtcctgcaggctggagtgcaatggcacaat

SEQ ID NO: 41339 - DNA, 201 bp, Homo sapiens
actcagggggctgaggtgggattgcttgagcccaggaggcagtggttgcagtgagccaagatcgatcacaccactgcactccagcctgggcagcagagcawgactccgtctcaaaacaaacaaaaaaatttaaagcatttaaaataggagtcttaaaagagactaaaaaaatgactaaacaatttttaagaaaatggaatt

SEQ ID NO: 41340 - DNA, 201 bp, Homo sapiens
acaataggaagaggttgggttaggggtcaagataggctcattctgaatcccagctgtgccacttcctggctgtggagcttctgataagttgcttagctcargcagtaaatgcggtaggattaaccatcatgcaggtagcctcattgtgtccctaatatttacattttatccttaagccatatgaaaatgtctttccttaga

SEQ ID NO: 41341 - DNA, 201 bp, Homo sapiens
atgaaaaggtttttaaaaagtcatttgaaaataatgattttgaactgttaggaggctgtgcaactcaatcaatagagcagtgtacacaccacacttatagrgctaatttttatttagcttaccttaaaaagaaaaaacacaccttttctttccttgctactgagttccataaactccacactcactctgtcaggactgtga

SEQ ID NO: 41342 - DNA, 201 bp, Homo sapiens
gcagagccaaggagagtgggagccactaatgagggaccactgggcaggagctgttagaaggaatgggagaagatatgctgacttctctctgcccgccctcmcatctcttgcctgaccttcccatcggctgaccccagcaggaagccagctgatgagtggcccagggaggtcagcctgccaggacacagacacaggccaggg

SEQ ID NO: 41343 - DNA, 201 bp, Homo sapiens
atatgggtcatacttcaggaaacctgagaacaatgtgagttggtatttttatgtgctatccaaaggatcgtttatgcgacacttactagagtgctatttgmagctcttttacaaacaatagatactgatatcatcttctaggattgttgtctagtttgccatactaataatataggtatttgagcttacagaaatattcag

SEQ ID NO: 41344 - DNA, 201 bp, Homo sapiens
ctttaagtaaacaagttgaaatagctaagaaaactgttaaaataatagaaagggtaacttctaaactagtaaaggagaggaaactcacatggaatagaaamcaaacttctaaacaacttatgaatcaaaggaaaaaattataatgaaaattagaaagtacctgggcctgaataataatacatatcaaaactgtaaaggctg

SEQ ID NO: 41345 - DNA, 201 bp, Homo sapiens
tgttttagtgcattgccagcaagcagtcttctggttgacccaacatttctgcaagaactctcaggattagcacattgggaatgtacttggaagagagatgwtcctaacatatctgtgtataatgtgtgtagtataggtatctgaatatatacaataagctgtgcaaaacaaacatgtctcaggttaggcctaaaagaaatc

SEQ ID NO: 41346 - DNA, 201 bp, Homo sapiens
gaagaaaagaaagatacccttaaccacagagaaagatatttctcagagtgaggccctaagggctgacttgtgttacttggctagttcggtctatattcttygcataaatgtacacagaataattttttttttttttttgagatggagtttcgctcttgttgcccaggctggagtgcaatggcgcaaatctcagctcaccgc

SEQ ID NO: 41347 - DNA, 201 bp, Homo sapiens
aaacttattccaactgtctaatataacattttggtaatccgctttggtgattaagcttgcgtttgactgatcagctatttcaggaaccgactgagttaggytgacgacccagagtggaatcgggaaaggagaggtggaggattttattgcccttcccccagctccatggccacttttccactgactattaataaccatctt

SEQ ID NO: 41348 - DNA, 201 bp, Homo sapiens
aacaggcttaaaaagccaggcaaaccccagctgtcttgtcttttatcatttggtatttcacaggatttgtgcctctccgtacttagattcagggatgtgcwgatttcttccaccagtgttctttgttccacctcctccaaaaagtctccacccatcctctctgcccctacatatctgtatttgctcccttccccttggctt

SEQ ID NO: 41349 - DNA, 201 bp, Homo sapiens
aactgtgcaggctttgctctagagcttcatttccccaaaactgtctgtggaaacttcttttttacttaaaaaaaaaaaaaaaaaaaaaaaaaaaaaattcmccgtgttacccaggctggtctcaagcaatcctcctgcctctgccttggcctcccaaagtgctgggattgcaggtgtgagccatcatgcctggccccacct

SEQ ID NO: 41350 - DNA, 201 bp, Homo sapiens
aaaactcttttagttctagggacatagaactcttgccagtgattaagatggatgattttaaaaccaggaattgaggaggctgatgtcagctagaatccctktaaaggccccttattggtgggtgttggattactctgaagaccaggtttgaccaaaatgtacatagtagctgagaacacaacatggtttcactatagtttc

SEQ ID NO: 41351 - DNA, 201 bp, Homo sapiens
gcagtcattttattatttgtcaggtgaccatcttaacccctcaaccaggaattttcaagaatcaaaggggacactattaataattatgctggaaaaacagrcgcaaatcaaaactattggagtaaacagggatgtatggtcactctctgcctcacctgccttctgggtggacttgaggcaacttggttcatctgttctgca

SEQ ID NO: 41352 - DNA, 201 bp, Homo sapiens
ctctgtctccctgccatgacccttgaggggctttttatgcagtatttatgcagtattaaatctgtaagaaccagtataccataaaccctacagagtatgtytctaatgagagaagccttcctgatgtccacacttgtcagtcttcacatccatgctctccttggctcagatagctgtgtgccttggaaggaagagattaat

SEQ ID NO: 41353 - DNA, 201 bp, Homo sapiens
gtaatgcagtggtttctttcaaaactcttttagttctagggacatagaactcttgccagtgattaagatggatgattttaaaaccaggaattgaggaggcygatgtcagctagaatccctttaaaggccccttattggtgggtgttggattactctgaagaccaggtttgaccaaaatgtacatagtagctgagaacacaa

SEQ ID NO: 41354 - DNA, 201 bp, Homo sapiens
agcagctaatattaccttatcaaaaacacccacttacagagaggttaaaggcagctaccataagtacgcaccaactcctcttgaaacaatctctctgctcrgcctctaggatttcccttccccctccctccccttcactggtggaacctcttcacacctgccactgaaatgcaggctgccccagggtttgtcttcagccag

SEQ ID NO: 41355 - DNA, 201 bp, Homo sapiens
ccagtataccataaaccctacagagtatgtctctaatgagagaagccttcctgatgtccacacttgtcagtcttcacatccatgctctccttggctcagawagctgtgtgccttggaaggaagagattaatcagtgaaaggttaatagtaaaacaccaacactgacaacaggcgttaattcaagtattaaatgctagtttg

SEQ ID NO: 41356 - DNA, 201 bp, Homo sapiens
agctactcgggaggctgaggtgggagaattgtttgatcctgggagacagagattgcagtgagccaagattgcgccactgtgctccagcctgagcaacagascgagactgcgtctcaaaaaaaaaaaagtaaaagaagatgaaagagggggacagtgcatgaggtcagaggcttattaaatacaggccttattgcttttatt

SEQ ID NO: 41357 - DNA, 201 bp, Homo sapiens
agattgcaagaaacagctgtgtgaaatgtgctgtggcattcactgaaggaccctgctgaagagcttgctcattctatcacacagcctcctcttttttcagraccacagaggacttttctctcatatgcaatttaggaaaagcctggggactgagagcagggtaattttttttttgtttctgtggctttttttaattcattt

SEQ ID NO: 41358 - DNA, 201 bp, Homo sapiens
taccataaaccctacagagtatgtctctaatgagagaagccttcctgatgtccacacttgtcagtcttcacatccatgctctccttggctcagatagctgkgtgccttggaaggaagagattaatcagtgaaaggttaatagtaaaacaccaacactgacaacaggcgttaattcaagtattaaatgctagtttgcattac

SEQ ID NO: 41359 - DNA, 201 bp, Homo sapiens
ggatcacttgaggccaggagtttgagaccagcctgggcaacatggtgaaaccccatctctactaaaaatacaaaaaaaaattagcctggtgtggtggcacrcgcctgtagtcccagctactccagaggctgaggcatgagaagactgaggcatgagaatcgcttgaacctgggcggtggaggttgcagtgagcctagatcg

SEQ ID NO: 41360 - DNA, 201 bp, Homo sapiens
ttcctaactaagcggcacgcatggctttgtccagctcctcacacaggccgagcatccgccaccatgcggccttcacacatgcagttgcttctacctgaacwtctctccctccatccttctccatggccccccgtgccagtcctttcagcctcagcctcactgtaccctcctggacctccctgactgaggcatctcccacct

SEQ ID NO: 41361 - DNA, 201 bp, Homo sapiens
ccatctgattttggagggatctcgctcctggaagatggtgataggattttcgttgatgacaagcttcccattctcagccttggcagtgccatggaatttgycacagacaaaatcatactggaacacacagaccatgtagttgaggtcaatgaaggggtcattgatggcaacaatatccactttaccagagttaaaaaccgc

SEQ ID NO: 41362 - DNA, 201 bp, Homo sapiens
tctgcaagtcctacctgtcttggcacacaaatagtgagccattgtagtcaacagtcatctttaaaaagaagagaaaagttcgtcctactcataaatagacygcagtagagagaaaaataaatgcctttggtggcttcacccagtctggctacttgccatgaggaagaaaatgcttgatttggcacttaacaaatggttgta

SEQ ID NO: 41363 - DNA, 201 bp, Homo sapiens
tgtgctttgcgggtactggtccagcacaccttctgtataagagcaacagcatcgcacatggggaaggcacaggacactgggtgctgagaaatgtgggtctrgggacagctgtgctgctaagtggccttggctacttcctccctctggtcctaatttccttatttataagcctctgaaagagctgtgttcagccagcagagg

SEQ ID NO: 41364 - DNA, 201 bp, Homo sapiens
ggagcccctacctctgcaaagatgacttggagacaggccgtcctgctgtcttgcttctccgccgtggtgctcctgtctagtgagtacaggagggtcaaggyggagggtgttagttacatggtaagggagacttaccatgcacaggtaaggctgctcaggtgatgcaggtagaaaggagtatgcttattgttaacatgtgtg

SEQ ID NO: 41365 - DNA, 201 bp, Homo sapiens
tgagactaggcctgagcacgcggctctcacaggtgctaaggaccaaagcaacatctccattcctcacaccctgaagccaccaggcggtcctgttggccatygccacagaggatgccagtttcactttcgctagtaccaaaatcaggttcatgggcttcttggtgaggtccacatttgagaaaacagaggtaagaaagacat

SEQ ID NO: 41366 - DNA, 201 bp, Homo sapiens
agggaaccagtgtatctgtgggcaccatgcagatggcgggagaagaggcgagtgaaggtgagtgcaggggccacccacggggcagggcaggtgcagccagmgaagcagcagccccagcacccccacactgctggtgacaggcctctcccgggtttcagatgcaaaacagaagattttcatgcaggaatcagatgcctcgaa

SEQ ID NO: 41367 - DNA, 201 bp, Homo sapiens
gggacagctgtgctgctaagtggccttggctacttcctccctctggtcctaatttccttatttataagcctctgaaagagctgtgttcagccagcagaggtttttttttttttaagttttcattttcaacacattggggtgagcctgtctgttgcacagcctgctgtagggcctgtggagccccggcttcagggtcctcat

SEQ ID NO: 41368 - DNA, 201 bp, Homo sapiens
ccgttgctccatctaggagcagccaatggaaagggcagcccagccccctcctcctctcccccagtggtatcccagcctcctgcctctctcttccctccccygccttccttcctctcgcctgggctgcctgcctcagaagtggggacccaaagggtgcaggacgcctggtctgccttgtgggtcctggacggagcccctacc

SEQ ID NO: 41369 - DNA, 201 bp, Homo sapiens
gctaggtgcagtggctcacgcctgtaatactagtgctttggaaggccgaggcagttcgatcacttgaggtcaggagttcaagaccagtctggccatcaggrtgaaaccccatctctactaaaaatataaaaattaggcgggcgtggtggcatgcacctgtaatcccagctactccaggtggaggcaggagaatcgcttgaa

SEQ ID NO: 41370 - DNA, 201 bp, Homo sapiens
aacaggtggctttgtctttcctccccagagcaggaagagaggagccgggaggctgtggagcagtggcgccagtggcactatgacggcctgcacccatcctrtctctacaaccgccaccacacctgatcccatcctgaagccggccaagaagacaaagcttgtagcaccattggcatccccgtgttccagcaatctttccca

SEQ ID NO: 41371 - DNA, 201 bp, Homo sapiens
ctgtgggcaccatgcagatggcgggagaagaggcgagtgaaggtgagtgcaggggccacccacggggcagggcaggtgcagccagcgaagcagcagccccrgcacccccacactgctggtgacaggcctctcccgggtttcagatgcaaaacagaagattttcatgcaggaatcagatgcctcgaatttcctcaagaggcg

SEQ ID NO: 41372 - DNA, 201 bp, Homo sapiens
ggacagctgtgctgctaagtggccttggctacttcctccctctggtcctaatttccttatttataagcctctgaaagagctgtgttcagccagcagaggtttttttttttttaagttttcattttcaacacattggggtgagcctgtctgttgcacagcctgctgtagggcctgtggagccccggcttcagggtcctcatg

SEQ ID NO: 41373 - DNA, 201 bp, Homo sapiens
caggaatcagatgcctcgaatttcctcaagaggcgcggcaagcggtcccccaagtcccgagatgaggtcaatggtaaggatgctggagggaccccaccccscgtccatcaccacctctgctcacaccccccggctcctcctctcccacagtcagccgggcagcaggatgcagctgggcacgaagggctcaccccagggtat

SEQ ID NO: 41374 - DNA, 201 bp, Homo sapiens
accgcgcatggcctcttctgtcctcttaagctgactccaaacaatgagctacaccatttagcctgaagtgccttacctcggacagaagctcagtgtgtcarttagtcatgggaggtgcaggacagcctggtgaacacccaggattgtgcatgaatgcatctgctgtcacccagtcaactcctgtggatagcaggagggcag

SEQ ID NO: 41375 - DNA, 201 bp, Homo sapiens
gtgtgtgtcaccatgcctggctaatttttgtattttttagtagagacagggtttcaccatgttggccaagttagtctagaattcctgactttgggtgatcygccagcctcagcctcccaaagtgctgggattataggcatgagccatcccgcctggccaatcacagcactttgggaggctgagacaggaggattgcttgag

SEQ ID NO: 41376 - DNA, 201 bp, Homo sapiens
tgtcctgagtacacaggggacagaggacgcttctttaggaataggcagtgacttactaagtacctgcttcctaaaccctaagcccccgcacctcccacaayggctttctggcgcttggagcaacatcaggacccacagtgggtgggaagagggaagctgagccagcagtggcgtgtgggaacctggtaccctagctctgcc

SEQ ID NO: 41377 - DNA, 201 bp, Homo sapiens
aaaaattaggcgggcgtggtggcatgcacctgtaatcccagctactccaggtggaggcaggagaatcgcttgaacctgggaggcggaggttacagtgagcygagatcacgccactgcaccccagcctgggtgacagagcgagagtcaaaacaacaaaaacaaaaacttgcccattctagacatgtcatctaagtggaatca

SEQ ID NO: 41378 - DNA, 201 bp, Homo sapiens
cttgcatgtccttccagtagtccattcctgctactgtgttgttactttttcgtcttgtgtcttggttgttaagtctttgaaacagggctgcataagcctcygccctcctacactggctgggcaggcagaagagcctgagatgcccggccctggtctacacctgcctgtgaccttcgcccatctgggcctgacttatacaca

SEQ ID NO: 41379 - DNA, 201 bp, Homo sapiens
ttggaatttcattttcccagtgcaggttaaaggtacaaggaaaaaacaatgtttttgtgtgttccaggagagattttacaatttattatcgtgtgcctttgtttatttagattttttagaaggaggtggtaagttttgtgagccacagaatgattaaaaaaatttttttaacttatgtggtttttatcagttacattgagt

SEQ ID NO: 41380 - DNA, 201 bp, Homo sapiens
cacaaggcttgtcagctcacatactctggatcctcaccagtcctggccttctctcaccagggctcacaaacactctcagtgcaggtcaccacagggcaggkgttcggctgatggctgctgggctcagtggcaggtcagagtccccctgtcctaacaggtggctttgtctttcctccccagagcaggaagagaggagccggg

SEQ ID NO: 41381 - DNA, 201 bp, Homo sapiens
cttaaaagttgagaatgtggccttcaaaattccttcagtgtgattttgactcatactattaaaatagcattttattttgagcagttttaaatgttttaggyccaaagctctagcatgtagatgaaaaaacattcactgttttccctttcttgatgaattcaggatgcagggttgggcgcctgcaggtcctcttacaggata

SEQ ID NO: 41382 - DNA, 201 bp, Homo sapiens
acaggagaccctaggtctcacccacacagatggagaaaacacaggcctttggggaatgcagttccagaagctgttgtccttgagcccttgctctgccaggyactgtaagtggccacctaatcctcacgaactgcctctgagacaggtcttgtaatttccagctcatgtttcaaaaatagaggctcaggctgggcaccatgg

SEQ ID NO: 41383 - DNA, 201 bp, Homo sapiens
ccggcaagagcagagggcatttcaaaagatgtaagcaatagagtcaccagggtctgaggactaaggagctgggctgtgaggggcgaggctgtgcatttccsatgactccggagcttctagtttgagtagctggggatgaacagtgagctcattcacagagatggagaaaacagaaaaaagagaaatctcaaaggatatgtc

SEQ ID NO: 41384 - DNA, 201 bp, Homo sapiens
aacttgtctcaaaaacaaaaacaacaaaaaaagggatgctgaatcaacttctacgtcaaaaccacactctcagggttggcaaagagtagctcgtctactgrgcttgagaaatgcccgaaagagctgaagatgaacacacaaagctccggcctgggcctggctctgtgagctccaggctgcccctgggctatcaagtaccta

SEQ ID NO: 41385 - DNA, 201 bp, Homo sapiens
gggaaccagtgtatctgtgggcaccatgcagatggcgggagaagaggcgagtgaaggtgagtgcaggggccacccacggggcagggcaggtgcagccagcraagcagcagccccagcacccccacactgctggtgacaggcctctcccgggtttcagatgcaaaacagaagattttcatgcaggaatcagatgcctcgaat

SEQ ID NO: 41386 - DNA, 201 bp, Homo sapiens
gcctgggcgacagtgggagattccgtctaaaataaataaataaatataatgtgagagttcctcaaaatagttaacagagttacacatgacccaggaattcyacttgtagatatctactcaacagaaatgaaaacatacgtccacacaaagacttgtacacaaatgtgcacatcagcattatccatgattgccgaaggatgg

SEQ ID NO: 41387 - DNA, 201 bp, Homo sapiens
ggggctggactgtttttgattaaaatgggagaagcaatcttctggcagacttccaggggaaacaggcatgattttaggccaggcaaatagcttctgtcctyttttttttttttttttttttttgagatggagtctcactctgtcgcccaggctggagtgcagtggcaggatcttggctcattgcaacctccacctcccagg

SEQ ID NO: 41388 - DNA, 201 bp, Homo sapiens
gcccggcatggtggtgcatgcctgtagtcccagcaacttgggaggctgaggctgaagaatcacttgagtccaggaggctgcagtgagctatgattgtgccrctgcacttctgcttgggcaacaggatgagaacttgtctcaaaaacaaaaacaacaaaaaaagggatgctgaatcaacttctacgtcaaaaccacactctc

SEQ ID NO: 41389 - DNA, 201 bp, Homo sapiens
tacagatgcctgccaccacgcctgctaatttttgtatttttgtagagacagaattttgccatgatggccaggctggtttcgaactcctgaactcaggtgacccccctgcctcggcctcttagagtgctgagattacaggcatgagccaccgcgcatggcctcttctgtcctcttaagctgactccaaacaatgagctacac

SEQ ID NO: 41390 - DNA, 201 bp, Homo sapiens
attgttcttattcattacgtcaaagctctaatttgtgacacctctgaaaagaccacttgggaagattgtttgctgtcctgagtacacaggggacagaggaygcttctttaggaataggcagtgacttactaagtacctgcttcctaaaccctaagcccccgcacctcccacaacggctttctggcgcttggagcaacatca

SEQ ID NO: 41391 - DNA, 201 bp, Homo sapiens
ccttaggaccgtttaatggggatcacaccagcataccagagaagtgtgtgtgtgtgtgtgtgtgtgtgtgtgtgtgtgtgtgtgtgtgtatttcctttcctttttttttttttttttttgagacagtctcattctgtcacccaggctggagtgcagtggcatgatctcagctcaccgcaacctcccgctccgagttcaagt

SEQ ID NO: 41392 - DNA, 201 bp, Homo sapiens
aaatagcattttattttgagcagttttaaatgttttaggcccaaagctctagcatgtagatgaaaaaacattcactgttttccctttcttgatgaattcargatgcagggttgggcgcctgcaggtcctcttacaggataggaagacaggagaccctaggtctcacccacacagatggagaaaacacaggcctttggggaa

SEQ ID NO: 41393 - DNA, 201 bp, Homo sapiens
gcagcagatccccagacacggacattggaaaggccactccaagaccgtcccacccagggccctaactacaagctctgcttctggagacatttgccaggtgycaaaaacatctccgttgctccatctaggagcagccaatggaaagggcagcccagccccctcctcctctcccccagtggtatcccagcctcctgcctctct

SEQ ID NO: 41394 - DNA, 201 bp, Homo sapiens
accacattttgtttatccatttctttgttgagggacactggggttgtttccacctcttggctgctgtaactgttgcgctacgaacattcacgtagaagtatccatttgtgtgtccctgttttcaattcttttgggcattttctttttttctttcttttgtgttttttttttttttgagataggatctcactctgtcgccca

SEQ ID NO: 41395 - DNA, 201 bp, Homo sapiens
tcagcaccccccagcctcctcttgcacatcagagttgatggggcaaaaaaacagtacctccgtctcccccatttggtgtgaggggaatcccactgtgagawcgtgaggcgtgctgagggactggttcttcctgccctagacgtggcctccctggcttcatgggtttctccagttgaagctcgtgttgggggaaataccttg

SEQ ID NO: 41396 - DNA, 201 bp, Homo sapiens
tgctgtaactgttgcgctacgaacattcacgtagaagtatccatttgtgtgtccctgttttcaattcttttgggcattttctttttttctttcttttgtgttttttttttttttgagataggatctcactctgtcgcccaggctggagtgcagtggcgtgatctcagctcactgcatcctccacctcccaggttcaagtga

SEQ ID NO: 41397 - DNA, 201 bp, Homo sapiens
gtctttctccttattgaattataggtctcttaagcagagggaaggattttattttattttgtttttgagacagggtctcgctctgttgcctaaggtggagygcagcagtacaatcataacttactgcagccttgaactcctggcctcaagcaaccctcctgcttcagactccctagtagctaagctcacaggcgtgagcca

SEQ ID NO: 41398 - DNA, 201 bp, Homo sapiens
ttataggtctcttaagcagagggaaggattttattttattttgtttttgagacagggtctcgctctgttgcctaaggtggagtgcagcagtacaatcatarcttactgcagccttgaactcctggcctcaagcaaccctcctgcttcagactccctagtagctaagctcacaggcgtgagccaccgtatctggctggaagg

SEQ ID NO: 41399 - DNA, 201 bp, Homo sapiens
aggcctctcccgggtttcagatgcaaaacagaagattttcatgcaggaatcagatgcctcgaatttcctcaagaggcgcggcaagcggtcccccaagtccmgagatgaggtcaatggtaaggatgctggagggaccccaccccgcgtccatcaccacctctgctcacaccccccggctcctcctctcccacagtcagccgg

SEQ ID NO: 41400 - DNA, 201 bp, Homo sapiens
ttgcgtctgggcttatttcactcagcagaatatttttaaggtttgtccatgttgtagaatgtgccagaacttcattcctttttgtggcgaaattttacacwtacacaccacattttgtttatccatttctttgttgagggacactggggttgtttccacctcttggctgctgtaactgttgcgctacgaacattcacgtag

SEQ ID NO: 41401 - DNA, 201 bp, Homo sapiens
ctatcttctcatttgcaaatgaggcagctggatcagataatcaccttcaagttttaaagtctgtgtcaggagtaaatcatttcagggaagtctccaatcayaatcccccacaaaccactcatcccccaaccaggtgacttctcagatgaactgtgctcccctaagtgtgtgcccctaagtgtcctcattcttgaggggcaa

SEQ ID NO: 41402 - DNA, 201 bp, Homo sapiens
cgagtgaaggtgagtgcaggggccacccacggggcagggcaggtgcagccagcgaagcagcagccccagcacccccacactgctggtgacaggcctctccygggtttcagatgcaaaacagaagattttcatgcaggaatcagatgcctcgaatttcctcaagaggcgcggcaagcggtcccccaagtcccgagatgaggt

SEQ ID NO: 41403 - DNA, 201 bp, Homo sapiens
tatgttggaatttcattttcccagtgcaggttaaaggtacaaggaaaaaacaatgtttttgtgtgttccaggagagattttacaatttattatcgtgtgcctttgtttatttagattttttagaaggaggtggtaagttttgtgagccacagaatgattaaaaaaatttttttaacttatgtggtttttatcagttacatt

SEQ ID NO: 41404 - DNA, 201 bp, Homo sapiens
gctctgtctttgagccactgccttccacggagtgggatttgattttgctgtgaagtaccctcaagggtcacccacagcaaacatccttaggaccgtttaakggggatcacaccagcataccagagaagtgtgtgtgtgtgtgtgtgtgtgtgtgtgtgtgtgtgtgtgtgtgtatttcctttccttttttttttttttttt

SEQ ID NO: 41405 - DNA, 201 bp, Homo sapiens
agaggcgcggcaagcggtcccccaagtcccgagatgaggtcaatggtaaggatgctggagggaccccaccccgcgtccatcaccacctctgctcacacccyccggctcctcctctcccacagtcagccgggcagcaggatgcagctgggcacgaagggctcaccccagggtatcaaagggactgcagctctgaatgagaaa

SEQ ID NO: 41406 - DNA, 201 bp, Homo sapiens
tgttggaatttcattttcccagtgcaggttaaaggtacaaggaaaaaacaatgtttttgtgtgttccaggagagattttacaatttattatcgtgtgcctttgtttatttagattttttagaaggaggtggtaagttttgtgagccacagaatgattaaaaaaatttttttaacttatgtggtttttatcagttacattga

SEQ ID NO: 41407 - DNA, 201 bp, Homo sapiens
catgcaggaatcagatgcctcgaatttcctcaagaggcgcggcaagcggtcccccaagtcccgagatgaggtcaatggtaaggatgctggagggaccccaycccgcgtccatcaccacctctgctcacaccccccggctcctcctctcccacagtcagccgggcagcaggatgcagctgggcacgaagggctcaccccagg

SEQ ID NO: 41408 - DNA, 201 bp, Homo sapiens
gttggaatttcattttcccagtgcaggttaaaggtacaaggaaaaaacaatgtttttgtgtgttccaggagagattttacaatttattatcgtgtgcctttgtttatttagattttttagaaggaggtggtaagttttgtgagccacagaatgattaaaaaaatttttttaacttatgtggtttttatcagttacattgag

SEQ ID NO: 41409 - DNA, 201 bp, Homo sapiens
gttcaagcgattctcctgcctcaacctccagagtagctgggattacagatgcccctagctaatttttgtatatttagtaaagacagggctttgccatgtcrgccaggctggtactgaacttttaattggaggagggaggaaagggaaggtctactttcaattcatatccaggagagccttgaaaagaagggagggccgggc

SEQ ID NO: 41410 - DNA, 201 bp, Homo sapiens
ccagctacttgggtggttaacagaggatcacttgatcctggggagttcaaggctagagtgactatgatcatgccactgcactccagcctgggcaacagagmaagaccctgtctcaaaaaaaaaaaaaaatccacaacaaaaataaaaaactgaggcttagaaaggatacatgtatactcaaggagacgaggctagtagata

SEQ ID NO: 41411 - DNA, 201 bp, Homo sapiens
gggaggtggagcgttggggagaaatcacatggtttgctttctcttcttctacccaactttttttttttttctttttttgagacgaagtcttgctctgttgyccaggctggaatgcagtggtgtgatcttggctcactgcaacctccacctcccaagttcaagcgattctcctgcctcaacctccagagtagctgggattac

SEQ ID NO: 41412 - DNA, 201 bp, Homo sapiens
ctgggcaacagagcaagaccctgtctcaaaaaaaaaaaaaaatccacaacaaaaataaaaaactgaggcttagaaaggatacatgtatactcaaggagacraggctagtagatagccctagcattagaaccccaaggcttatttgccagcaaagctcctgttcttgtaaatcaaggatgagcaaatgcatagaggtcttgg

SEQ ID NO: 41413 - DNA, 201 bp, Homo sapiens
cggggttcaagtgattctcctgcctcagcttcctgagtagctgggattacaggcacccaccaccacgccttgctaatttttgtatttttagtagagacacrgtttcaccatgttggccaggctggtcttgaactcctgacttcaggtgatctgcccacctcggcctcccacagtgctgggattacaggcgtgagcccccgc

SEQ ID NO: 41414 - DNA, 201 bp, Homo sapiens
ggggatttactatgttggccaggctggtcacgaactcctgacctcaagtaatctgcccatgtcagtctcccaaagtgctgggattataggcgtgggccatygcacctagccctgtttatttatttggtctttctccaaatttcaagattgtaatgctcctgaggaaaatcacctggtacctcctgggtgcacgtgaacttg

SEQ ID NO: 41415 - DNA, 201 bp, Homo sapiens
agcctcagcctcccaaagtgctgggattataggcatgagccatcccgcctggccaatcacagcactttgggaggctgagacaggaggattgcttgagactrggagttggagaccagcctggacaacacactgaaattccacctccataaaaaaattaaaaaattagccaggcatggtgaaaggaggctgaagtgggaggat

SEQ ID NO: 41416 - DNA, 201 bp, Homo sapiens
gtgggttctagctaagtggttgaaaacaaatttgtcaaaggatatatctgtcattcatttttattcaccaattttgcatatgttggaatttcattttcccrgtgcaggttaaaggtacaaggaaaaaacaatgtttttgtgtgttccaggagagattttacaatttattatcgtgtgcctttgtttatttagattttttag

SEQ ID NO: 41417 - DNA, 201 bp, Homo sapiens
ctgggactacaagcctgtagtcccaggacttttggaggccaaggaatttagccctggcaacataacgagaccttgtctctattaaaaattagcccggcatsgtggtgcatgcctgtagtcccagcaacttgggaggctgaggctgaagaatcacttgagtccaggaggctgcagtgagctatgattgtgccactgcacttc

SEQ ID NO: 41418 - DNA, 201 bp, Homo sapiens
ctctggccaggcattccgcacccctcaaccccttggcagacagggttcctgtctgctcttagaaagtgctggctgtgccagggctcagtggaggatggtgyggctggggacacgggtagaggatgctctgtctttgagccactgccttccacggagtgggatttgattttgctgtgaagtaccctcaagggtcacccacag

SEQ ID NO: 41419 - DNA, 201 bp, Homo sapiens
tgcagtgagccaagattgcaccaccgcactccagcctgggcaacagagcaagactctgtctcagaaaaaaaaaagaaaagaaaaggcctagaccagagagyccagtgtctctggccaggcattccgcacccctcaaccccttggcagacagggttcctgtctgctcttagaaagtgctggctgtgccagggctcagtggag

SEQ ID NO: 41420 - DNA, 201 bp, Homo sapiens; identical to SEQ ID NO: 6589

SEQ ID NO: 41421 - DNA, 201 bp, Homo sapiens
ggccaaaaggtcttttttgaaacaaacaaacaaacaaacaaaactaaaactggacctgtgcaaaaaaaatatacttttactttcaacatttttttttgcartattaatggtgcagattaagaatttagctgacaatttaagattataacctgaaattcaggtttataattctatagcataattgctagagggttcacaagt

SEQ ID NO: 41422 - DNA, 201 bp, Homo sapiens
acaaaataacataaactgggtagcttataaacaacagaaatttatttctcaccattctggaggctgggaagtcaggatcacagtgcagtgggctcagcgtygggtgaaggcctgctttttcacagatggcaccttcttaccgtatcctcctagtagaaggggcaaggcagctctctggagcctcctttataagcgtactaa

SEQ ID NO: 41423 - DNA, 201 bp, Homo sapiens
tattgtggtatcatcatagttttttagttttccttcatagaactgctgctttcctgatttgttagctaaactctgggtttcttttcttttttttttttttttatccttaaggtaatgattaccattctttcagacaagtttctgacaaagccatattctggccttctggctaatctgcctctaagaactgaagtttcttgt

SEQ ID NO: 41424 - DNA, 201 bp, Homo sapiens
catttgaggaacactaaatataacttggccactaagctgagagtgttcattttattgattcgtttattcacgtacactgggaaaatagtagaaaagcctaragaatcaccccgttaatcagctcggatgatttcacacataaagcatccaggatccttaagttcattggacatatacaataagccaggtctgtgctagcct

SEQ ID NO: 41425 - DNA, 201 bp, Homo sapiens
tgggattacaggcatgagccactgtgcccggctcactttatgtttacaacaggaatatgagataagccgggctggcatcctctttttaaaaatctaaatgyttaggaagttaaggtgcaacttaatcttagctgctttccacataacgttttgttgagattcgcttcctttgtttatttatttttttttttttgagacgga

SEQ ID NO: 41426 - DNA, 201 bp, Homo sapiens
tgcatcaaggatatgtattgtggtatcatcatagttttttagttttccttcatagaactgctgctttcctgatttgttagctaaactctgggtttcttttcttttttttttttttttatccttaaggtaatgattaccattctttcagacaagtttctgacaaagccatattctggccttctggctaatctgcctctaaga

SEQ ID NO: 41427 - DNA, 201 bp, Homo sapiens
aagagttccccaaaaggtttctgttaatttatgagtgagagatccatgatggattgcaagtgacagatcaagggtttgaaactgaggtctggccttagaartttatgtcaaagcagacaaccatacccttctaagtatggtgatgtcataattagggaatgacgccagggtgttccagagaccatggttctgactcagtag

SEQ ID NO: 41428 - DNA, 201 bp, Homo sapiens
atctctgaggagacgctttttaatgattttgcctcaaatgtaaaaatttaaaaattttagcaagatctgcataaacgttattttggatcattgttaaattwatttatatttatgtataagaattgttttaatattttctgtgattattgcaaggattttgttttctagtaaaattttatcacgaaaagctaagatacgcta

SEQ ID NO: 41429 - DNA, 201 bp, Homo sapiens
atgtatatgtcttcattcatattttctaaaatcattgtttaaaaaatgcttgtttagtaagcatgctaaaatccttgcttatgtgtgttttttttttttttgcactggcttatttttgaggccggctgggagtgttcatgtaaaacaagagagaaattccaacaacagagaagggggaggctggggcggggggacagataa

SEQ ID NO: 41430 - DNA, 201 bp, Homo sapiens
gagtattatgctcttcagaggattactgaggacagactgtttttgatcttagaccttgaactatatgacttagaaggacaatacagatgagtgtcatagargttttgaggaggttggaatagactttatgaatgagttggggcttgagctgggcttcaaaggattgactttgaatactttaataaggagttggtgctgtag

SEQ ID NO: 41431 - DNA, 201 bp, Homo sapiens
catagaagctggaatgccttctccagaatggaccaagaggaaaaagcagactttgaaaattgggcatggagggactctagacagcgcagcccgaggagttctgggtaagagatatgaaaggcagttaagtgtccactgtcacttaatatcagaaagaaacactggttgagaacagatagattgactaaagccttctatttt

SEQ ID NO: 41432 - DNA, 201 bp, Homo sapiens
ttcttttccaatggttaacatcactctagttaaaatacacgagtttcctcttagcatatggcaaggcaggttttaaatctgatgtgccaaatgttaaagtraaggtgagacaggatgtggagcttttgacactctaagaggcagtggaatgtggtcttctttgtttctgagtgtggccccagcctggcatctgtgctatta

SEQ ID NO: 41433 - DNA, 201 bp, Homo sapiens
acagattattttcagtgggaaataaagttcttgcacttttttcactacttcatgtgatgccccaaataaaatttgcgtttgaccaaagtgaaaagagtacstactacaagtgtgtcctaagatgagaaataagacaatcctcacgtaactaagaatgatctaattcttcacttgtgaataaagatcagttcttagaaacga

SEQ ID NO: 41434 - DNA, 201 bp, Homo sapiens
taattgctgtagttttagactatctggatatctggaagaacaagtccttcctgctttatttcttatagatttttttctataggttttttttttttttttttgagacggagtcttgctctgtcgccaggctggagtgcagtagcacaatcttggcttactgcaagctccgcctcccgggttcatgccattctcctgcctcag

SEQ ID NO: 41435 - DNA, 201 bp, Homo sapiens
tgcaagattgcaccatggttttcttatgcaactaaacagactctaaagacaaaaaaatcataaagcattttgatgctttgctttccttatgggagctgacygtaaccagatgagtcaactctagccactgttaactgcgaatcattctgtattttctttcttagaaaataaagatgatgatggtattattatctgttattt

SEQ ID NO: 41436 - DNA, 201 bp, Homo sapiens
aagagacaatatggcagaagtagaatgagaaagaacacatcttgtcatcttgtgtgtgatgatatcagcaaaagagggccaccaaagcagcataaaggagwacacagttgcaggagcgtcagtagagagaccagcgtagcagaagtagaaagttgtttggccttgtttttaaaaatatgtggctaagttgttaactattgc

SEQ ID NO: 41437 - DNA, 201 bp, Homo sapiens
ttattctgcctagttattggatatatttactgtggacattttattctgtttctttttaaatactttggaagtacagtctttatacttatgtcataagaacrattattattaatttgattgaacttatatcatgttttagatatagccagtttgtactacatactcatgtaccacaagcttagattttattataagataact

SEQ ID NO: 41438 - DNA, 201 bp, Homo sapiens
ctgaaataaaattcagagatacttgaatttacttatacattgagaaaaatcaatatgatgtagtaaatggaatataagtaagaaataaaagtaatttatartaaagtaggtgcattcatatgtaagcacacagatattagcagactaaaagtcttttggctggggtgcagtggtgcactcttggctcactgtaacctctgc

SEQ ID NO: 41439 - DNA, 201 bp, Homo sapiens
aagtgtaccagaattttatagctagaaaataataaaaatccacgaatacttagttcagtggggtgaaccaaattccccactttatatagtagaggcagtaygtctgcaagttagaaggaggtatatttgggcacaaagggaagatagtatatttatggggccttcttactccaaggggtgtcaagttgaaaatgtaaagag

SEQ ID NO: 41440 - DNA, 201 bp, Homo sapiens
cccacatacttagctattaatagtgtttttaattttggctgttctggtgagtgtgtagtgataattccattgtggttttaatttgattattgatgagattyggcaccttattaagtgtttttggcttattagccatcttcttttttgtattgtctgttcaggtctcttacccattttttgttttttctttcccttttgagt

SEQ ID NO: 41441 - DNA, 201 bp, Homo sapiens
aggtgtatttcagccatgaggctgaaaccatgtctcttttggtcctcagtagtgtatttttggtgtggtatacggcatacagaatgacatatatgacatayagagtttgaatcaaaaaagataggcagcagaggcattctcagaaaagatgactgcagataagccgggaaaggcaaagcatcttcctgccttctgctgctg

SEQ ID NO: 41442 - DNA, 201 bp, Homo sapiens
tatatttaactgtactggaaattgtcaaacagttgtccaaagtgattgtacttggaaaactttgcatttccactaggagtgcataagcattccacttgccmcacatacttagctattaatagtgtttttaattttggctgttctggtgagtgtgtagtgataattccattgtggttttaatttgattattgatgagatttg

SEQ ID NO: 41443 - DNA, 201 bp, Homo sapiens; identical to SEQ ID NO: 6596

SEQ ID NO: 41444 - DNA, 201 bp, Homo sapiens
atctttttgatttgagaatgggatactaggacattggataagtttggagatagttatttttgtttttgtttttttaacggaaaagacatttgagtgagcayagaacacttgggagatagagtaggagagtagtaattgtgcaacagtgcatggaaaaccccgttattcatctgctctctaaattctccacaccttttcaaa

SEQ ID NO: 41445 - DNA, 201 bp, Homo sapiens
ttgcctcacggcccattttctctcttgtttcccttcctctagagatatactgccattggagaactggggaaagctactgatacactagattctacggggarggtaacagaagaaaaaccttacggtatgaagctcatctaatgtaggcctcttttctaacatttaggaaaagtttctgtgcaggtagcattttaaaacaaa

SEQ ID NO: 41446 - DNA, 201 bp, Homo sapiens
taatgtggttgctggctttgaagagtgaaggggatcacaagccaaagaatgggggcagcctctaaaagctggaggaggcaaaaaaaaaaaggtcctctacrgaggctctagtgaaggattctcccctagcacctccagagaagaacacggtcaagccaaccctttgattttaagcctagttaaacctgtttcaggcttctc

SEQ ID NO: 41447 - DNA, 201 bp, Homo sapiens
taggtaggtagataggtagataggtaggtaggtaggtaggtagatagatacatagatacatagattgattgattgattgatcgattgattttaaaaagccycggagaacatattgcatgtgatgtctcattttggttatcaactggcataaaaatctgtgccattcaattggaaggaatcttagtgcctctgataaatgaa

SEQ ID NO: 41448 - DNA, 201 bp, Homo sapiens
gtttcagatctactggatatatatagtgccatcttttaaagaagcccttaaatggtacaaggcctacaaggctgttagaaatagctacttttatgtgtggwtgggactttgaaaaaaggtttctctctgtgcagaaaagagttaacatagcaggcctgaaattactatctttagaaaggcttgcttggacagcttgccctt

SEQ ID NO: 41449 - DNA, 201 bp, Homo sapiens; identical to SEQ ID NO: 6594

SEQ ID NO: 41450 - DNA, 201 bp, Homo sapiens
ccttttcctcccaagtttatgaagatcctacttcatttgtcttggtgatcaccttttttcatccccatttctctcatagaagctggaatgccttctccagmatggaccaagaggaaaaagcagactttgaaaattgggcatggagggactctagacagcgcagcccgaggagttctgggtaagagatatgaaaggcagtta

SEQ ID NO: 41451 - DNA, 201 bp, Homo sapiens
tttctactgagtttaatactttgagaatggggagaaaggtcttctcttgtcccttctttagaatttcttagttgcatgacaagttcaactgtttggagtartaggagccctaacattttgctaaatatctgttctttcccacttcacattacctaagctgggaaattatgaccaaaaaatatagctattttaaaaacctag

SEQ ID NO: 41452 - DNA, 201 bp, Homo sapiens
tatttatgtataagaattgttttaatattttctgtgattattgcaaggattttgttttctagtaaaattttatcacgaaaagctaagatacgctaagtagrttatttgcttattagcttcttagaaatgttttggtaacttatataaaaatgaatattatagtagagattgtttcaaggaaatatagctgagagtattatg

SEQ ID NO: 41453 - DNA, 201 bp, Homo sapiens
tgtagttgttggaattggaagcggaacaaaaatgttgaccagtatgttgtcagggtccaaggtaagaatactgaaatagttctatttttctttaatgttcytaatgatctacatgtattgggtttttatcaaataaaaaataaactgagtaaactgcatgaatgggtatcattcctgagtattaattatgtctataaacat

SEQ ID NO: 41454 - DNA, 201 bp, Homo sapiens
agtgaaattctgtgtaaacttcaagacatgcataacagtttttgtttgcctcacggcccattttctctcttgtttcccttcctctagagatatactgccaytggagaactggggaaagctactgatacactagattctacggggagggtaacagaagaaaaaccttacggtatgaagctcatctaatgtaggcctcttttc

SEQ ID NO: 41455 - DNA, 201 bp, Homo sapiens
attttatacctgccttttggtagacacatttctaccgtcatttcttttgggtatatacccaagtggaatataggtcgtgtgtgtgtgtgtgtgtgtgtgtgcgtgtgcacgtgtgtgcctgcatgtgttcctgggttatagagtgggtgtatatttaactgtactggaaattgtcaaacagttgtccaaagtgattgtact

SEQ ID NO: 41456 - DNA, 201 bp, Homo sapiens
tattttatcactcaattgtttgcatagtgcatttttacatttgtttagggacatcatttctatgtaaagtggatttcataggaggttagcaatttactatstcactgttaacattccagatgttgaatgtggaggaggtttttatatcagaagcttggtcagtgacattggaaaaggtaagcataaaaatgaattatgaat

SEQ ID NO: 41457 - DNA, 201 bp, Homo sapiens
tattttatacctgccttttggtagacacatttctaccgtcatttcttttgggtatatacccaagtggaatataggtcgtgtgtgtgtgtgtgtgtgtgtgtgcgtgtgcacgtgtgtgcctgcatgtgttcctgggttatagagtgggtgtatatttaactgtactggaaattgtcaaacagttgtccaaagtgattgtac

SEQ ID NO: 41458 - DNA, 201 bp, Homo sapiens
taaagggcttatacttatgaactataaaaaaggactgttccttcttaatgaagacattcaaagccacatgtttttggtttgataggttttttaaaaagtgwtctttctcatcctcagtaatatccctattttgtttgtgaaggtttaaatcacaagctttcaaaatcacacctcagttgagatccaaggaaatgattgtgt

SEQ ID NO: 41459 - DNA, 201 bp, Homo sapiens
ggagctttctagccacatgttctgtagacacctgaaattaattttactcaggcaagttctgttggaactcttgaatacagttaatttctttttttttttttcatggctatctgtgattgctggtgatgtaggcaaaatattgcactcatcagaaagagaaagcatgccagttctttaagggagagacagactttccttgga

SEQ ID NO: 41460 - DNA, 201 bp, Homo sapiens
cttagagatcatcttatctagtgactttcaaaatttttttgactaagacccatagtaagaaacatattttatgtaatgaccatatagatacatacatttaygaaaaggaaaaattttatcaaacaactttgtgttagtctgtttgtgttgctgtaaaggagtagtcgaggctgggtaatttataaagaaaagaggttcatt

SEQ ID NO: 41461 - DNA, 201 bp, Homo sapiens
acacggtcaagccaaccctttgattttaagcctagttaaacctgtttcaggcttctcacctccccaactatgtgataaaaagtttgtattgttttaagacagattggtaatttgttaacagtagcaataggaaaggaatacacctatttatcataaatcacttaaaatgtaaataaaatttctatataccatttcaaaaaa

SEQ ID NO: 41462 - DNA, 201 bp, Homo sapiens
aagtgatctgcccacctctgcctcccaaagtgctgggattacaggtgtgagccaccatgcccggccaaaaggtcttttttgaaacaaacaaacaaacaaacaaaactaaaactggacctgtgcaaaaaaaatatacttttactttcaacatttttttttgcaatattaatggtgcagattaagaatttagctgacaattta

SEQ ID NO: 41463 - DNA, 201 bp, Homo sapiens
agtttatggaccacatttgaggaacactaaatataacttggccactaagctgagagtgttcattttattgattcgtttattcacgtacactgggaaaatastagaaaagcctagagaatcaccccgttaatcagctcggatgatttcacacataaagcatccaggatccttaagttcattggacatatacaataagccagg

SEQ ID NO: 41464 - DNA, 201 bp, Homo sapiens
agagattgtttcaaggaaatatagctgagagtattatgaccagagtctactaaattccttgtgccttttaacacagaatgaggactagtaaggacaagacrtgaatacattgtctctagaaagatgattaaagaataaaattggtaacactgcatattgtgtgccagaatgaggttatatcagccttagaaatatttagaa

SEQ ID NO: 41465 - DNA, 201 bp, Homo sapiens
ttttaaaaatctaaatgcttaggaagttaaggtgcaacttaatcttagctgctttccacataacgttttgttgagattcgcttcctttgtttatttatttwtttttttttgagacggagtcttgctctgtcgcccaggctagagtgcagtggcgtgatcttggctcactgcaaactccgcctcccaggttcacaccattct

SEQ ID NO: 41466 - DNA, 201 bp, Homo sapiens
gaaatgtaaagactaaaaagttcatttctgttgtttggaaattttatgatctggctgcagaaagttgtaaacatgtaagatctgtgaagaatccaaagccrtggttcttaatcctcagactcctttaaattgagcctacccttagtttcacagtgcactgaataggattccgtttagaaataatgtccccaaatcttttaa

SEQ ID NO: 41467 - DNA, 201 bp, Homo sapiens
tcatcaaaaacaatttatatttatccagaaggaagcactggctctgtctccccaaagtactttcaagtaacattattttgcattatcttttttttttttttaaacaggacaggatctcactctgttgcccaggctggaatacagtggcacagtcttggcttactgcaacctctgcctcctgagctcaagcagtcctctcac

SEQ ID NO: 41468 - DNA, 201 bp, Homo sapiens
attgtggtatcatcatagttttttagttttccttcatagaactgctgctttcctgatttgttagctaaactctgggtttcttttcttttttttttttttttatccttaaggtaatgattaccattctttcagacaagtttctgacaaagccatattctggccttctggctaatctgcctctaagaactgaagtttcttgtt

SEQ ID NO: 41469 - DNA, 201 bp, Homo sapiens
gtctgctactattgccagtgtctctgaggacacacagcttcagtgtgctcatctgttctccgctgagctaaggacactaagaccatagcttcccaggctakatgtggaccaagcatccgggaaggcctaactgtccctgtactgggagtagttttttctgtccctcccatgagtcaacaaaggtagaaagaaaagtggaat

SEQ ID NO: 41470 - DNA, 201 bp, Homo sapiens
tgtgtctaattactctttcatattttccatctctttatcccactgtgctgcatactggggaatttcctccaatcttttttccagataatgaatgccttttkctatttttatttactgtttaacaatcatatatttattccaatcactcttgtgttttatttttatttatttatttattttgacacagagtctcactctgtt

SEQ ID NO: 41471 - DNA, 201 bp, Homo sapiens
gcaattttatcaacagtgacatttccttcagcaagtgccagcatggtgacagcattggctgtctagatctggaaatcttacatttgtatgactaaggtgcygctagtaataatgtcttaatgttgctgtagactaaaattttttcatagaaaaatcctcatctgtatcatgagatacatctgtttgagaaacagtatgaac

SEQ ID NO: 41472 - DNA, 201 bp, Homo sapiens; identical to SEQ ID NO: 6590

SEQ ID NO: 41473 - DNA, 201 bp, Homo sapiens; identical to SEQ ID NO: 6591

SEQ ID NO: 41474 - DNA, 201 bp, Homo sapiens; identical to SEQ ID NO: 6593

SEQ ID NO: 41475 - DNA, 201 bp, Homo sapiens
tgaggtcatagtctcttaacatgtaaagtttgtataatactttttgtttgttttgaaaatgccatccccttttcctcccaagtttatgaagatcctacttyatttgtcttggtgatcaccttttttcatccccatttctctcatagaagctggaatgccttctccagaatggaccaagaggaaaaagcagactttgaaaat

SEQ ID NO: 41476 - DNA, 201 bp, Homo sapiens
gatagattgactaaagccttctatttttcagtcattttggaatgtttcagatctactggatatatatagtgccatcttttaaagaagcccttaaatggtasaaggcctacaaggctgttagaaatagctacttttatgtgtggatgggactttgaaaaaaggtttctctctgtgcagaaaagagttaacatagcaggcctg

SEQ ID NO: 41477 - DNA, 201 bp, Homo sapiens
gaagcttggtcagtgacattggaaaaggtaagcataaaaatgaattatgaattatcatttagagaataatactccttttcaattggaagagggaattttcygtttttcttatttctgagtactggccttaggaactgaactcttgctgccttcagctttaaaagcattgtaggtttctggcttgcaattatcagcctcagc

SEQ ID NO: 41478 - DNA, 201 bp, Homo sapiens
gtattattttgctacttaatcatttctttatctgaggcctcttggttcttatattggattattatacttttgggtggttttgagagatttcaattgagtayggtcatttgaacaattacagactatgaaatactgaatcgtttatcttctggattttttttctaccttttgttgccatagaactatcttcctgtgccaatg

SEQ ID NO: 41479 - DNA, 201 bp, Homo sapiens
aagagtagggcctctttaagatgataaagtatgttcatatatgagagtaaccttgaatagatccaaaagcacttttccaggcacttgatagaagagagaargggttatttggaggcaggagaggctggaaagctgtgaactgctggtagaaggggtctcttccatctctcaaagagagagtaatatctgtatcctaatgag

SEQ ID NO: 41480 - DNA, 201 bp, Homo sapiens
atcacaaggaacattagggttgtagatggaattgatgttgctaatcagctgactttaagatagattatcctggaatttccaagtggacccaatgtaatcayaatattctttaaaagtggaagaggaggcagaagagagagtcagaggagatgtggcagtggaagcagaggttggagtaatgtggttgctggctttgaagag

SEQ ID NO: 41481 - DNA, 201 bp, Homo sapiens
gtgattctggtgaatccattgaaactgatggtccagaccaggtctctggaagaattgagtgtcattatgagccaatggaatcctagtaagtcaaaatgccrtttcaaaatttgatgtttgctcatctgctgttaaggaacaatgattgtcagttcatttcaatagttgataaactgatgccaaacattaccagagaccagt

SEQ ID NO: 41482 - DNA, 201 bp, Homo sapiens
aaaatgccgtttcaaaatttgatgtttgctcatctgctgttaaggaacaatgattgtcagttcatttcaatagttgataaactgatgccaaacattaccakagaccagtttccacatattattcagtcgtctcaacacacaaaaaatgagggagtcatgtctcttcccacagaaaaccaccgatgacatcctcaggacctt

SEQ ID NO: 41483 - DNA, 201 bp, Homo sapiens
gctgttaaggaacaatgattgtcagttcatttcaatagttgataaactgatgccaaacattaccagagaccagtttccacatattattcagtcgtctcaamacacaaaaaatgagggagtcatgtctcttcccacagaaaaccaccgatgacatcctcaggaccttttccgtctcctgaggaagttatcttctactttgca

SEQ ID NO: 41484 - DNA, 201 bp, Homo sapiens
gtctttcccctgccgatgtggaagcacagaccacaaatgaccaaaaggggtcggcctcactaactgttgtgcaattgtctatattaatcaagtaaagctcyaatttctaaaacttgatgggccctaagagcaaggcagcctccctcccacttttttttttaacttagaatttaaattttaaagctgttcctaaaaatctcc

SEQ ID NO: 41485 - DNA, 201 bp, Homo sapiens; identical to SEQ ID NO: 6605

SEQ ID NO: 41486 - DNA, 201 bp, Homo sapiens; identical to SEQ ID NO: 6607

SEQ ID NO: 41487 - DNA, 201 bp, Homo sapiens; identical to SEQ ID NO: 6600

SEQ ID NO: 41488 - DNA, 201 bp, Homo sapiens; identical to SEQ ID NO: 6601

SEQ ID NO: 41489 - DNA, 201 bp, Homo sapiens; identical to SEQ ID NO: 6602

SEQ ID NO: 41490 - DNA, 201 bp, Homo sapiens; identical to SEQ ID NO: 6603

SEQ ID NO: 41491 - DNA, 201 bp, Homo sapiens; identical to SEQ ID NO: 6604

SEQ ID NO: 41492 - DNA, 201 bp, Homo sapiens
gcttgaacccaggaagcggaggttgcagtgagccgagattgcaccattgcactccagccctgggaacagtgtgagactctgtctcaaaaaaaaaaaaaaargatccacatacactggggccaagtggtcaatataagcttctgaactcttctgaaagttaccaaacactactctgacccaaagatccaggcattaattcag

SEQ ID NO: 41493 - DNA, 201 bp, Homo sapiens
tcccagctactggggaggctgaggcaggagaatcgcttgaacccaggaagcggaggttgcagtgagccgagattgcaccattgcactccagccctgggaamagtgtgagactctgtctcaaaaaaaaaaaaaaaggatccacatacactggggccaagtggtcaatataagcttctgaactcttctgaaagttaccaaaca

SEQ ID NO: 41494 - DNA, 201 bp, Homo sapiens
tctgtatgaaaaatacaaaaaattagctgggcatggtggcgggtgcctgttatcccagctactggggaggctgaggcaggagaatcgcttgaacccaggargcggaggttgcagtgagccgagattgcaccattgcactccagccctgggaacagtgtgagactctgtctcaaaaaaaaaaaaaaaggatccacatacact

SEQ ID NO: 41495 - DNA, 201 bp, Homo sapiens
ctgaggcgggtggatcacgaggtcaggagtttgagaccagcctggccaatatggtgaaaccccatctctactaaaaaatatacaaaaattagctatgcatrgtgatgcgcgcctgtattcccagctactcaggaggctgaggcaggagaatcacttgaacccaggaggtggaggttgctgtgagccgagatcgcgccactg

SEQ ID NO: 41496 - DNA, 201 bp, Homo sapiens; identical to SEQ ID NO: 6611

SEQ ID NO: 41497 - DNA, 201 bp, Homo sapiens
tcagggtcttagatggagtctgagaagtaccctgaatacaaataaggttcctcattcttccaccatcaagtgcaaataacagaatgtgctttcaggactcyttcaggattctttcatatcaagtagcatttggagaaggcactgagctaagagacagagcacctgggttcaggacctcagatcggcatgatgtagcaaaaa

SEQ ID NO: 41498 - DNA, 201 bp, Homo sapiens; identical to SEQ ID NO: 6597

SEQ ID NO: 41499 - DNA, 201 bp, Homo sapiens
atgagaaccacgttcatccactggaaactgtacctctatgtcagagcccagagctgttaatactagaaataagaaggtacctgacttatcggtaaactggrattcttacatctattccttttatctgcagttggataatatcattgcttccagtgattctggtgaatccattgaaactgatggtccagaccaggtctctgg

SEQ ID NO: 41500 - DNA, 201 bp, Homo sapiens; identical to SEQ ID NO: 6598

SEQ ID NO: 41501 - DNA, 201 bp, Homo sapiens; identical to SEQ ID NO: 6599

SEQ ID NO: 41502 - DNA, 201 bp, Homo sapiens
tagtccatttttccctctgttcccatagcctaccatccgctaccacatcccaagaggatttttcagtaacttaaatttatattattctccaaatgttttgracaacctttacctggacaatgtcatctcagaaatagaggccaaaagtctactcagaaagtacagttgagagccaaggtcagttgcctgatgtgactttta

SEQ ID NO: 41503 - DNA, 201 bp, Homo sapiens
actggaaactgtacctctatgtcagagcccagagctgttaatactagaaataagaaggtacctgacttatcggtaaactgggattcttacatctattcctyttatctgcagttggataatatcattgcttccagtgattctggtgaatccattgaaactgatggtccagaccaggtctctggaagaattgagtgtcattat

SEQ ID NO: 41504 - DNA, 201 bp, Homo sapiens
gttaaaagaaggaatgttctgttaaatataattcacaaaccttgttcataaattggtatttattaattgcatctgaccccagcaccaccccccgccccccscccccccaccaccacaaaaaatgttatcagagtcattccaatgtgaggctaataactactttttggtctggggtcagatgcaattaattgaaaatcaagc

SEQ ID NO: 41505 - DNA, 201 bp, Homo sapiens
ctccattagtattaactgagcagctatatctgccatggactatagagagaagagaatggaagtgagagataggaagacagaatggagggtgggaatgctgygtcatttcccaaactgggggttttccgtaagatggtgacgtatgtttatataaaagaaacattctggggtcaaataagttccggaaacacccagttaaaa

SEQ ID NO: 41506 - DNA, 201 bp, Homo sapiens
aattccttccctggtctacttttctttctaactagccctgtgaccttaggaaattcactgccttctctgggcttcagcttattctcactaaagtgagaggytggttttcaaactgtgcttcttgcatccccaggatggaggtgaaaggagaggagaggaaggagagagtatgctgggtcttcaactggagaagcttacatt

SEQ ID NO: 41507 - DNA, 201 bp, Homo sapiens
gggtaattttgattccatatctatttttagaaggaaagtttgttgaatttgatgctagctgtggctgtgattctgatagttggacatacgtcaagaccttgctagtcttcacatggctgttagctacttaaatctgacacacacaggggaacactgtaaaaacacatgctaaaatagggcttgttttaacttcttatgctc

SEQ ID NO: 41508 - DNA, 201 bp, Homo sapiens
agttataggcctggcctttgctaggtactttatgataagtaaagtctagtaaagcagacaaaacagctaaaaagaccaaagataaataaataaataaatawgtaaaaaaactatgcaatggaaattgagagaaaggagagctctgccgtagctgaggtgatcagagtgggctgtgggacttcagccaggcctgaacatgat

SEQ ID NO: 41509 - DNA, 201 bp, Homo sapiens
atttatattattctccaaatgttttgaacaacctttacctggacaatgtcatctcagaaatagaggccaaaagtctactcagaaagtacagttgagagccmaggtcagttgcctgatgtgacttttacaaatgtcttgttcatagtaatatccccgatgaaagccaagtggagaaactgaacgttttcctttctcctcctg

SEQ ID NO: 41510 - DNA, 201 bp, Homo sapiens
aaagtacagttgagagccaaggtcagttgcctgatgtgacttttacaaatgtcttgttcatagtaatatccccgatgaaagccaagtggagaaactgaacrttttcctttctcctcctgatgtcatcaactatcttgctctcacagaagccacaggacggatatggtaggttggagatttgactgttgtggattataaatg

SEQ ID NO: 41511 - DNA, 201 bp, Homo sapiens
tcctcctgatgtcatcaactatcttgctctcacagaagccacaggacggatatggtaggttggagatttgactgttgtggattataaatggggctggaagmtttgaagagaacaattacatcttgaaacagtgtatttggcaacactgactaggtttggggcgggggagcttggactgttgactggctgttgttacaaaaa

SEQ ID NO: 41512 - DNA, 201 bp, Homo sapiens
tatagtgaaaccccgtctgtatgaaaaatacaaaaaattagctgggcatggtggcgggtgcctgttatcccagctactggggaggctgaggcaggagaatmgcttgaacccaggaagcggaggttgcagtgagccgagattgcaccattgcactccagccctgggaacagtgtgagactctgtctcaaaaaaaaaaaaaaa

SEQ ID NO: 41513 - DNA, 201 bp, Homo sapiens
gtgtggtggctcacacctgtaaccccagcactttgggaggcggaggtgggcagatcatgaggtcaggaattcgagaccagcctggccaatatagtgaaacmccgtctgtatgaaaaatacaaaaaattagctgggcatggtggcgggtgcctgttatcccagctactggggaggctgaggcaggagaatcgcttgaaccca

SEQ ID NO: 41514 - DNA, 201 bp, Homo sapiens
ttagtagaaacagggtttcaccgtggtctcaatctcctgacctcgtgatccgcccgcctcggcctcccaaagtgctgggattacaggcgagagccactgcrcccggcccattcactatttattgagcatctgctgggtgctgtatactgtgctaaattcaagagctacaaaaatggcctcagcctgagctgaagctcacag

SEQ ID NO: 41515 - DNA, 201 bp, Homo sapiens
cagctgtaatacaagacagagggttctatgctgaagagagatgcttataaaataccaggggtgcatgagctatgggaggaggagatgactttcaaacaaamgatcaggaagatttcagggacgagatgacattaggccatacatgatgagtaaaatttggatgtgggggattgccttgaggagtctttctgcattcttagc

SEQ ID NO: 41516 - DNA, 201 bp, Homo sapiens
gccgggttcacaccattctcctgcctcagcctcctgagtagctgggactacaggcgccggccactacgcccagctaattttttgtatttttagtagaaacrgggtttcaccgtggtctcaatctcctgacctcgtgatccgcccgcctcggcctcccaaagtgctgggattacaggcgagagccactgcgcccggcccatt

SEQ ID NO: 41517 - DNA, 201 bp, Homo sapiens
gatattacagttcactgcaggactttcttcaataccagctcccaagggtatgaatgaggacagattgggaagcaacaatcttaaagataatctttagccayttaactttcttctttcttgtgttttagaaattaaagcttaccatcggcaggatcccaaattcagagacattccatgctgcatcctgtatgtgtccctcaa

SEQ ID NO: 41518 - DNA, 201 bp, Homo sapiens
cgcctgccgggttcacaccattctcctgcctcagcctcctgagtagctgggactacaggcgccggccactacgcccagctaattttttgtatttttagtasaaacagggtttcaccgtggtctcaatctcctgacctcgtgatccgcccgcctcggcctcccaaagtgctgggattacaggcgagagccactgcgcccggc

SEQ ID NO: 41519 - DNA, 201 bp, Homo sapiens
taattttgattccatatctatttttagaaggaaagtttgttgaatttgatgctagctgtggctgtgattctgatagttggacatacgtcaagaccttgctwgtcttcacatggctgttagctacttaaatctgacacacacaggggaacactgtaaaaacacatgctaaaatagggcttgttttaacttcttatgctctag

SEQ ID NO: 41520 - DNA, 201 bp, Homo sapiens
ctttcttttttttttttttttttgagacggagtctcgctctttcgcccaggctggagtgcagtggcgcaaactcggctcactgcaagctccgcctgccggrttcacaccattctcctgcctcagcctcctgagtagctgggactacaggcgccggccactacgcccagctaattttttgtatttttagtagaaacagggtt

SEQ ID NO: 41521 - DNA, 201 bp, Homo sapiens; identical to SEQ ID NO: 6606

SEQ ID NO: 41522 - DNA, 201 bp, Homo sapiens
taatttattttgatggaagatttcatcttcataagggaagaaaactctttaatgtaaacactacacattaattgtcttataagttctaagaagggaggaamcacaccttccatttttttaaatagtccacaatctaaggctcaatacacacttgactgaaactgtggactcctccataactgagctgctacattccttaat

SEQ ID NO: 41523 - DNA, 201 bp, Homo sapiens
acttttacaaatgtcttgttcatagtaatatccccgatgaaagccaagtggagaaactgaacgttttcctttctcctcctgatgtcatcaactatcttgcyctcacagaagccacaggacggatatggtaggttggagatttgactgttgtggattataaatggggctggaagctttgaagagaacaattacatcttgaaa

SEQ ID NO: 41524 - DNA, 201 bp, Homo sapiens
tttcagtaacttaaatttatattattctccaaatgttttgaacaacctttacctggacaatgtcatctcagaaatagaggccaaaagtctactcagaaagyacagttgagagccaaggtcagttgcctgatgtgacttttacaaatgtcttgttcatagtaatatccccgatgaaagccaagtggagaaactgaacgtttt

SEQ ID NO: 41525 - DNA, 201 bp, Homo sapiens
atccctgtctatttctggcccagatattacagttcactgcaggactttcttcaataccagctcccaagggtatgaatgaggacagattgggaagcaacaakcttaaagataatctttagccatttaactttcttctttcttgtgttttagaaattaaagcttaccatcggcaggatcccaaattcagagacattccatgct

SEQ ID NO: 41526 - DNA, 201 bp, Homo sapiens
cccatagcctaccatccgctaccacatcccaagaggatttttcagtaacttaaatttatattattctccaaatgttttgaacaacctttacctggacaatrtcatctcagaaatagaggccaaaagtctactcagaaagtacagttgagagccaaggtcagttgcctgatgtgacttttacaaatgtcttgttcatagtaa

SEQ ID NO: 41527 - DNA, 201 bp, Homo sapiens
tcttaaagataatctttagccatttaactttcttctttcttgtgttttagaaattaaagcttaccatcggcaggatcccaaattcagagacattccatgcygcatcctgtatgtgtccctcaaaatgccaaagtgctgcaccttctcagctggataagcctagactgaacagagctcccaagaggagtccggccattaaaa

SEQ ID NO: 41528 - DNA, 201 bp, Homo sapiens
gccagaaaaaatactataaacacccttctgttctaaggttttgtaacctgatggaggattcaaagaaatgtggtcccagggggagcacaagagtctagcaycttcttatccaaaggttctttaataagatccagtgtgttcatcaagccttgactctgagttgttttgttttgtattttagaaacccagatgcggacgaaa

SEQ ID NO: 41529 - DNA, 201 bp, Homo sapiens
aaggctgatgcaagcctcttcatagggctgttataagtatgaaatgcagcaatgtgtgatcaggcagggagtagatgaaactcactgcacctgacgagcasaccagtacctgggcagccgtgttccaaagcaaggacaggtgcagacaactgacacgaacccctgctgtggagaaggacaatgcttcagtactcagcgcgc

SEQ ID NO: 41530 - DNA, 201 bp, Homo sapiens
catctgtaaacaaggctgatgcaagcctcttcatagggctgttataagtatgaaatgcagcaatgtgtgatcaggcagggagtagatgaaactcactgcamctgacgagcacaccagtacctgggcagccgtgttccaaagcaaggacaggtgcagacaactgacacgaacccctgctgtggagaaggacaatgcttcagt

SEQ ID NO: 41531 - DNA, 201 bp, Homo sapiens
attttattctaagaacaacgagaagccactgaagggttttaagcatctgtccatccccaatccccaggaactgtcacctgaagaaatcacctagatttcarcatgaattccgaatcctatcacagctatgtgacctccgagtccaaattttctcatctgtaaacaaggctgatgcaagcctcttcatagggctgttataag

SEQ ID NO: 41532 - DNA, 201 bp, Homo sapiens
aaacagacaaaatccctgcctttctggaggacagagtctgatgtgagagacaggtgacatgcaaataaacaaatgtaaatctatgcactgcagtaaggatyatggagggaataagcgggtgcagtgacaaaacagtggggatagggaaatgtcatattgatgggatatttcagggaagatgacacttaaactgagacctag

SEQ ID NO: 41533 - DNA, 201 bp, Homo sapiens
ttgttttccaataaaactttatttacaaaaacaaaactgctaggcttggcccaagggcccttatttgctgacccctgattaaagtggaagagagcatactscagttattaaatgagtaatactttctttttcaggttgagtactgcatattaaaggaaatatttatgtcattatttatttattcagcaaatctttttgagg

SEQ ID NO: 41534 - DNA, 201 bp, Homo sapiens
gtctcgaactcttgacctcatgatccacctgccttggcctcccaaagtgctgggattacaggcatgagccactgcacccggccatgaagatttttttttttcacaaaacactagtactttccacttgcactcaccttgagctgttccctttgtggagctgtcttcgggggcggggggagggggggcctcttggcagccttt

SEQ ID NO: 41535 - DNA, 201 bp, Homo sapiens
aagaccccagttgaaacagttgagtgctacagttgagctagtgagatttaggggttgtacggagacaaactgccatagttcatatcctgccctttagtaastatgtgtccttggccaagttactcaatctctgtcagcctcaggtttctcaacttagagtgaacaatacacctcctagatttttatgaagatgaagttaga

SEQ ID NO: 41536 - DNA, 201 bp, Homo sapiens
caggcatggttgttttccaataaaactttatttacaaaaacaaaactgctaggcttggcccaagggcccttatttgctgacccctgattaaagtggaagasagcatactccagttattaaatgagtaatactttctttttcaggttgagtactgcatattaaaggaaatatttatgtcattatttatttattcagcaaatc

SEQ ID NO: 41537 - DNA, 201 bp, Homo sapiens
atgagttgcaggtgagggggtctttgtatggctttgaactggcttcataaatgaggattttttcttgttttttttttttgtttgtttgtttttgtttttgkttttttgagatggagtctcactctgtcacccaggctagagtgcagtggcaccatctcagctcactgcaacctctgcctctcaggttcaagcaattctcct

SEQ ID NO: 41538 - DNA, 201 bp, Homo sapiens
ctttcctaatttatcatctacctaattcccaaaatcatgtaaggaagcctacagtaaaacagaaaattagaaattctgcagagggtagaagcagcaaatayaccaaactgcctagcttgatgtatctcattgatctcagctttctggcggccaagacccaaagggaaagctgtctagtggtagaactcgcatttctttaaa

SEQ ID NO: 41539 - DNA, 201 bp, Homo sapiens
gcaagaggggaagcaagagggagggatggaagtgccaggctctttttaacaaccagctctcctaggaactaatagagtgaaaccttgcttaccctgagggwgagtactaatccatttgtaatggatccacccctatgccccaacattgaggccccacctccaacattggggatcaaatttcagcatgaggtttggagagga

SEQ ID NO: 41540 - DNA, 201 bp, Homo sapiens
tgggtagggtctgagtggccagctctgggctttagagcagggaagctgcacagaatccctctgagccaggcataggtgatcggcgtcagagccaggagacytgagcctgagtccctcccctgccccaatgtgtccatgtccttacacaagccacttcaccatgctgggcctcatcttcctcctctgcagatgaagggtctg

SEQ ID NO: 41541 - DNA, 201 bp, Homo sapiens
ggcttggatttctgaggactggaaagtccaggattgggcagctgcttttggcaagggcctcaagctgcctccactcatggcaaaagggaaaggggagccartgtacagagatcacatggcaagaggggaagcaagagggagggatggaagtgccaggctctttttaacaaccagctctcctaggaactaatagagtgaaac

SEQ ID NO: 41542 - DNA, 201 bp, Homo sapiens
atgtcttatgttatggatctcctacagtgcaaaatacgtgcaaggacaacccatgtggccggggccaatgtctcattacccagagtcctccctactaccgmtgtgtctgtaaacacccttacacaggtcccagctgctcccaaggtaagtggtggaggccccttcgacgctagactttctgtgccctatcttgtacctgca

SEQ ID NO: 41543 - DNA, 201 bp, Homo sapiens
gagaatgggaggtctcccatgagaagtgggtaaaagttatagcttatatttggagcttgcttctgttaataaagcacttcccttacataatcttatttggwccctaccacagcagagttctgtgagtgagacgagggttacaaatgaggaggctgagtctgcagaaggtcagatttgccaaaggccacacagctgagcaga

SEQ ID NO: 41544 - DNA, 201 bp, Homo sapiens
gcaagttggagctggtgcttctctgacaaagaggtgacatcgcatccattttctacctctctctccacctagcattgctcaagttaaagccagtggatggycactgtgctctagaatccaaatacgtgaagactgtgtgcttgcctgatgggtcctttccctctgggagtgagtgccacatctctggctggggtgttacag

SEQ ID NO: 41545 - DNA, 201 bp, Homo sapiens
tcaactggttccaggttgtcacaggcacctttgagaacttgccctcaaaatttgtgcacccacaatgctttacacaattttgagtttcctgtggacactgmtgagcccaggctcaggatcccaagggaaatactgcctacgtacttaaaacccttgattttataaagaactgaggcctagaggggaagcaatttactcctg

SEQ ID NO: 41546 - DNA, 201 bp, Homo sapiens
gttcaactggttccaggttgtcacaggcacctttgagaacttgccctcaaaatttgtgcacccacaatgctttacacaattttgagtttcctgtggacacygctgagcccaggctcaggatcccaagggaaatactgcctacgtacttaaaacccttgattttataaagaactgaggcctagaggggaagcaatttactcc

SEQ ID NO: 41547 - DNA, 201 bp, Homo sapiens
atcttctctcccttagagtcttgtatcatgtgagatgtggggagagccttgtcactgctttccagagaagcccacggaggctggcaagggactccaccccmtccctccctgacaccccctggagagaggtgggggcatctccagatgtctctggttcacgaggatgagcttatgcctctgtttcccttagggtgactctgg

SEQ ID NO: 41548 - DNA, 201 bp, Homo sapiens
tgcagtggcacgatctctgctcactgcagcctccacttctcaggttcaagcgattcttgtgcctcagccacccgagtagctgggactacaggctcctgccmtcacgcctggctaatttttgtatttttagtagagatggggttttgccatgttggccaagctggtctccaactcctggcctcaagtgatctgcccacctcg

SEQ ID NO: 41549 - DNA, 201 bp, Homo sapiens
cacaatgtgcttgcaggcatgcctggcccctagcccctggcaggtgctccagtgcaaatgcaatgacgttcctagctaccagctgctcagttctgtatccygtttcccttttcatgagacacccccccacctctctctccttcctcaatagcttttttcccctctaatggcctgtttcttaaaaaatggattagaaatgat

SEQ ID NO: 41550 - DNA, 201 bp, Homo sapiens
atgccatgccttgcaccatcactatgaggcatgctgcatctcatatacacccctggtgcctgcacgaagggaagagccttcacctgaattaaatttattgkcaagcacctgaccgagtacctgacccatgtgtttcatatcttcctctttcattttttcccttttcaagttgttctcacacgccctctgggagtctgtaat

SEQ ID NO: 41551 - DNA, 201 bp, Homo sapiens
gggtgggccccagggatctgtatttttatcaagttccccagacaattcttatgcacattgaggtttaagaaccaatgtctttaaaatggaaattctccggwtgtaacaaatgggactcttctctttctgcccattgcccctgtcccatctctgcctgccactgtcacacgaagctgcagctcagcccttagctgggtaggg

SEQ ID NO: 41552 - DNA, 201 bp, Homo sapiens
tgttattttgtaattttttaaacctacagaaaagtgggaagaataatgcaatgaatattcttcatccagatagatgccacaattgttaacatgtcgttatrgttgctgtgtctctcattctcctgtgtgtatagttgttttgtttgtttgtttgctgaatcatttgcaagtaaattgtagacatcactctacctcaccacg

SEQ ID NO: 41553 - DNA, 201 bp, Homo sapiens
ctcctaggaagggcacgtctgccacctgctggctgtaggcagcatggcacccggctgtccctcaggctccagctggagccaggatgcgcaatgctggcccrggtgcaggtcctggagggcccttccttgctggaccccgaggaaggatgtccctcaaagtcttctgcccacttcttaggacatggcccaccctgttcggct

SEQ ID NO: 41554 - DNA, 201 bp, Homo sapiens
cttccctcatgcctttgccagaacttttccttcccttccactttttctttctcccttcactctttagaagctttccacaattgttagattgtgtgtgtgtrtgtgtgcatatgtgtgtgtgtgtattcatacacatgtgctcctaccacacttgtttttgtttttgtggcttcttaacccaagcagtgggacagaaaagaa

SEQ ID NO: 41555 - DNA, 201 bp, Homo sapiens
caacttaatatctgaaaacctcagttttgtcacctctaaattggatataatcataatacctaaattatgaagtattgtgtgcaacaaacaagacaaaatgyccgtaaaatatttaacacagttgatggcacattgtcagctctaaaggaatgtgaactgagataacagttttctccctagttatctcttcctcctactctt

SEQ ID NO: 41556 - DNA, 201 bp, Homo sapiens
ttctcaggttcaagcgattcttgtgcctcagccacccgagtagctgggactacaggctcctgccatcacgcctggctaatttttgtatttttagtagagayggggttttgccatgttggccaagctggtctccaactcctggcctcaagtgatctgcccacctcggcctcccaaagtgttgggattacaggcgtgagccac

SEQ ID NO: 41557 - DNA, 201 bp, Homo sapiens
agactttctcacgctgtgttttctgttttattctaatgctgttacttcacgtcctggctaggcaccatctcaatcaactcagatacccgcagtggctcacrtctgatgccacggaaagcgcaggagtgagcacagcttcagcagaggtggtgctgatgcctagcgggggagttaccttcctgaagccctgggctatttgct

SEQ ID NO: 41558 - DNA, 201 bp, Homo sapiens
tcagagcggagtgtatgtgggaccacatgcaagggcctctctctccgcctctctggccagtattgtgaaatagctatggaagaaattatttggactggctyttttttctgttagattcatatgctatgaggactggggaagttcttagagaccatctcccctaccctcaaatgacagatgaggtaagtgaggctaagagag

SEQ ID NO: 41559 - DNA, 201 bp, Homo sapiens
gtccttccccctggtgggattggaaggcttgacagtcaacctgagaaaagaaagactttctcacgctgtgttttctgttttattctaatgctgttacttcrcgtcctggctaggcaccatctcaatcaactcagatacccgcagtggctcacatctgatgccacggaaagcgcaggagtgagcacagcttcagcagaggtg

SEQ ID NO: 41560 - DNA, 201 bp, Homo sapiens
cccaaacttccacagacctaccagccacagagctaccaggatctccccgccaaggccccagagagcaaagagcttgagtccagccaaccttacacataccwgttttttttcccaatgaccagtctagtgtgaggtttacaactgtaggcaagatccatgaacttttataaggttatccttgggaaattcctaatgagcagg

SEQ ID NO: 41561 - DNA, 201 bp, Homo sapiens
gctttgctttccctttgctttccgacaccacaaggatcgagtcttgccggctagcaaaccagttcgttcagtgttttcaaaacttcagtcatgaatgaagscatcttcagaaattctgccaaagcccaaattagtttcttaatacttttgttaaagactcaccttttctctacctaaattgatttagttctaaaggaaatt

SEQ ID NO: 41562 - DNA, 201 bp, Homo sapiens
tctgcccaacgcctagttctatgctcacaagcactgtggttgagatcatcatgcctggcactgcccaaagacaaacaagaccgttttgtgtggtatcaaargtgtcaaaatgggcagcagcctgagactccagcttccagcaggagacaaagtcgctcccatctggacgttccctcaatagccccgaagctttgctttccc

SEQ ID NO: 41563 - DNA, 201 bp, Homo sapiens
gtcctccttgatttctcaagtaaaatgttatctctgcctccttacaaaccctaaggaacaggacaaggcaccacctatacaacatttactgctctctcctyttgtgtcacagtcatctgtgcaaatgtcttatctcacctattctagttcatctgaatatcctcccctctaccctgaaaaagcctccacaattgtaagtgt

SEQ ID NO: 41564 - DNA, 201 bp, Homo sapiens
atctagaactcttcctcttgaccaatgtgcattgtctgcctggttctgccttactgcacttctctggttattgctcagaaatgctgtggatattgacttaycggaccaagtttgggatgggcaagtgaccaggctcagcatccgattaattcaagcatccacacctgcatgggctccaggaccaaacaaggtcttggacag

SEQ ID NO: 41565 - DNA, 201 bp, Homo sapiens
aaaactgctaggcttggcccaagggcccttatttgctgacccctgattaaagtggaagagagcatactccagttattaaatgagtaatactttctttttcrggttgagtactgcatattaaaggaaatatttatgtcattatttatttattcagcaaatctttttgaggaatgccatgtgccaagctctatgctaggtatt

SEQ ID NO: 41566 - DNA, 201 bp, Homo sapiens
tagaaagtgggcagaggataagaactaaaataacagtcataacctctctgtcttattaagtacctttgcattttgttccccatttcactccatagagcatytcctgaatgaagcagattaagttacagttttctgattagcatgtttttaaaacaatagcttctcctttcttttccgtcaactgtgctcagacacctatct

SEQ ID NO: 41567 - DNA, 201 bp, Homo sapiens
taatggatccacccctatgccccaacattgaggccccacctccaacattggggatcaaatttcagcatgaggtttggagaggacaaatatccaagtcagcmcaaaccacagcactcaatgtcctttttgccattgtttttaaatccaggatccaattaagagtcacacactgcatttcgttgccatgtcctttactaaaaa

SEQ ID NO: 41568 - DNA, 201 bp, Homo sapiens
agagtcttgtatcatgtgagatgtggggagagccttgtcactgctttccagagaagcccacggaggctggcaagggactccaccccatccctccctgacamcccctggagagaggtgggggcatctccagatgtctctggttcacgaggatgagcttatgcctctgtttcccttagggtgactctggaggccccctgacct

SEQ ID NO: 41569 - DNA, 201 bp, Homo sapiens
tgcctctgtttcccttagggtgactctggaggccccctgacctgtgagaaggacggcacctactacgtctatgggatagtgagctggggcctggagtgtgrgaagaggccaggggtctacacccaagttaccaaattcctgaattggatcaaagccaccatcaaaagtgaaagtggcttctaaggtactgtcttctggacc

SEQ ID NO: 41570 - DNA, 201 bp, Homo sapiens
aaacattaaacattaaacagtatttgatgcctagttaataatttgcatcctcttcatttgttcctgaatccttggagactgacatttttcccccctaaagscatagacaacaaaagaaattttattgagaggaaaacacaagtccttaaactgcaaagatgtttgccaggatgtctgatctccatgttctgctgttaatgg

SEQ ID NO: 41571 - DNA, 201 bp, Homo sapiens; identical to SEQ ID NO: 6652

SEQ ID NO: 41572 - DNA, 201 bp, Homo sapiens
gaaatctatctataagatcacaaggtcgtggctaagtttaaaatagagaattcattttttaaaaacctgtcagttgtagtgtttaagcagtattaagtttytgagagctatcaccctcaatgtcttcttctcctcaccatcatcatcctcgccaccttccgtgagggtttaatatgaaccaggcactgttctatatacttt

SEQ ID NO: 41573 - DNA, 201 bp, Homo sapiens
gaaacctgggcaagacacctgccaggtcagagactccaagtggtgcttgtggtaggagaggctagcaggatgtttcactaggcagaggacccttagagccytgggctgggagctaggttcagaggtccacctgtggtaaagctaagacacaggtgagctgtgtctgccccctggccctctggtgcatctgcatccgcatca

SEQ ID NO: 41574 - DNA, 201 bp, Homo sapiens
aactggttccaggttgtcacaggcacctttgagaacttgccctcaaaatttgtgcacccacaatgctttacacaattttgagtttcctgtggacactgctragcccaggctcaggatcccaagggaaatactgcctacgtacttaaaacccttgattttataaagaactgaggcctagaggggaagcaatttactcctggc

SEQ ID NO: 41575 - DNA, 201 bp, Homo sapiens
ctcccttcaacctctagcccagccacaaccatcagaaagcacgcagtgcacctgcaccccatacgatctcctctggctgacagctaaggagcacgcccggragagctccatctcaacgctgatctgctgtgttgttttgtttttcagttctccctgatgtctttattggaaagcctggacccaggtaagtgtgctgatctc

SEQ ID NO: 41576 - DNA, 201 bp, Homo sapiens
ggtagaaagtgggcagaggataagaactaaaataacagtcataacctctctgtcttattaagtacctttgcattttgttccccatttcactccatagagcrtttcctgaatgaagcagattaagttacagttttctgattagcatgtttttaaaacaatagcttctcctttcttttccgtcaactgtgctcagacacctat

SEQ ID NO: 41577 - DNA, 201 bp, Homo sapiens
atggatctcatagacccctttgagaagccatggaaagctataaactctctccccaggaaaatatacctatctattggtgctgacacacacagttttccagmgatttgtggctgacactagggtaagaagcaatgtgctatggccttagaggggaagcctgctgactgcaaaagatcctggcagtgggtctgcataaatagt

SEQ ID NO: 41578 - DNA, 201 bp, Homo sapiens
gagggagggatggaagtgccaggctctttttaacaaccagctctcctaggaactaatagagtgaaaccttgcttaccctgagggtgagtactaatccattygtaatggatccacccctatgccccaacattgaggccccacctccaacattggggatcaaatttcagcatgaggtttggagaggacaaatatccaagtcag

SEQ ID NO: 41579 - DNA, 201 bp, Homo sapiens
agttagtttgcaaaacattaaacattaaacagtatttgatgcctagttaataatttgcatcctcttcatttgttcctgaatccttggagactgacattttycccccctaaaggcatagacaacaaaagaaattttattgagaggaaaacacaagtccttaaactgcaaagatgtttgccaggatgtctgatctccatgttc

SEQ ID NO: 41580 - DNA, 201 bp, Homo sapiens
cattctcctgtgtgtatagttgttttgtttgtttgtttgctgaatcatttgcaagtaaattgtagacatcactctacctcaccacgcatctctctcttttktttttttcttagatggagtctcgctctgtagcccaggctggagtgcagtggcacaatcttggctcgctgcaagctctgcctcctgggctcaccccattct

SEQ ID NO: 41581 - DNA, 201 bp, Homo sapiens
tgccatgttggccaagctggtctccaactcctggcctcaagtgatctgcccacctcggcctcccaaagtgttgggattacaggcgtgagccactgcgcccrgcccacaaataagcctttttataaagcattccaagaacagtgcccctgattttgaacctagctcaacacctgcctctcaaggttaatgagcttttctgtt

SEQ ID NO: 41582 - DNA, 201 bp, Homo sapiens
gaatgttctcctttaggactaactgtagaaatttatttaatttcactttgtcatgataacaacactttagggaaataagagacaatatgtggaaggcctgmagttattacaaaaagagcaaaagtgttccctttttgtttgaaataaagagaagattacatgtcagggaaattaatctcattacaaagatgaacagcaaac

SEQ ID NO: 41583 - DNA, 201 bp, Homo sapiens
ctccctggggcttcccaccaatcccaggctggttctgggctggtgaaaaggaggcctaagtatggaagtgttggagggacctcagggttcaactggttccrggttgtcacaggcacctttgagaacttgccctcaaaatttgtgcacccacaatgctttacacaattttgagtttcctgtggacactgctgagcccaggct

SEQ ID NO: 41584 - DNA, 201 bp, Homo sapiens
tgggaccgactcttggcaaagtccttcttgtactcattgtcactctggagcctgccaacgttgaggaaatgcttcatccttgggtcatcgtcgacactgcrgtacccgatctgcaggcctcggtcccgcaggaaagcctctttgtaccggaactgcaagtcagaggagcagaggcagatcatgggtgcctacctcccccag

SEQ ID NO: 41585 - DNA, 201 bp, Homo sapiens
agcaattcttcaatctcagatgcctaaactataaaatggaaatctatctataagatcacaaggtcgtggctaagtttaaaatagagaattcattttttaaraacctgtcagttgtagtgtttaagcagtattaagtttttgagagctatcaccctcaatgtcttcttctcctcaccatcatcatcctcgccaccttccgtg

SEQ ID NO: 41586 - DNA, 201 bp, Homo sapiens
cattttcattgtagtccatctgaacttgtcaacctctattctgctcaatatggtctggtcagcatggtgatgtctcagttgggaatcttttggagcctcargttagaattattttgcttttcataaacaggcttctaagactttatgttcaaagcctttatgttctctaagactttatgttcaaaacatgttttgattgat

SEQ ID NO: 41587 - DNA, 201 bp, Homo sapiens
actgggaggagaaaaacactgatgagggaaaaggggagtttctcaatgagaaaggccccgtccaaagccaggccgaggggagacagtcgtggttccttctsgcctctcctctcactaacctgaatccctctctctggtcaggtgactgcagttttccttgctgtttagggacaacatatgttttcctcctttccccagttt

SEQ ID NO: 41588 - DNA, 201 bp, Homo sapiens
tatacccactactacaaaaaaaattcagaagggtatttcatgtcttttccaaatactcaaaatatatttctcttccttcgcaaatcctgtccttaataatkaatagcgagaatcacgataaataagtctgcagaaattccacatatctgaacaaagtgaaatgtaatatacaactttgagtcttttgagaaagatgtctgg

SEQ ID NO: 41589 - DNA, 201 bp, Homo sapiens
tgatgagggaaaaggggagtttctcaatgagaaaggccccgtccaaagccaggccgaggggagacagtcgtggttccttctcgcctctcctctcactaacmtgaatccctctctctggtcaggtgactgcagttttccttgctgtttagggacaacatatgttttcctcctttccccagtttctggctcagtagttactct

SEQ ID NO: 41590 - DNA, 201 bp, Homo sapiens
gccctgaagtgttactccttcctgggtggaagttcaaaatatgaaatgaccacggaagaagattttcaggcatggtgggggcaggtggggctttgctgtgkccaccttcatgagcaagttggagctggtgcttctctgacaaagaggtgacatcgcatccattttctacctctctctccacctagcattgctcaagttaaa

SEQ ID NO: 41591 - DNA, 201 bp, Homo sapiens
ctgggaataagtgtcagaaaggtgagtccgtcatcactagtccactcttccctctgagttaaacaagaggcagtcctttctgtgtgagaaagcactgcgcratgccatggaaaggattataactgcaatactgtatcatgcatagtgtattcctctgcagggtcccaggcagcctctcactggatcctcacccctgcactg

SEQ ID NO: 41592 - DNA, 201 bp, Homo sapiens
gcacaggcttcacctgatcttttatcctgaggctgggatgctagtcacgctgtcaggcttcctgctcggaacacccagcagctgtcatgtgcaccgtggarccagggggctatgtcagctactttctttggagagtttctccccagaagagaaaccacttcatgactcagcccagccccaaagttgccatttgtttaatca

SEQ ID NO: 41593 - DNA, 201 bp, Homo sapiens
aggatgctgaaacccatgggattggggaacacaatttctgcaggtaacatttaccttatttatgctcagttgattttggtcacttattttaaaacagatcrttgaaattcatcagcctcctttctaggaagattttcttactcagcaaggcaatgttatgctgctgtagtaaacaactgccaaatgtcagtggctcaaata

SEQ ID NO: 41594 - DNA, 201 bp, Homo sapiens
tgggatcccacagggctttacaaacgcaacaaactaatacacacgctaactagaaggcgcctctcgccaatccctgcaaggcagccacctctggggtgaayggtagcagctgttgatctgcacggagccccaggacacaatggccaggccagggagggaagaatggccggactctgggaggccctacgctgccccaggcca

SEQ ID NO: 41595 - DNA, 201 bp, Homo sapiens
ggctgttctttattcagccacagagaagggagacagcaggagaggcgcatcaccaacagatgacaaagtgacagccccagaccgtgtcggttgctcactcrttccacgagctacagcaggtcagggggcccttaagaaccgtccttttgtctcctggaaatggaggtcaaggctggcactctgttctacgggggattgggg

SEQ ID NO: 41596 - DNA, 201 bp, Homo sapiens
ttttttttttttttttaagacagagtctcattctttcacccaagctggagtgcagtggcacgatctctgctcactgcagcctccacttctcaggttcaagygattcttgtgcctcagccacccgagtagctgggactacaggctcctgccatcacgcctggctaatttttgtatttttagtagagatggggttttgccatg

SEQ ID NO: 41597 - DNA, 201 bp, Homo sapiens
gcctggcaggtggtagggcctggcttaaaacccaggagatctaaccccatagaccatgctgagcacctaggccacgctgccttggagtccccaacctcctmccctatgtgtgctgagggcccccgagaactcacagtcataacatctgcatcactgagagttgggaagtgcagctgtgcggctcctctgttaagcccgcgt

SEQ ID NO: 41598 - DNA, 201 bp, Homo sapiens
gaaaaacctcttatagggagtgaagagtatttaatttaaccctcaagaaactaccttcagacagtttggtatataaatgaagggaccctgaagcagacttytcctgggatccagagtccatctcgaggtgtcatagcctccagggagtgggctgagttgtagagattgggcctttttgcaaagagtagattcagtttaaaa

SEQ ID NO: 41599 - DNA, 201 bp, Homo sapiens
gatagatgttttgtgcaggctctgctgagggggaggtcctgcttccccagatggaggtcagcccaccagagctgctgttctaaaattatcccctgcacatmcctcaaaagcatcaaatggtcataataactcatatttacaaagcaccatcgcattcactgcatgggatcccacagggctttacaaacgcaacaaactaat

SEQ ID NO: 41600 - DNA, 201 bp, Homo sapiens
tcagacagtttggtatataaatgaagggaccctgaagcagacttctcctgggatccagagtccatctcgaggtgtcatagcctccagggagtgggctgagwtgtagagattgggcctttttgcaaagagtagattcagtttaaaaacatccctgttcagtgtccgacttaacctctcacaggggttgtgctttgatggtat

SEQ ID NO: 41601 - DNA, 201 bp, Homo sapiens
catagtgtattcctctgcagggtcccaggcagcctctcactggatcctcacccctgcactgtgagatggaactagtacatccattctccagatgggaagaytgaggctgagaggggataagggctggactctaaccaagatatatcccaaactcaggactttgtgcttagagtttagtctaactgcaacagagccatgttg

SEQ ID NO: 41602 - DNA, 201 bp, Homo sapiens
aattgaaacctgtttctgtctcttactgtatggcttttatcagtgatgaaagcaattcttcaatctcagatgcctaaactataaaatggaaatctatctataagatcacaaggtcgtggctaagtttaaaatagagaattcattttttaaaaacctgtcagttgtagtgtttaagcagtattaagtttttgagagctatca

SEQ ID NO: 41603 - DNA, 201 bp, Homo sapiens
acaaacgcaacaaactaatacacacgctaactagaaggcgcctctcgccaatccctgcaaggcagccacctctggggtgaacggtagcagctgttgatctgcacggagccccaggacacaatggccaggccagggagggaagaatggccggactctgggaggccctacgctgccccaggccaacacactcagcctgtgtta

SEQ ID NO: 41604 - DNA, 201 bp, Homo sapiens
tttctgttttattctaatgctgttacttcacgtcctggctaggcaccatctcaatcaactcagatacccgcagtggctcacatctgatgccacggaaagcrcaggagtgagcacagcttcagcagaggtggtgctgatgcctagcgggggagttaccttcctgaagccctgggctatttgctggggctgactgaccaaaaa

SEQ ID NO: 41605 - DNA, 201 bp, Homo sapiens
gaattgaaacctgtttctgtctcttactgtatggcttttatcagtgatgaaagcaattcttcaatctcagatgcctaaactataaaatggaaatctatctataagatcacaaggtcgtggctaagtttaaaatagagaattcattttttaaaaacctgtcagttgtagtgtttaagcagtattaagtttttgagagctatc

SEQ ID NO: 41606 - DNA, 201 bp, Homo sapiens
tgctgatgcctagcgggggagttaccttcctgaagccctgggctatttgctggggctgactgaccaaaaagggaaacatgggggcttgtgcttatgaggcrgccccacgctcagctgtgctttggttttgtccacttgcttgtcttaattttttttttttcttagacggagtctcgctctgttgcccaggctggagtgcaa

SEQ ID NO: 41607 - DNA, 201 bp, Homo sapiens
tgaattgaaacctgtttctgtctcttactgtatggcttttatcagtgatgaaagcaattcttcaatctcagatgcctaaactataaaatggaaatctatctataagatcacaaggtcgtggctaagtttaaaatagagaattcattttttaaaaacctgtcagttgtagtgtttaagcagtattaagtttttgagagctat

SEQ ID NO: 41608 - DNA, 201 bp, Homo sapiens
ctcctctcactaacctgaatccctctctctggtcaggtgactgcagttttccttgctgtttagggacaacatatgttttcctcctttccccagtttctggytcagtagttactctctcatttggggcaggagactgaaatttgatgaaaaatttggaggggggcgcttctcacctgcctttccttaccaacattgccttct

SEQ ID NO: 41609 - DNA, 201 bp, Homo sapiens
gtgaattgaaacctgtttctgtctcttactgtatggcttttatcagtgatgaaagcaattcttcaatctcagatgcctaaactataaaatggaaatctatctataagatcacaaggtcgtggctaagtttaaaatagagaattcattttttaaaaacctgtcagttgtagtgtttaagcagtattaagtttttgagagcta

SEQ ID NO: 41610 - DNA, 201 bp, Homo sapiens
actcccagcaagactgggaggagaaaaacactgatgagggaaaaggggagtttctcaatgagaaaggccccgtccaaagccaggccgaggggagacagtcktggttccttctcgcctctcctctcactaacctgaatccctctctctggtcaggtgactgcagttttccttgctgtttagggacaacatatgttttcctcc

SEQ ID NO: 41611 - DNA, 201 bp, Homo sapiens
tgtccttggccaagttactcaatctctgtcagcctcaggtttctcaacttagagtgaacaatacacctcctagatttttatgaagatgaagttagatggtrcatgtaaagtgcttagcacagggcatggtacataataaaggctcaaaaaatgttatctgttaaaatgactctgtagataatgcttgaccatgaccaaaag

SEQ ID NO: 41612 - DNA, 201 bp, Homo sapiens
cagattgcttcatccacatttgcttatgttcttaaggcttctgtgtacacttactagagtgtcagtggatctgtctttcccatctggtgacccatctttcrcgaaaggatggacaccagtagaatgccaccaatgtctccttgtcatctcagacatgggctgcaactccttctgaagagccttcctggccccattcctgtg

SEQ ID NO: 41613 - DNA, 201 bp, Homo sapiens
tatgttcttaaggcttctgtgtacacttactagagtgtcagtggatctgtctttcccatctggtgacccatctttcgcgaaaggatggacaccagtagaaygccaccaatgtctccttgtcatctcagacatgggctgcaactccttctgaagagccttcctggccccattcctgtgttcacagtggttcctgtatgcagg

SEQ ID NO: 41614 - DNA, 201 bp, Homo sapiens
cagttgaaacagttgagtgctacagttgagctagtgagatttaggggttgtacggagacaaactgccatagttcatatcctgccctttagtaactatgtgwccttggccaagttactcaatctctgtcagcctcaggtttctcaacttagagtgaacaatacacctcctagatttttatgaagatgaagttagatggtgca

SEQ ID NO: 41615 - DNA, 201 bp, Homo sapiens
catgtcctaaggccaacccagaaccaaggggcagggaaactgactccatctcttggtgggagaaactgaaaagtcacattgcaaagggtgtgggtgcaggraggggtggagaatcaagggctatttttgtcatcagattggctcatactgaagcagagtttcactgtggaacttgagggcgccaggcctagacttggtcac

SEQ ID NO: 41616 - DNA, 201 bp, Homo sapiens
tcagagttgttcaaaaatctgaatgggccactgggctctcaggaggtaatgagtttcccatcactggaggctttttaagcacaggctgaaaaacctcttayagggagtgaagagtatttaatttaaccctcaagaaactaccttcagacagtttggtatataaatgaagggaccctgaagcagacttctcctgggatccag

SEQ ID NO: 41617 - DNA, 201 bp, Homo sapiens
ttcatccacatttgcttatgttcttaaggcttctgtgtacacttactagagtgtcagtggatctgtctttcccatctggtgacccatctttcgcgaaaggwtggacaccagtagaatgccaccaatgtctccttgtcatctcagacatgggctgcaactccttctgaagagccttcctggccccattcctgtgttcacagt

SEQ ID NO: 41618 - DNA, 201 bp, Homo sapiens
gagaaactgaggcctaaggtcacatgcctggcaggtggtagggcctggcttaaaacccaggagatctaaccccatagaccatgctgagcacctaggccacrctgccttggagtccccaacctcctaccctatgtgtgctgagggcccccgagaactcacagtcataacatctgcatcactgagagttgggaagtgcagctg

SEQ ID NO: 41619 - DNA, 201 bp, Homo sapiens
acggaggttgcagtgagccaagagggtgccactgcactccagcctgggcaacaaagcgagaccctgtctcaaaaaaacaaaaacaaacaaacaaaaaaaamcctcattcaattccctagataattgaaggctttcacttgcaggctttggaaacaaatagttgtgaattgaaacctgtttctgtctcttactgtatggctt

SEQ ID NO: 41620 - DNA, 201 bp, Homo sapiens
ccctgtctctactaaaagaaaaatacaaaaattaggtggacatggtggcacatgcctgtagtcccagctactggggctgaggcaggagaatcgcttggacstgggaaacggaggttgcagtgagccaagagggtgccactgcactccagcctgggcaacaaagcgagaccctgtctcaaaaaaacaaaaacaaacaaacaa

SEQ ID NO: 41621 - DNA, 201 bp, Homo sapiens
ggatgttcacctactcagaggaggggcagatgggtgcaatttgccctaaactccttcccagaagatggttaagaaaacagctcattcaggctgggcatgcrtggtggctcaagcctgtaatcccagcactttgggaggctgaggcgggcagatcacctgaggtcaggagttcaagatcagcctagccaacatggtgaaacc

SEQ ID NO: 41622 - DNA, 201 bp, Homo sapiens
ctaggcagaggacccttagagccctgggctgggagctaggttcagaggtccacctgtggtaaagctaagacacaggtgagctgtgtctgccccctggcccyctggtgcatctgcatccgcatcaacccaggatgactcagcataatgaccacagaggtcacattgcctgcactgtctaatttaactctcacaacacactgg

SEQ ID NO: 41623 - DNA, 201 bp, Homo sapiens
ttgtctttaggatttggtctaatttttaaaagtaaccaaaggattactttcctcatagtactggcaacattatacccactactacaaaaaaaattcagaarggtatttcatgtcttttccaaatactcaaaatatatttctcttccttcgcaaatcctgtccttaataatgaatagcgagaatcacgataaataagtctgc

SEQ ID NO: 41624 - DNA, 201 bp, Homo sapiens; identical to SEQ ID NO: 6654

SEQ ID NO: 41625 - DNA, 201 bp, Homo sapiens
gggatgatagaattctacagagacattcattaagtcagcccttagaagatgggggtcaggtcccattcatctctgtctgtctcacagtactttgctcgggkttctccacacagtagacattctataaaattgtgttaaatccagctgttgatttgtctttaggatttggtctaatttttaaaagtaaccaaaggattactt

SEQ ID NO: 41626 - DNA, 201 bp, Homo sapiens
gctttaagagcacggcgggcaagcacccatggcaggcgtccctccagtcctcgctgcctctgaccatctccatgccccagggccacttctgtggtggggcrctgatccacccctgctgggtgctcactgctgcccactgcaccgagtaggtgccgctgggagcagggaccagggtggcttgagtggctgggggtgctctcc

SEQ ID NO: 41627 - DNA, 201 bp, Homo sapiens
ggccctacccctaaatacttgaattttaccaagcattgaccctgcatttatggagctcttgctcccttcctagttagattggaaagaggaaagatcatggrtttttgagtcagacagactggtattcaattcttgactttgtcacttgaacaactgagttttagtttctcaataatcatacttacttcccgggtttgcaag

SEQ ID NO: 41628 - DNA, 201 bp, Homo sapiens
catcccaaatggaaaggatctttgtgactttccttgcacagccaccagctggatggcttcttccaccctggctacctggggccactgagctctgctcgttmtatccatcttgactgaggcccatgggccctagagaataggaagcctttcttagcaggaatatgattcaaagcctatgtattttatttcttctttggcttc

SEQ ID NO: 41629 - DNA, 201 bp, Homo sapiens
tggccaagctggtctccaactcctggcctcaagtgatctgcccacctcggcctcccaaagtgttgggattacaggcgtgagccactgcgcccggcccacarataagcctttttataaagcattccaagaacagtgcccctgattttgaacctagctcaacacctgcctctcaaggttaatgagcttttctgtttctttctc

SEQ ID NO: 41630 - DNA, 201 bp, Homo sapiens
tagagatggggttttgccatgttggccaagctggtctccaactcctggcctcaagtgatctgcccacctcggcctcccaaagtgttgggattacaggcgtragccactgcgcccggcccacaaataagcctttttataaagcattccaagaacagtgcccctgattttgaacctagctcaacacctgcctctcaaggttaa

SEQ ID NO: 41631 - DNA, 201 bp, Homo sapiens
tttagagcagggaagctgcacagaatccctctgagccaggcataggtgatcggcgtcagagccaggagacttgagcctgagtccctcccctgccccaatgygtccatgtccttacacaagccacttcaccatgctgggcctcatcttcctcctctgcagatgaagggtctgagccagttcctctctacagtggctcctggc

SEQ ID NO: 41632 - DNA, 201 bp, Homo sapiens
gccggggccaatgtctcattacccagagtcctccctactaccgctgtgtctgtaaacacccttacacaggtcccagctgctcccaaggtaagtggtggagrccccttcgacgctagactttctgtgccctatcttgtacctgcacccttctgcatggaaggccagatgcatctgatgtttttgtggcaggcacccaagatg

SEQ ID NO: 41633 - DNA, 201 bp, Homo sapiens
gacaggtgcagacaactgacacgaacccctgctgtggagaaggacaatgcttcagtactcagcgcgcacaggtggtggtggtggagggggtgtatcttcaratagaccccattgcccctcccttcaacctctagcccagccacaaccatcagaaagcacgcagtgcacctgcaccccatacgatctcctctggctgacagc

SEQ ID NO: 41634 - DNA, 201 bp, Homo sapiens
ccagaatggggctacctgctcccggcataagcggagatccaagttcacctgtgcctgtcccgaccagttcaaggggaaattctgtgaaataggtatgggtytctgccaccatcagggccacaagtgaggcctctggaaccctttcctctctgggttttgttgccagaatgtggttcaaatcaagtttcccaaactcgacta

SEQ ID NO: 41635 - DNA, 201 bp, Homo sapiens
aaggggaaattctgtgaaataggtatgggtctctgccaccatcagggccacaagtgaggcctctggaaccctttcctctctgggttttgttgccagaatgwggttcaaatcaagtttcccaaactcgactattgcctcagccttctcacctaaagggatagggcgtgtctggcttcctgtaaagaaagtaataaactgggg

SEQ ID NO: 41636 - DNA, 201 bp, Homo sapiens
gttccaaagcaaggacaggtgcagacaactgacacgaacccctgctgtggagaaggacaatgcttcagtactcagcgcgcacaggtggtggtggtggaggrggtgtatcttcaaatagaccccattgcccctcccttcaacctctagcccagccacaaccatcagaaagcacgcagtgcacctgcaccccatacgatctcc

SEQ ID NO: 41637 - DNA, 201 bp, Homo sapiens
taatgtggttgataatcaggcttaggtaaagtgccatcctccaagccatcagctggctccgtaggagtgccttttcaagtcagctatctgcatttgctcgygcctcattatcatatgcatctctggacagcttccttgcagcttcaacttgccgacttgccatactccagccggctggagagagcaaagtcaacctgactt

SEQ ID NO: 41638 - DNA, 201 bp, Homo sapiens
cacaccagtacctgggcagccgtgttccaaagcaaggacaggtgcagacaactgacacgaacccctgctgtggagaaggacaatgcttcagtactcagcgsgcacaggtggtggtggtggagggggtgtatcttcaaatagaccccattgcccctcccttcaacctctagcccagccacaaccatcagaaagcacgcagtg

SEQ ID NO: 41639 - DNA, 201 bp, Homo sapiens
taaaaaagaggtttatttggcttggatttctgaggactggaaagtccaggattgggcagctgcttttggcaagggcctcaagctgcctccactcatggcaraagggaaaggggagccaatgtacagagatcacatggcaagaggggaagcaagagggagggatggaagtgccaggctctttttaacaaccagctctcctag

SEQ ID NO: 41640 - DNA, 201 bp, Homo sapiens
ctaatatgtctatattcaaatttcccacttgtttcagtatcttagtccattttgtgttgctacaaaggaatacctgaggctgggtgatgtattttttttawaaaagaggtttatttggcttggatttctgaggactggaaagtccaggattgggcagctgcttttggcaagggcctcaagctgcctccactcatggcaaaa

SEQ ID NO: 41641 - DNA, 201 bp, Homo sapiens
ctgacgagcacaccagtacctgggcagccgtgttccaaagcaaggacaggtgcagacaactgacacgaacccctgctgtggagaaggacaatgcttcagtrctcagcgcgcacaggtggtggtggtggagggggtgtatcttcaaatagaccccattgcccctcccttcaacctctagcccagccacaaccatcagaaagc

SEQ ID NO: 41642 - DNA, 201 bp, Homo sapiens
agttcaaaatatgaaatgaccacggaagaagattttcaggcatggtgggggcaggtggggctttgctgtggccaccttcatgagcaagttggagctggtgsttctctgacaaagaggtgacatcgcatccattttctacctctctctccacctagcattgctcaagttaaagccagtggatggtcactgtgctctagaatc

SEQ ID NO: 41643 - DNA, 201 bp, Homo sapiens
tctaatatgtctatattcaaatttcccacttgtttcagtatcttagtccattttgtgttgctacaaaggaatacctgaggctgggtgatgtattttttttwaaaaagaggtttatttggcttggatttctgaggactggaaagtccaggattgggcagctgcttttggcaagggcctcaagctgcctccactcatggcaaa

SEQ ID NO: 41644 - DNA, 201 bp, Homo sapiens
tgttactccttcctgggtggaagttcaaaatatgaaatgaccacggaagaagattttcaggcatggtgggggcaggtggggctttgctgtggccaccttcwtgagcaagttggagctggtgcttctctgacaaagaggtgacatcgcatccattttctacctctctctccacctagcattgctcaagttaaagccagtgga

SEQ ID NO: 41645 - DNA, 201 bp, Homo sapiens
tcagacacctatcttagctctgtattaagttgccaagtgactcacttctgaaagggttttcttttcaaatcatgacttgtgtgtgtgtggtggttgtaatyacaaattgttgtcaagcccctacatcatttgatggcttgttggtgtctgaggccgagacacagcagaaataccacaggtctagagaaaggcaggagaaat

SEQ ID NO: 41646 - DNA, 201 bp, Homo sapiens
ctacagaactacaataccattgtttactctcaagaaagtcaacattgacacaataatattgtctaatatgtctatattcaaatttcccacttgtttcagtrtcttagtccattttgtgttgctacaaaggaatacctgaggctgggtgatgtattttttttaaaaaagaggtttatttggcttggatttctgaggactgga

SEQ ID NO: 41647 - DNA, 201 bp, Homo sapiens
atttcttgacatgactctcgccctgaagtgttactccttcctgggtggaagttcaaaatatgaaatgaccacggaagaagattttcaggcatggtgggggyaggtggggctttgctgtggccaccttcatgagcaagttggagctggtgcttctctgacaaagaggtgacatcgcatccattttctacctctctctccacc

SEQ ID NO: 41648 - DNA, 201 bp, Homo sapiens
tgagacacccccccacctctctctccttcctcaatagcttttttcccctctaatggcctgtttcttaaaaaatggattagaaatgatttcaaagtcaattrtcatttcttgacatgactctcgccctgaagtgttactccttcctgggtggaagttcaaaatatgaaatgaccacggaagaagattttcaggcatggtggg

SEQ ID NO: 41649 - DNA, 201 bp, Homo sapiens
aagtttggttctagaaggtgctcttgattgtttttggtccctgtggaccctgtgcggtagggaatgtattccagggatttttagtttttgagggtatgtgyaaatgtagataaatgggcatatgctcttaaactgaggggaagcaatgctaggaacattgtgctatggaataggcttggcctggaatcccagcttcccaac

SEQ ID NO: 41650 - DNA, 201 bp, Homo sapiens
agaatgggaggtctcccatgagaagtgggtaaaagttatagcttatatttggagcttgcttctgttaataaagcacttcccttacataatcttatttggaycctaccacagcagagttctgtgagtgagacgagggttacaaatgaggaggctgagtctgcagaaggtcagatttgccaaaggccacacagctgagcagaa

SEQ ID NO: 41651 - DNA, 201 bp, Homo sapiens
gatttgtagggagatgtccctggcacctggtccctccctcaccctgttcttcctccacacctgctttaccaattcccatcccagtgccagcccaactgccyaactgtctgcacccaccaggatgccaagcaggtctggatacctttgtgggtttaggtcaggtagtccaactctaaactcatggtttctgactccaaatca

SEQ ID NO: 41652 - DNA, 201 bp, Homo sapiens
aagttaccaatgacaaggtgaaatgggaatactgtgatgtctcagcctgctcagcccagggtaaaggccatggctgttcagaagcccagggggtggggggratggagatttgtagggagatgtccctggcacctggtccctccctcaccctgttcttcctccacacctgctttaccaattcccatcccagtgccagcccaa

SEQ ID NO: 41653 - DNA, 201 bp, Homo sapiens
gccacacagcgaattggaggctgagatgaggtgaaaggctgaggcaaagtgagggcgagatgaaaaatgcatggctccaggcaggccgctccacctttttytgtgcgagggcggcctccgggctgacctgccctggtgataccctcacaccagcacctctgctgttgtcttctctgcccaaatggtttgcttcctcaggct

SEQ ID NO: 41654 - DNA, 201 bp, Homo sapiens
cctggccacacagcgaattggaggctgagatgaggtgaaaggctgaggcaaagtgagggcgagatgaaaaatgcatggctccaggcaggccgctccacctytttctgtgcgagggcggcctccgggctgacctgccctggtgataccctcacaccagcacctctgctgttgtcttctctgcccaaatggtttgcttcctca

SEQ ID NO: 41655 - DNA, 201 bp, Homo sapiens
tagatcctaaactttgcgggcaaggagaaacgttgacacggtatgtttgaagttcacaaaaggataatggtcccgaaaaatcccttttttgcaaaccccaktgaatttttagggttagcaatgaaattataagtcaataatggataaaagagaaaatatgagagttagccttcaggcaatgagcttagtcaattccaaaga

SEQ ID NO: 41656 - DNA, 201 bp, Homo sapiens
ggacggcacagcctatagctccatgtccaccttggcgactccctagcactgggattggtggggttggccgtaaaaggcttcagctctaagcccccaacccrcccacccattaggccctgctcctgtggggcttgtgatcttcgggtatggctcatttgcgacacccacttggtatcagaagcctccaccccactccttcct

SEQ ID NO: 41657 - DNA, 201 bp, Homo sapiens
tctacctaaattgatttagttctaaaggaaattgtcattactacaaagaaagcgaagtgatgtcattgaattctagctggctgctgttgacatgctaaagstctgagcctgaagcggctttatcctccttagaggaaagatcagcaggaggcagaggatagagacaccagcaccccccagtccttccccctggtgggattg

SEQ ID NO: 41658 - DNA, 201 bp, Homo sapiens
gtgcagtggcacaatcttggctcgctgcaagctctgcctcctgggctcaccccattctcctgcctcagcctcccgagtagctaggactacaggcccccgcygccacatccagctaattttttgtacttttagtggagacggggtttcactgttagccaggatggtcttgatctcctgaccttgtgatccacccacctcggc

SEQ ID NO: 41659 - DNA, 201 bp, Homo sapiens
gagtgcagtggcacaatcttggctcgctgcaagctctgcctcctgggctcaccccattctcctgcctcagcctcccgagtagctaggactacaggcccccrctgccacatccagctaattttttgtacttttagtggagacggggtttcactgttagccaggatggtcttgatctcctgaccttgtgatccacccacctcg

SEQ ID NO: 41660 - DNA, 201 bp, Homo sapiens
ggttttgtccacttgcttgtcttaattttttttttttcttagacggagtctcgctctgttgcccaggctggagtgcaatggcgcaatcttggctcaatgcracctctgcctgccaggttaaagcgattctcctgactcagcctcctgagtagctgggattacaggcaactgccaccacgcccagctaatttttgtattctt

SEQ ID NO: 41661 - DNA, 201 bp, Homo sapiens
gctggctgctgttgacatgctaaagctctgagcctgaagcggctttatcctccttagaggaaagatcagcaggaggcagaggatagagacaccagcacccsccagtccttccccctggtgggattggaaggcttgacagtcaacctgagaaaagaaagactttctcacgctgtgttttctgttttattctaatgctgttac

SEQ ID NO: 41662 - DNA, 201 bp, Homo sapiens
gagcacagcttcagcagaggtggtgctgatgcctagcgggggagttaccttcctgaagccctgggctatttgctggggctgactgaccaaaaagggaaacrtgggggcttgtgcttatgaggcggccccacgctcagctgtgctttggttttgtccacttgcttgtcttaattttttttttttcttagacggagtctcgct

SEQ ID NO: 41663 - DNA, 201 bp, Homo sapiens
gaaggagaaagaagaaggcctagagctagagatttcacagtaatattaactcatgattaggactcatgtgtgcgtgtgtgtgtgtgtggggggggggggggtgttttagccctagaaaactaagtatatctgtagcctagggcctttcagaactccaagttgctgaggcttgtgactcagagacactgttgcagagagaga

SEQ ID NO: 41664 - DNA, 201 bp, Homo sapiens
gagtttgtctttccccatggccttgcaagccagggtggctttgcagcttgctactcacgtaagctccctggagacccaggccccttgcgttggccagttcygcagcccgccgagccatttccactttgtaggagccaggaggggtccagccaacacctctggtcaggttcaagtctgatttatacttgaccttgagggtaa

SEQ ID NO: 41665 - DNA, 201 bp, Homo sapiens
cagtggctagaaggagaaagaagaaggcctagagctagagatttcacagtaatattaactcatgattaggactcatgtgtgcgtgtgtgtgtgtgtggggkgggggggggtgttttagccctagaaaactaagtatatctgtagcctagggcctttcagaactccaagttgctgaggcttgtgactcagagacactgttgc

SEQ ID NO: 41666 - DNA, 201 bp, Homo sapiens
ccttccccctggtgggattggaaggcttgacagtcaacctgagaaaagaaagactttctcacgctgtgttttctgttttattctaatgctgttacttcacrtcctggctaggcaccatctcaatcaactcagatacccgcagtggctcacatctgatgccacggaaagcgcaggagtgagcacagcttcagcagaggtggt

SEQ ID NO: 41667 - DNA, 201 bp, Homo sapiens
ttgcttgagcccaggagtttgaggccagcctgagcaaaatggcaaaaccccgtctctaccaaaaaaaaaaaaaaaatagctgaatgtggtggtcagcacckgtagccccagctaatcaggaggctgagatgggaggatcatctgaacccaggaggtcgaggctgtagtgagccactgcactccagcctgggtgacagagtg

SEQ ID NO: 41668 - DNA, 201 bp, Homo sapiens
tttgctcatggccacatgggtatcagcaggcagagctctacctagctcagacagggcccaccactcctgctccgtccatgcttctttgtttccttactgastgacccatctacttatgcacttaggcatggcctccagccagattgcttcatccacatttgcttatgttcttaaggcttctgtgtacacttactagagtgt

SEQ ID NO: 41669 - DNA, 201 bp, Homo sapiens
caagtaggggaatgaatacatatcgagtccctgctgtgaggcaggcattgtctcaggaaatttacgttctcttttgctttctccaaagacacctcaaggargagctttacagatgaagaacctgaaatgtagacagattaactcatttgctcatggccacatgggtatcagcaggcagagctctacctagctcagacaggg

SEQ ID NO: 41670 - DNA, 201 bp, Homo sapiens
tctgctgccagtgaactcttgtgggcataacatgaggcagtggaataaagcatcaggaataggactcctaggggctaattttacccctagagaaaagctgkattcgggctgctctagcaaccatcttacttcgtggagggaagtggggccttaggtatatgtacagctttgtggttgacttcttccctcggtgccctcttc

SEQ ID NO: 41671 - DNA, 201 bp, Homo sapiens
cggatgtaacaaatgggactcttctctttctgcccattgcccctgtcccatctctgcctgccactgtcacacgaagctgcagctcagcccttagctgggtrgggtctgagtggccagctctgggctttagagcagggaagctgcacagaatccctctgagccaggcataggtgatcggcgtcagagccaggagacttgagc

SEQ ID NO: 41672 - DNA, 201 bp, Homo sapiens
tctgtcctgttaccatccctgcagactggacccctgaccagtatgattacagctacgaggattataatcaggaagagaacaccagtagcacacttacccaygctgagaatcctgactggtactacactgaggaccaagctggtaggtaccaaatctctttcagggactctcctgggagaaggtcagagcggagtgtatgtg

SEQ ID NO: 41673 - DNA, 201 bp, Homo sapiens
gtctttacatttgccagatgtggcatgctttatgtttattatctcatttaagcttctctcaaaccctatgagttagggaccaatgtcattctcattttacrgacaagaaactaagcatagagcagttaaatcatctactcaagatggcacctctgggaggttacagctctgggattcaaggtctgcccaacgcctagttct

SEQ ID NO: 41674 - DNA, 201 bp, Homo sapiens
cgggcagaccccatgtaggaccctgtagacgtgctaggtcccaatcctcttcctgctgttcaaagatgagaaaatcaagacttgataatacagttggcttwcctaagttcaagggagtagaaagctggacttcgcttcatctcttcacttccaatcaggtgctcatgaccctgctaaatgtcaacactaccttgccgggtc

SEQ ID NO: 41675 - DNA, 201 bp, Homo sapiens
tctttgatttcattcagcttggtgactaatgaagtcccatcaagaaatattatccacaggatgaggcaaccaggcactcaagtatagtgtgatctgacccygggcagaccccatgtaggaccctgtagacgtgctaggtcccaatcctcttcctgctgttcaaagatgagaaaatcaagacttgataatacagttggctta

SEQ ID NO: 41676 - DNA, 201 bp, Homo sapiens
taagcagaccttgttaataggtctggattcaagtcaaaatcctctaacagacatttcattcatccctcgtcacctggaaaagtcacaccataccatctacmtcagaatcttccccatttctaaatatctgcaaaagaagtaattcttaatggccttgccaagattagctggtctgactgccaacctgtgggagagatggga

SEQ ID NO: 41677 - DNA, 201 bp, Homo sapiens
tttttgccttgccactgggagtctttagattccgtaggcgctttgatttggaaccctgggcgttcctcttctttatcacagtgggcacagttttgtcctcrtcctcacacattagagtcatttgatttttagttatttcggctgccttacacatctcaatggctttctttgcccaggaaggtcactttccctccacatctt

SEQ ID NO: 41678 - DNA, 201 bp, Homo sapiens
ctgttggttctcacattgctacctgctctctcggaggttctgatgactgctatgttggcgatggctactcttaccgagggaaaatgaataggacagtcaaycagcatgcgtgcctttactggaactcccacctcctcttgcaggagaattacaacatgtttatggaggatgctgaaacccatgggattggggaacacaatt

SEQ ID NO: 41679 - DNA, 201 bp, Homo sapiens
cattgcccctcccttcaacctctagcccagccacaaccatcagaaagcacgcagtgcacctgcaccccatacgatctcctctggctgacagctaaggagcrcgcccggcagagctccatctcaacgctgatctgctgtgttgttttgtttttcagttctccctgatgtctttattggaaagcctggacccaggtaagtgtg

SEQ ID NO: 41680 - DNA, 201 bp, Homo sapiens
atctcagctttctggcggccaagacccaaagggaaagctgtctagtggtagaactcgcatttctttaaatcagggttcagcaaactttgtaaaatgtcagrtagtaaatgtttggggttatactttctctctacaaaagcagccataaacaaacaggcatggttgttttccaataaaactttatttacaaaaacaaaactg

SEQ ID NO: 41681 - DNA, 201 bp, Homo sapiens
gtgtgcaacaaacaagacaaaatgcccgtaaaatatttaacacagttgatggcacattgtcagctctaaaggaatgtgaactgagataacagttttctccytagttatctcttcctcctactcttccatcgatctttctctttgaatgtgcaagtctcaggagtaagggttcttctatcattttcttgtctctgggagaag

SEQ ID NO: 41682 - DNA, 201 bp, Homo sapiens; identical to SEQ ID NO: 6657

SEQ ID NO: 41683 - DNA, 201 bp, Homo sapiens
agagccttcacctgaattaaatttattgtcaagcacctgaccgagtacctgacccatgtgtttcatatcttcctctttcattttttcccttttcaagttgktctcacacgccctctgggagtctgtaatcatatcctcttagtcctcaggtagacccacatcaccgatagaggcatcaaaatcttctgtgccttcatgtag

SEQ ID NO: 41684 - DNA, 201 bp, Homo sapiens
gcccccgctgccacatccagctaattttttgtacttttagtggagacggggtttcactgttagccaggatggtcttgatctcctgaccttgtgatccaccyacctcggcctcccaaagtgctgggattacaggcgtgagccaccacgcccagccagcgtctcttaagaataagtacattttcctacagaactacaatacca

SEQ ID NO: 41685 - DNA, 201 bp, Homo sapiens
cagagaaaaactcatcagtgaccgcaggagagaacatgggggtcttacatcactggcgatctccctagatgcccgggcagtctggaaggggatggcatccrgcctgaagtcataactgccagcccgggtctgctcccaggagtttctgtagactttctagattggaaaaacaaaagcatgagtaagcaggcagtcactcca

SEQ ID NO: 41686 - DNA, 201 bp, Homo sapiens
tgcttaccctgagggtgagtactaatccatttgtaatggatccacccctatgccccaacattgaggccccacctccaacattggggatcaaatttcagcaygaggtttggagaggacaaatatccaagtcagcccaaaccacagcactcaatgtcctttttgccattgtttttaaatccaggatccaattaagagtcacac

SEQ ID NO: 41687 - DNA, 201 bp, Homo sapiens
gttttaagcaggattaaatgtgggacattcaacacttttttttctgaaattcgtggtgaaatctcagggcgataaatatgcaggtccagttctctcaccaygtcacatacccaccaagccctttttgggagtggcatgccaatggctgttggttctcacattgctacctgctctctcggaggttctgatgactgctatgtt

SEQ ID NO: 41688 - DNA, 201 bp, Homo sapiens
ttcttccaccctggctacctggggccactgagctctgctcgttctatccatcttgactgaggcccatgggccctagagaataggaagcctttcttagcagsaatatgattcaaagcctatgtattttatttcttctttggcttcactgagaggtaagcagaccttgttaataggtctggattcaagtcaaaatcctctaac

SEQ ID NO: 41689 - DNA, 201 bp, Homo sapiens
ctttcatcccccacccaaccttggctggaggcttccttgaggacaaggccacatcctactcttatttgtataactctgcaccattcccaatgccatcctgmacctggcataacacttggtccattgtaggttcacaagacaagttacatatgcagacaataggattaagtgccaacataatgggaaagacaaaataaggtt

SEQ ID NO: 41690 - DNA, 201 bp, Homo sapiens
ttggctggcctcttatcttgctgaatattggctgggctttcttatatgtctgaggcctcagctaggaccactaggccagccgttgtccacatgttctcatwtgctcttgcagaataggccaaactgttcacatggcagtcatgtgggtccaggagtgggagagatacagagtcgagagagaacaagacttcttaaggccca

SEQ ID NO: 41691 - DNA, 201 bp, Homo sapiens
aaacctgaactgtttttctacaatctaccagtggaaccaaaatttatggcaggctactgtgcctctctacccaggaaaatatgtggacgagtttctagatygctacagagctcatcaggtattttctttgccaagtacatttgacccatttcttacacagtttcttactgaaattccctatttgctctgctttaagcagac

SEQ ID NO: 41692 - DNA, 201 bp, Homo sapiens
tttttattcctgatagaaaattcttgaacagctgcccctttctttcccaaagctcctcccttttctatagcctagagaaagtcacaaataatctatgtttmaacctgaactgtttttctacaatctaccagtggaaccaaaatttatggcaggctactgtgcctctctacccaggaaaatatgtggacgagtttctagatc

SEQ ID NO: 41693 - DNA, 201 bp, Homo sapiens
accacatttatttagtttagtgtctgatacatagaaaatactcaacacattataacctattattaggataatttggcttaactcaggatactctcatgatycttcctgataatttctagaaacagactgaaaactagacaaactcacaagaatttctttttattcctgatagaaaattcttgaacagctgcccctttcttt

SEQ ID NO: 41694 - DNA, 201 bp, Homo sapiens
ctcgtgcccgtgggcaagttgcttctttggttgatcttgctggagacagcgcacggtgagggccttgctggagcagaaggtgcgcattccacagtccccartgggtggtggaggaggtagccagcaaacagcacagactctgccaatctccccaaagcaggtgccacgacagccagcaggcctgtggaaatgcctcttcaa

SEQ ID NO: 41695 - DNA, 201 bp, Homo sapiens
caaacagactgggagctacagggtcagatttgatctgcaaacaggaagaactttctcactatcagagttgttcaaaaatctgaatgggccactgggctctyaggaggtaatgagtttcccatcactggaggctttttaagcacaggctgaaaaacctcttatagggagtgaagagtatttaatttaaccctcaagaaacta

SEQ ID NO: 41696 - DNA, 201 bp, Homo sapiens
tccaccctggctacctggggccactgagctctgctcgttctatccatcttgactgaggcccatgggccctagagaataggaagcctttcttagcaggaatrtgattcaaagcctatgtattttatttcttctttggcttcactgagaggtaagcagaccttgttaataggtctggattcaagtcaaaatcctctaacagac

SEQ ID NO: 41697 - DNA, 201 bp, Homo sapiens
ccctggtgataccctcacaccagcacctctgctgttgtcttctctgcccaaatggtttgcttcctcaggctcgacgcgtctaccaccaggtgggtcctgtrtcttcacaagggctctctgtctcacagactcgctctcttattgtctccctttcctgtgtcctcggccttgtgcccacagcgtgcgcaagctaagcagggc

SEQ ID NO: 41698 - DNA, 201 bp, Homo sapiens
taacaattatcaaagtttttttattaagatataaaaattaagactatgggcatgggaagcaatgtgggagacaatcctccatgacccaaaaattagacagmagccttgtcctggcatagcccagtgtttcaggaccacggacaaggctacagacactgtcagtcaccccaccctcaaacattgttttatacatgtatccct

SEQ ID NO: 41699 - DNA, 201 bp, Homo sapiens
agattggttcaagatggcaatggctgtttctttggaaggcctagggagaatgggaggtctcccatgagaagtgggtaaaagttatagcttatatttggagyttgcttctgttaataaagcacttcccttacataatcttatttggaccctaccacagcagagttctgtgagtgagacgagggttacaaatgaggaggctga

SEQ ID NO: 41700 - DNA, 201 bp, Homo sapiens; identical to SEQ ID NO: 6658

SEQ ID NO: 41701 - DNA, 201 bp, Homo sapiens
gaaatattatccacaggatgaggcaaccaggcactcaagtatagtgtgatctgaccccgggcagaccccatgtaggaccctgtagacgtgctaggtcccartcctcttcctgctgttcaaagatgagaaaatcaagacttgataatacagttggcttacctaagttcaagggagtagaaagctggacttcgcttcatctct

SEQ ID NO: 41702 - DNA, 201 bp, Homo sapiens
atgttacgcaatgtattcaacaaatatcaactgtgcacctactgcatgcccaccctgtctgcaccagtgcagtctctcagctctggacccctgctcagctsttgggctcagagtcatacctctgcctgagccctgctgaggaactggagggaggctgaatagcacaatttatctttcttgtgtcccacagacgttgcctac

SEQ ID NO: 41703 - DNA, 201 bp, Homo sapiens
gactacaggcgcccgccaccgcacccggctaattttttgtatttttagtagagacggggtttcgccgtgttagccaggatggtctcgatctcctgacctcrtgatctgcccgcctcggcctcccaaagtgctggtattacaggcatgaaccaccgcgcccggccccagttggtggttattatggaactccatagaaaatta

SEQ ID NO: 41704 - DNA, 201 bp, Homo sapiens
acttaaatataagtaggaaaatggatgttattaagatgctatggttctaaactagatatgaaataaaatatttagtgttttactgcatcagcaataagcaygtcctgttttgcagataactggcaatttgttgaagaacaagcttcatgtgcaagaacaatatattcacccattgccactggacactgaatgtattgtgaa

SEQ ID NO: 41705 - DNA, 201 bp, Homo sapiens
aggttgttgtgatgatttatatattttgaaatcatttatattccatatatggatttttttaatctgaaaaagttaaaattcagtaaaataaaaaaatactyaatatggctttcatgttagctatgattcagaatacattttattattaacctgtagttattttaaagtactgcatgaagatacagaaaaaaaacaactctt

SEQ ID NO: 41706 - DNA, 201 bp, Homo sapiens
tttgaaaggtttgactttagggaaacatttgataattgtgtttaatttaggctttctagatataagaaatttatagagcagctgcccatgctacattgttrtttagtaaactttgaaagatgattaatgcatagttgtattgctgcattctttgaggataataattacattggcaatcagttttaatttttgttcctaaat

SEQ ID NO: 41707 - DNA, 201 bp, Homo sapiens
tggtgggctgcaaaggggcaacaagaaaatcccagagtcatctaatgtaggaggatcaagaaaaaagacatgtccattctataagaaaatacctggtaagktgaaatgtcaatactcgatatatcaacaaagacaacgtttttgaactttgtgtttattgcccattgtgtgtgtgtgtgtgtatgagacaattttttgtat

SEQ ID NO: 41708 - DNA, 201 bp, Homo sapiens; identical to SEQ ID NO: 6666

SEQ ID NO: 41709 - DNA, 201 bp, Homo sapiens; identical to SEQ ID NO: 6667

SEQ ID NO: 41710 - DNA, 201 bp, Homo sapiens; identical to SEQ ID NO: 6668

SEQ ID NO: 41711 - DNA, 201 bp, Homo sapiens; identical to SEQ ID NO: 6661

SEQ ID NO: 41712 - DNA, 201 bp, Homo sapiens
aattaacatacacagggatataccaagatggcttatagaaagtttctcaatcatggtagtatgatagggaatagtttccaaattagtaaagccttataatkaaccaatttctcaaattctattcttagaatagaatctaaaacttgttcagtgtatcaacaattataactaatcttattaaaattgttgctttttattata

SEQ ID NO: 41713 - DNA, 201 bp, Homo sapiens; identical to SEQ ID NO: 6663

SEQ ID NO: 41714 - DNA, 201 bp, Homo sapiens; identical to SEQ ID NO: 6664

SEQ ID NO: 41715 - DNA, 201 bp, Homo sapiens
cgtttattttttgttacaggaattccttacagtgaacacagcagctacctagaaatgaagcgctttgtccagtggctgaagccccagaaaatcatacctastgtaaatgtgggcacctggaaatctaggagcacaatggagaaatattttagagagtggaaattggaagctggatattgatgatacctccgaggattcagt

SEQ ID NO: 41716 - DNA, 201 bp, Homo sapiens
tttcctgcacaccagttctttttatgatgtaaatttccttgagttgaagtgccgcatttcctgtagtgcaatgctatgtcattgtggtcagctaataaagygtgctaacttgttgatattgaaatagatactgttcctttaggtgcttgcctgtgttatgaacattcctttgacatttgtgttcagctgtccaggtgctgt

SEQ ID NO: 41717 - DNA, 201 bp, Homo sapiens
ctaaactagatatgaaataaaatatttagtgttttactgcatcagcaataagcacgtcctgttttgcagataactggcaatttgttgaagaacaagcttcrtgtgcaagaacaatatattcacccattgccactggacactgaatgtattgtgaatggtgtcaaagttgttttgcttgatgccaatcagtaagtattaaag

SEQ ID NO: 41718 - DNA, 201 bp, Homo sapiens
ggcacagccattataggaaattcttcctggcattgtggagtgtttacttaaatataagtaggaaaatggatgttattaagatgctatggttctaaactagrtatgaaataaaatatttagtgttttactgcatcagcaataagcacgtcctgttttgcagataactggcaatttgttgaagaacaagcttcatgtgcaaga

SEQ ID NO: 41719 - DNA, 201 bp, Homo sapiens
attctaacttttgactttgtagaatgctgtgaatttctaagcaatttggttaaaaaataataattaaaccagtaagatctttcattctactagaaaaaaawtgagaaaacatattccacataaaagtcctaaacttaaaacgagttgatgtcaagtttcagtttttagaaaacatctgtcttattacatggaaacaaaaga

SEQ ID NO: 41720 - DNA, 201 bp, Homo sapiens
ttcacatttccagtttattgtagtgaggtaagttttagtattctaacttttgactttgtagaatgctgtgaatttctaagcaatttggttaaaaaataatrattaaaccagtaagatctttcattctactagaaaaaaaatgagaaaacatattccacataaaagtcctaaacttaaaacgagttgatgtcaagtttcagt

SEQ ID NO: 41721 - DNA, 201 bp, Homo sapiens
tgtttttgtttttttttttttttcagtgatctttagattaacatgtaacctttgtttgcctgtgatgaatccattaccaaataatctaacaaaagctttaraagccactttctcaagacatcgaaaataagattgtggaagaaacttaaatgagttatagtcagtttttaaagatatggacgtggtttcttatagaatttt

SEQ ID NO: 41722 - DNA, 201 bp, Homo sapiens
tggtaatagcagacactggacatcatagaattttggtcgtttggaagaatggacaaattcaatatagcattggaggtaaaacttgcttctgattacgatakataacgtgttttacagtaaaaaaatagttcaaggtaaatataaaagttgaaatgtctaaatgaaaactaattatagaaaagtgatatacattgacttaat

SEQ ID NO: 41723 - DNA, 201 bp, Homo sapiens
gagctagaccgacctgtttggagaactagataacaaagttaaatttgatctttcactcagctatgcaccaacatagctctcctttgccaagacagaggctytaaaagcaagctaagaaaagcaaatgtttttgttcctaaagcttagagctaaatttgcctaactcacccttatgagattttcttagagtgggacattgat

SEQ ID NO: 41724 - DNA, 201 bp, Homo sapiens
ttttattgcgtatgtgaatctggattaacatttttttcttttactattttaaagatattactccattgtcttttgacttacatagttttccacaagacacstgttttaatattatctcttgttctttatatgtaaagtgtatttttttctctggttgctttcaagattttatctttggttttcagcagtttgatatatcta

SEQ ID NO: 41725 - DNA, 201 bp, Homo sapiens
tactgtttacttcttcctcccaagtttggctttcagttgctaaaagctattctaaatacctgcttcaaggcataattaatagttgtaatagctgcattgarttatttataagcagtaaactttgttttcttaaattggttaaatagggatgctgtactttattattagttaacaaaatctttcttcatagtacagagcttt

SEQ ID NO: 41726 - DNA, 201 bp, Homo sapiens
aggcaaccattcctcattgcatcttttttcccagctgctttcaaggcatgtgtttgtgtgtgtgtgtgtgtgtgtgtgtgtgtgtgtgtgtgtgtgtgtgtttagcctttgattttcagcagtttgtttatgatgtgtctagacatggttttaatgtattttattttgtgtgtgttgagcttgaattctctaaatttatat

SEQ ID NO: 41727 - DNA, 201 bp, Homo sapiens
caaatatgatctgttggtaatacatgcattattaatactcactgtaaaattaatgaacttcttaagtggaagaggttgtattatactttttaccctctatsgtgtctattgaagggctgttcagtttgtaaatgtatttatgttttcctagtacaaatatgtaaaattaaggtccagattcactaaatgatcatggctaac

SEQ ID NO: 41728 - DNA, 201 bp, Homo sapiens
gcctgaatttcctcataagtagagttgtcactctccttcttaataggaaattggcactaggaccacactgacctgtgttttaattttaaggatgtattatytttattaccgatcttcaggtagtaatgacccttagcattttaaaagttattgtttctccctactcttttctttatttaattaaggaaactcctttttaaa

SEQ ID NO: 41729 - DNA, 201 bp, Homo sapiens
ggaccatgtcgttttttaaaaaaaccacagctgtcatcatcttcttcgaggctgccatcttttgagctttcggtaaaaaacagttgttcttgtgaatcatscggtttttcatcgatatcatgagtgtcttcatcactttgaagtggagaataggagatttcacagtcactgaagtcattttctggcaatggcaaatttatg

SEQ ID NO: 41730 - DNA, 201 bp, Homo sapiens
tagttaagatgaggtcaatgccagatctgctggaggcatgatgggagatggggataagaggggaaaagtagaggaatggacaggtgggatatgaaagggamtgattatgtgcatttgaataagaagttcattctataattgattggccttttttcataataaaactttgtactgcacatacactctaaatgttctattgac

SEQ ID NO: 41731 - DNA, 201 bp, Homo sapiens
aggacaaagctaggaaaaggattggaaaagaaaataaaattggcagctcactcttctgtcatttgatcttctgtcatttgcttttctgagttttggccctsctgtacaatctatctggtcgggtttacttttctccatcttcaagcagggtgtgtcttcaagcatgcatgtctgtgttttgattcggaattgatagttata

SEQ ID NO: 41732 - DNA, 201 bp, Homo sapiens
atacctaagatcacccctgaaagactatttggtgaactcatggttaaccccataccttaagcagattcagtgacttcctagaatggatccttataatctcstactagtttactggaaacattgtttttatagcacattgtgacaaaaaaattaaaaatatttttatatacaaatatgcttctgaaaagcaaaatactttgt

SEQ ID NO: 41733 - DNA, 201 bp, Homo sapiens
aatatatgtgggttccaattttctacatgttcaccgtcacttgttatttttcattttttaaaaattctagccatcctactggatatgaagtggcatctcaytgtggttttgatatgcatttcccttatgactaatgatgtcaaccaccttttcctgtgcttatgggccatttttatatctttgagaagtgtcagtattctt

SEQ ID NO: 41734 - DNA, 201 bp, Homo sapiens
tgtttttatagcacattgtgacaaaaaaattaaaaatatttttatatacaaatatgcttctgaaaagcaaaatactttgtaagtggagcaagaattcactstcagtttcaacaaagaatcacaaagcatacacaaagaacagggaagtacagcccattcaagaacagggaagtacagcccattcaaaggaaaaaaataaac

SEQ ID NO: 41735 - DNA, 201 bp, Homo sapiens
gacaaaaaagctctaaggcatgtagaaaacaaatagccaaatgacagataagtccctctttgtcaataattactttaaatgtaaatggattaagtcttctrattgaaaggcagaaattggcagaatgaataaataacatattccaactatatgttgtcttcaagagactcactttagatccaaagatacaaacaggttaaa

SEQ ID NO: 41736 - DNA, 201 bp, Homo sapiens
atgtgtgtcttctcattatttattatatgtcagtcatcttgtataaaacaatagaggctgagataaatagtacttatgttataattatgaaagattgagtmaatttggtcaggagctgagctgggccttggttttattattgctatgtcaatgcaccacatgttttaaattcctctagctgggcagttgttgccttctgat

SEQ ID NO: 41737 - DNA, 201 bp, Homo sapiens
caggcaaccattcctcattgcatcttttttcccagctgctttcaaggcatgtgtttgtgtgtgtgtgtgtgtgtgtgtgtgtgtgtgtgtgtgtgtgtgtgtttagcctttgattttcagcagtttgtttatgatgtgtctagacatggttttaatgtattttattttgtgtgtgttgagcttgaattctctaaatttata

SEQ ID NO: 41738 - DNA, 201 bp, Homo sapiens
ccaggcaaccattcctcattgcatcttttttcccagctgctttcaaggcatgtgtttgtgtgtgtgtgtgtgtgtgtgtgtgtgtgtgtgtgtgtgtgtgtgtttagcctttgattttcagcagtttgtttatgatgtgtctagacatggttttaatgtattttattttgtgtgtgttgagcttgaattctctaaatttat

SEQ ID NO: 41739 - DNA, 201 bp, Homo sapiens
cccaggcaaccattcctcattgcatcttttttcccagctgctttcaaggcatgtgtttgtgtgtgtgtgtgtgtgtgtgtgtgtgtgtgtgtgtgtgtgtgtgtttagcctttgattttcagcagtttgtttatgatgtgtctagacatggttttaatgtattttattttgtgtgtgttgagcttgaattctctaaattta

SEQ ID NO: 41740 - DNA, 201 bp, Homo sapiens
catgaaactaagaagttaagaatttaaggtagtaaaaacaacctatctcatcaataatctgatcattatttttatcttataattctatcagggatttgtcrtttaacatttgaaagtgatttcagttttgtgtgtatcaaagtaaagtaagaagttccctacacagtgggtaaataagttaatggttggaaaaatgataat

SEQ ID NO: 41741 - DNA, 201 bp, Homo sapiens
ttgaccaagggacaataaatttgtataaaaatttattaaggggcattaaaagcagggagggaaaccccagagaatgaaaatgagctaaaaaaaaaaaaaaagttaaaaggtttagagaaaaaaatgattgaattggaaaacaggcagaggaggtccaacataagactacttggagaccttcaagaaaatcagaacagctga

SEQ ID NO: 41742 - DNA, 201 bp, Homo sapiens
ggtaaataagttaatggttggaaaaatgataatgaaagctgacttgaacaatttaactagaccaagatcactagtttgtttttttaggaggcttatcactwttgatttgattattcacattcatttatttaagaactaaattgcacacaatataccacatgttgactccacctatgaacttgtctttttcagtgagttaac

SEQ ID NO: 41743 - DNA, 201 bp, Homo sapiens
tacagtgagaaccgtttcactgaaagatggagcagtgaagcacctcgtaggaggagaaagagaccccatggtaatgacagtcactcttgcacagtgcgctyggacactgagcaagctgtcaattttgtgaattatggaaagttaataagatttaagagagaccatccttggcctatctgcgaatcaaaatgaaagtcagac

SEQ ID NO: 41744 - DNA, 201 bp, Homo sapiens
atagcagacactggacatcatagaattttggtcgtttggaagaatggacaaattcaatatagcattggaggtaaaacttgcttctgattacgatagataaygtgttttacagtaaaaaaatagttcaaggtaaatataaaagttgaaatgtctaaatgaaaactaattatagaaaagtgatatacattgacttaatttcct

SEQ ID NO: 41745 - DNA, 201 bp, Homo sapiens
agaggggaaaagtagaggaatggacaggtgggatatgaaagggactgattatgtgcatttgaataagaagttcattctataattgattggccttttttcawaataaaactttgtactgcacatacactctaaatgttctattgactattgaaaatctttacacagcaaaagacaaaagcaaaagtaacattcattgcataa

SEQ ID NO: 41746 - DNA, 201 bp, Homo sapiens
tctttacacagcaaaagacaaaagcaaaagtaacattcattgcataaaaccatcctttgaatttctatagattgacctagaagctgagaaggtgagcactrtagctggtattggaattcaaggtacagataaagaaggtggagcaaaaggagaacaacaacccattagttccccttgggatgtagtttttggaacatcagg

SEQ ID NO: 41747 - DNA, 201 bp, Homo sapiens
gcaatttggacagtatccatcataaactggacgtatctttggggacacgtgttggcttttttgagttctacagagttttcctggagtagtttccttgtctygggtctgctgaataccatctccacaacttgaattctgactagaagcaacagaagtctgacaacctgcatttccaaggggcacttcatggtccttcacctc

SEQ ID NO: 41748 - DNA, 201 bp, Homo sapiens
ccacagcctttatatggtgctactctctcaaagtgtttatttgcattagtcttaaaaaaaaaggtcacattttaatggaaagttttaggtaaattttatcyttctctttaatcattgtaatttattttatgtaaatttcaggattagaatggctgaacacagaagaacctatttctgtctacaaggatctatgtggaaaaa

SEQ ID NO: 41749 - DNA, 201 bp, Homo sapiens
ttgtttacaacaatttggccatgtgtatttttctagggaaagggctcataattttcattgtattatccaaggagcatatctttcaaaattgttaaaaattrttcatctgttgaacaattggagttatttttaaatctttgtagtctaggtaatggataattagaatgcttttaaaattattttcttcgctatatactacta

SEQ ID NO: 41750 - DNA, 201 bp, Homo sapiens
gtctaaatacattgtttcagatactgccttgtttttctcactgtttctttcagtattgacatttattctcatttatttgacaatattttcacttatatacwcatagtagaaaaaaatacatataatatataataatatccactgtactgtaagtcttcctgagggctagaaatatgttttgtctactactgaatcctagca

SEQ ID NO: 41751 - DNA, 201 bp, Homo sapiens
tgtctattataaactaactcttgatgtatgacatttacctgaaaaaaatgcaacagtttttttctgaaaaactggtaatttgcacggtatatttttaaaakaaacatagattactattgcaacataaatgtcatttctcttcacgtagatctctgatataagatgaataacatcttcttatagttgacaatgaaaattata

SEQ ID NO: 41752 - DNA, 201 bp, Homo sapiens
taaagggcagaatcttttacatccgcttttcagtatgcatgattaacagaaaaagctaaataatttaagaaaaatctgcatattgaggttcttacagaaamaaatgggagtggatatttggcaattgtgtttgtacgtagatcaatatagatctcctatttggacaatatgatatggtttattatacagatttataaattc

SEQ ID NO: 41753 - DNA, 201 bp, Homo sapiens
ctataaagcaaaaggaataatattattgaggaaccaaaggaagtcctagaatatactgcaggaggaaaagagtgtggagaagatactggagagatgagatktgttatactaggaacaattgaaagccaatgaaggattttctgcaacaaggtgacatgatcagatttgtgtttttaaaagatcagtgacttcaggatggat

SEQ ID NO: 41754 - DNA, 201 bp, Homo sapiens
tttccatgtgttaattattcttgcttcctgcatcttttttttttttttttttttttttttgagacggagttttgttcttattgcccaggctagagtacagkggcgtgatctcggttcaccgcaacgtttgcctctcaggttcaagcaattctcctgcctcagcctcccaagtagctgggattacgtggatgtgccaccacg

SEQ ID NO: 41755 - DNA, 201 bp, Homo sapiens
ttcagaaataaactaaattcccataaaggttctattgctgtaagtctgtggatgccaagaacaagtgtaggggagacttaaaagactccatgagaacaagyagagtggttcagagtatttagacaacgcacaaacagaatagtctccttacccccagaaagagaagctccaatacaaagtataaaatactgaacacaggtt

SEQ ID NO: 41756 - DNA, 201 bp, Homo sapiens
aggttctattgctgtaagtctgtggatgccaagaacaagtgtaggggagacttaaaagactccatgagaacaagtagagtggttcagagtatttagacaaygcacaaacagaatagtctccttacccccagaaagagaagctccaatacaaagtataaaatactgaacacaggtttggacatactagaccatatcaccagc

SEQ ID NO: 41757 - DNA, 201 bp, Homo sapiens
atcctgagttccgcccgcgcctgatattagccaagtggacactccgtgaatatttagtgtccccggtggcaatgattgcaacgtccacaccattctgtccrttcaatctggttccccagtgtcttctggtcatctttctgcatcatcttgacatttattgatcactttttcatgtatcacacacagggtttttttttgttt

SEQ ID NO: 41758 - DNA, 201 bp, Homo sapiens
ttttggtatattagtcatagtttgatcagagaagcacaactgggtataataatgagagaactaatagagaattcattataggtagttgaccttatgttatkgtggagctacatggctaactagtatatgtgaggctgttgcttttgtgtgctcctgcaacctacctaagtttactaacttttcacagtcttcaagcagagg

SEQ ID NO: 41759 - DNA, 201 bp, Homo sapiens
cacattctaattcaaactagaatggcgattagtttcattgacatagaacttcattattctactaaagtctaaaaatatgctctcattctataattaatatwaagttcttgtgttttaataacagattttcttatttcctagctccccatcttcagatctgaaaatgctgtggtagatggcccgttcctagtagaaaaacag

SEQ ID NO: 41760 - DNA, 201 bp, Homo sapiens
gcccggaggccggggccgcagcctctccggcctgctccccgcgcagacctcgctagagtacgccctgctcgacgccgttacccagcaggagaaggacagcytggtctaccagtatctgcagaaggtggacggctgggagcaggacttgtcagtacccgagtttccggaaggtgaggggctggcgtcggggtgggggcccct

SEQ ID NO: 41761 - DNA, 201 bp, Homo sapiens
tgaactggctgggcatggtggctcatgagcgcctgtaatcctagcactttgggaggctgaggtgggcagatcacgaggttaggagatcgagaccatcctgrctaacacagtgaaaccccgtctctactaaaaatacaaaaaattagccgggcatggtggcgggtgcctgtagtcccagctactcgggaggctgaggcagga

SEQ ID NO: 41762 - DNA, 201 bp, Homo sapiens
gttgcagtgagccaagatcatgccattgcactccgcctgggtgacagagtgagactctgtctctaaataaataaataaataaataaataaataaataaataaatgactttccttttcatgataactgctgcattatagtattataatcctttactttgaggctttttgtctgctaaaaatgttgacgttttcattcttgtc

SEQ ID NO: 41763 - DNA, 201 bp, Homo sapiens
tctctttcactccatactttgaatccacacccaagacttcttgattgcttttatccttgaaaaatgtcttttatctgtctctaactctccagtttctcacmaccattattcttttttgtttgtttgttttagagatggagttttgcctgtcacccaggctagagtgcagtggcacgatctcagctcactgcaaactccgcc

SEQ ID NO: 41764 - DNA, 201 bp, Homo sapiens
atcccagtgaagcatctaaggttaacaatctgaaaaatgagggataatatgacccacctattaggttatttgaaagattaaatgagataatccttttaaartatctactgtaatacatagtacatagtaaaagctcaataaatgttagaatgttagctgttagtatggttattgtatcctaatacattatgacaacagtga

SEQ ID NO: 41765 - DNA, 201 bp, Homo sapiens
cgtgcctgtagtcccagctactcaggaggctgaggcaagagaatcgcttgaacccaggaggtggaggttgcagtgagccaagatcatgccattgcactccrcctgggtgacagagtgagactctgtctctaaataaataaataaataaataaataaataaataaataaatgactttccttttcatgataactgctgcatta

SEQ ID NO: 41766 - DNA, 201 bp, Homo sapiens
gtttacccatgttctctctcccctaaccatatagctaaccctttagtgcctcaggaactgaaatgtgacatacctaaaactgaacccatcatgtatccatrttttcttggttgtttttcatctttgtttttctggccctctgtgtgtgggtgatgctattatcctccctgctgtctgtcctgagagaggctggttgagaat

SEQ ID NO: 41767 - DNA, 201 bp, Homo sapiens
acttgttctggaggtttatctaatggttaagagtagtttccttggaagatcatgtgagtatattctacgtaggctcttctctatatctcactaatatatamcatatatttttaacaaagtatatttctgcttccttccatgaaagtttgctacttggttatttgttttaccatctgctgtcactcatcaacagggagcttg

SEQ ID NO: 41768 - DNA, 201 bp, Homo sapiens
gaagaataatcatcttttaaagtttatctccttttatttatctttatgacaatccattcatagctctctttggctgttttaggttattcaacgtgtaaccraaaacataaaggaaaccttgtttccttcattcataaaacaaaaatgaaaaaataggtatatcttgcatactacagccagcagcaactatagaattaggga

SEQ ID NO: 41769 - DNA, 201 bp, Homo sapiens
tgattgacattacacttattctcctaagcaaaaggtatttataacagcaataatctatagagctgatggctgaataaatactacctattaaatttggaatyacatttgtaacaataaaatctgtactgtgctaaacctatgacataacttggccagaaaagttatctactattaataatttttatgtgattttgtaaccat

SEQ ID NO: 41770 - DNA, 201 bp, Homo sapiens
agtaaatattttttctattagagaataccactcttccattttgctggtgctactctatagaaacatagtttgagaactactgagggttacaaagaaactaygagccattcaaagtgttagatgttactgagtagggtggattaacccctgtctccaagactgcttttgcctgttttgtgggaaagagctattttgtatttt

SEQ ID NO: 41771 - DNA, 201 bp, Homo sapiens
catgggtccttcatacccaactctccatgaacactgtttctcttcctgtgtccatctcatggaacagcaatagctttcaccacattttcccacttagagakttggcatcaccatctgtccttctttttcattcaaccacatcctgtcaatcaccaggtctattttttctatctctttaatatctttttagctaatttgtta

SEQ ID NO: 41772 - DNA, 201 bp, Homo sapiens
gtaagaagagatcttcattcaacctcagaagtgcacagaatttccaaatatcttttagaaacttaattcattatggtgtgtgtgtgtgtgtgtgtgtgtgtatgtgtatgtgacatcgagacttctaaagccttctagagcctttatatatattcaggatgtaccatctaatgctttaactgaaaaatggctactattatg

SEQ ID NO: 41773 - DNA, 201 bp, Homo sapiens
gtatcagatcacattcattcaatcaaaacaattattgaatttttaataggtgaggttttagcagtatagaaaataaacataatcaatacctccttggagcktacactttactgtggacatgcaaataaatgtataatttcaataggaggaagtgctaagaagaaaatgtacaggactgtatgctagagagtgagggtgagg

SEQ ID NO: 41774 - DNA, 201 bp, Homo sapiens
tgtttcctccagttgatgttcatttatcctttaggccacttcagtgatacttctctcaagaactaggcttggtgtcattcctatatgttctcaaagcatcwcacactttgtccttatcctattgtagcattgatcatactatacttcaattgcctgtttatagtttgtgtcttgccacctcttccatcccccaccaccatt

SEQ ID NO: 41775 - DNA, 201 bp, Homo sapiens
agtaagaagagatcttcattcaacctcagaagtgcacagaatttccaaatatcttttagaaacttaattcattatggtgtgtgtgtgtgtgtgtgtgtgtgtatgtgtatgtgacatcgagacttctaaagccttctagagcctttatatatattcaggatgtaccatctaatgctttaactgaaaaatggctactattat

SEQ ID NO: 41776 - DNA, 201 bp, Homo sapiens
atagctaaagtggtaaaaagtgtcctaaagataagaacacagaattgttatttttgtgtgtgtgcatacagacaggctccaaattctacaatcttcctcayagtagtgagtgaaaaagagcttaagagaaaagaggcaagagcctgaatcagtgaacgcagctgtctgccccactgtgaacaagcaaaatgctagttgtaa

SEQ ID NO: 41777 - DNA, 201 bp, Homo sapiens
tcatgcacactctcctagcctctgtacctggatgagataaatagcctaaattatgtttgcttcatggacagctttcttatgaactatctcagaatgtagtmaatttgatggtccctgcatttggcagagaaccaacaaatcaccccactgaggtggacttgggacatactaggggtgaggtggagggtagatgaagatggc

SEQ ID NO: 41778 - DNA, 201 bp, Homo sapiens
caccttccgggttcaagcgattctcctgcctcagcctcctgagtagctgggattacaggcatgcaccaccatgcccagctaattttttgtattttcagtasagacggggtttctccatgttggtcaggctggtcttgagctcccgacctcaggtgatccgcccgcctcggcctctcaaagtgctgggattacaggcgtgag

SEQ ID NO: 41779 - DNA, 201 bp, Homo sapiens
ttgatgtgtgtgttattaatccagaaacatttacttataaaatgtaataaaagtgatcctcattctgcatattaggaaactgaggttcaaatattacatawttgtaatgttaaaaacagtttataagttttgaagctggttatctgaactcatgtcttctggtttcaagacaaatattaatcttcaattcccggcttgaac

SEQ ID NO: 41780 - DNA, 201 bp, Homo sapiens
tgtcctaaagataagaacacagaattgttatttttgtgtgtgtgcatacagacaggctccaaattctacaatcttcctcacagtagtgagtgaaaaagagyttaagagaaaagaggcaagagcctgaatcagtgaacgcagctgtctgccccactgtgaacaagcaaaatgctagttgtaaaggagcaaagctttgttttg

SEQ ID NO: 41781 - DNA, 201 bp, Homo sapiens
acaattaggggatttctttctttctttttccttttttcgagaaggaggagttttgctcttgttgccgaggctgaagtgcaatggtgcgatctcagctcacygcaacctccaccttccgggttcaagcgattctcctgcctcagcctcctgagtagctgggattacaggcatgcaccaccatgcccagctaattttttgtat

SEQ ID NO: 41782 - DNA, 201 bp, Homo sapiens
tttagtaaagctgagggtctccaaaataatcatatgttgtacgatattcatcagtattgtcctattccaagttgaacagtacaaaacatcataaaagccarttaaaaagccacttacaaagacaatttctaaacctgatttaagatgaaaacaaatgtcataagaattaattgagaagtaaaaattaaaatggttgatttt

SEQ ID NO: 41783 - DNA, 201 bp, Homo sapiens
gaagtgtgccagctcactgcgctgattgcctgagcataagagcactggatggagaagtccatctgaaacagcaggcatcgccatattttaaacgtgtgcayttccatacagaggtgacgctgctgatccagactggttgaatacagtatgtgctgacagtgtttttttttccatcagggggtgaactatatagattgaccc

SEQ ID NO: 41784 - DNA, 201 bp, Homo sapiens
aaatgggcaaaggtaatcaaatgtgttatttatttcctttcttgatgttgtcaccttttttggggggggggtggggacaaaatgttaactctcaatctttyacaaatatgttatttactctaaggactttctttggcagccctagttaaccttcaccaggtggtggagtccaactggagcagagaaatgggcttaccaagg

SEQ ID NO: 41785 - DNA, 201 bp, Homo sapiens
atcatttttatttttgctgaaccctctatacctctactgcttatcagttgtggccacaattaggggatttctttctttctttttccttttttcgagaaggrggagttttgctcttgttgccgaggctgaagtgcaatggtgcgatctcagctcaccgcaacctccaccttccgggttcaagcgattctcctgcctcagcct

SEQ ID NO: 41786 - DNA, 201 bp, Homo sapiens
tttgtattttatagaatagaccagaggactgccatttcgccaaaggatgcttttgaaactcggcaggacttaaatgaggtacgtgcaatcattactggttrtaagaacatgaattagccaatcatgagatttactattctttttcacagtactaggaattcattctcatgaaaacttagtatttttgcttttaagtgaact

SEQ ID NO: 41787 - DNA, 201 bp, Homo sapiens
cacttgacccgaggtcttctctgcctggcacagtgatacatggtgtagcgtatccatgtatgttgtctctgtgtgtgtttctcatactttcctagtgggcygaagagctcactaacttcttgtttccacttggcatgagtatagatttgacacctgccagtctcatttttcttctgccagcctagagctcccagtttttga

SEQ ID NO: 41788 - DNA, 201 bp, Homo sapiens
agggctaattattttctttcccacagctctgcccagctgttcccattttaccccttttgtatgaaggcattcatatgattttgttgtagaggcttgtgatratgacttcttggcaaaaagcctcaccatgtttttctagtgtgctggaaacatgatttctaagacacctgacacattgacacttgtactgacttcaaccca

SEQ ID NO: 41789 - DNA, 201 bp, Homo sapiens
tgctctcgctataagattggagtgattttgggttatgccagctgaacctgtggtgccatgatttagagacattttaaaatttgattcaaaaatactttctraagaaaggggatttaacaatctggatattgtcagatatgggagctgggtttctgcacacacatacatatgcaaatgcacatccttgtgttctttgtgata

SEQ ID NO: 41790 - DNA, 201 bp, Homo sapiens
gacacctgccagtctcatttttcttctgccagcctagagctcccagtttttgactttgagtctcttgataggaattgcattttttattccacattttttgktgtctctgggactagagtataggagttttttccagaaaaaaactgattaaatctccctactgacattcacctgagctgtatgactctgtctcggtaagac

SEQ ID NO: 41791 - DNA, 201 bp, Homo sapiens
ggtggtggcaggatgaggggagagatatcaaggactcttgagatctggaattcataaaaatgatttgttctttagtttttagatgaacttaaatttttctyttattatagaaataatgtttattgtagaaaacttagaaaatatatatgggctcccaaaaataaataaacatgatgtctcagaattagtcacagttaagat

SEQ ID NO: 41792 - DNA, 201 bp, Homo sapiens
cgtatgcctgtagtcccggctgttttggaggctgaaggaggaggatcacttgtgcccagaagttggagagtccagcctaggcaacatagcaagaccttgtytcttaccaataaatgaataaataaataaataaataaataagtgacaacaataacaaaatactccccagaaattagcatttcctatttttaatatcatagt

SEQ ID NO: 41793 - DNA, 201 bp, Homo sapiens; identical to SEQ ID NO: 6685

SEQ ID NO: 41794 - DNA, 201 bp, Homo sapiens
gtccatcttcaaagcggagagcgggaggagccacggagaaagtcaggtagcagctctctcttctcaggcttttgccaagacgggtgattcttaggctaggscacacggttctggcagacgatttgagcgcactgttttgcgggaggggattggcacgacttgtcattgcgtgctctgccgacctgagacacgtggaagctc

SEQ ID NO: 41795 - DNA, 201 bp, Homo sapiens
atcttgatatttgctttgctcttttcccaaagactacctggaactcatccttcctgatgccagctcagtgaatttaatctgccttttatttgtaaaaagtygtcttgaatggtgggcattccttctttgctggtcttgcttcttggctttaggtgtccttgagcagctaggaattgctttccaggtgactttgcaaatgct

SEQ ID NO: 41796 - DNA, 201 bp, Homo sapiens
ggggtggacattcctggcatctggtgagtagaagccaggaattctgttaaacatcctgaaataaacaggaccacccttctccctcatcaaagaattatctkgttcaatagtgctgaatggtcaatagtgctgaggttcagaaacctttgctgtaaaagctcttaagtgaataacatcaacattagctaacaatgacctctt

SEQ ID NO: 41797 - DNA, 201 bp, Homo sapiens
gtttttcagttactaacattaaataattattgtaattgttggattctcctttaccagatagcactacgtttgttctggattcaagtttaactatgtcacgyagttttatttttatatcttgtccaactgcaccctggtcatgttccagaccacctatcttgatatttgctttgctcttttcccaaagactacctggaactc

SEQ ID NO: 41798 - DNA, 201 bp, Homo sapiens
tttgtaaccaggttttacgtttgtgtaatgcaagaaagatgcttttggccccctctcccctttcctggctttccaagtcaaggaagtaaacaaaattacayttctaaattttgattgacttgaaaacatgatataaaaacaaagttcaggtattattttgggaatgagtctatcaaaagagtcattttagatttgaaaagc

SEQ ID NO: 41799 - DNA, 201 bp, Homo sapiens
tctcagtggtacaaaggtttacaagtgatgtgtggtgagatatagttgtttaccaaaacctcagaatgaagagtaaatgtttatgaattaaggttaaagtrggaacttggcatgtgtattagtcagggttctctaaagagacagaattaataggatatatgtatgttcgaaggggagtttagtaggagagtggactcacat

SEQ ID NO: 41800 - DNA, 201 bp, Homo sapiens
tactgctctcctccctttgctgtgcttaaagtactaagtgctttctggccccgattctcaggagcctggtgtggccaaatcctcggtcagtcacaggcacrgcaggttcaaaatggagacacttagctccagatttcacgtggacttttttttttttttttttttttttttctgtagaggtttcgtggttaaatgctgggg

SEQ ID NO: 41801 - DNA, 201 bp, Homo sapiens
aggttactattatttagaaacttagtaacacatggaagaaggagtgaatgaaggtgaaagggaaggaaaagaagacatgatgcaaaaaccaagtggaggcygttacagtatactttctcatgtatgaattataaaagaatgtttaaataatgacttgactcattgtgaactaacaaatgtatttttgttttgcagaagtcc

SEQ ID NO: 41802 - DNA, 201 bp, Homo sapiens
tgtgaggtgggtgtgcatgggtatgtgtggagtaggctgggaggtttcgggggctggatgtgagggtatgaggtatgtgtggggtaagggtgtgtgtgtgkggaaggtggggtgtttttaggtgtggggagtagggatgagagtatgggggtttggtatgagcgtctgtgtggagtaggaggtgagggtaggtatgagagt

SEQ ID NO: 41803 - DNA, 201 bp, Homo sapiens
tccaaagcaagatgaagttaattggtcttttttcttttctagcccttcacactactgaagtaatgttattaatgtgaaggactaagagaagaaaaagaatrttaattaggttaattaagtatcaccaaaggatatacgtgctattatattattgttttgaacaggaactgaagttttgtagaagcatcccttcagtgaaac

SEQ ID NO: 41804 - DNA, 201 bp, Homo sapiens
atctcctccctatgtcccaccccccagcaccagctcttgataaccaccattctactttctgtatgatgaatatatatatatatatatatatatatatattwgagatggagtcttgctctgttgcccaggctgaagtgcagtggtacaatctcagctcactgcaaccccaaactcccgggttcaagcaattatcgtgcctca

SEQ ID NO: 41805 - DNA, 201 bp, Homo sapiens
gaaggcctgcgctggaaaggagcatggtgcatccacaaaacggaaagaatgccagtgtagctggagttcagagagggagaatgatgcaagctaaggttgargagtgggcacatactaaatccttcagggtgtcatacagtactctcggaattttgagttttattttaagtatagtgtgcagaagggtagtgaaagatcttg

SEQ ID NO: 41806 - DNA, 201 bp, Homo sapiens
ggtattattctctcccaaacatcttgttcttattgttcatttaataaagtgaacataacaaggatatcataatgaggtgaaatcaagtataggattccccctttccaggttgaagtcatttagcttaaaggaaatgtgggttttattattgtatattgtggctaggttgtccttgtttaaaaagaattgctgataggatcc

SEQ ID NO: 41807 - DNA, 201 bp, Homo sapiens
atcagttctttgtgatgagaacatttaaaatcctctatttcagctaatatacaatatattattattaattatagtcactgtgtggtgcaataaaccaccaraactgatttatcctttctaactgaaactttatacccattcactaatgtctcccctttccctgtccacctccttcctccccaccagcctctggtaacccta

SEQ ID NO: 41808 - DNA, 201 bp, Homo sapiens
tagaaaacttagaaaatatatatgggctcccaaaaataaataaacatgatgtctcagaattagtcacagttaagattttggttcaacttattccaatctcrtgtgtgtggggtgtgtgtgtgtgtgtgtgagtatgtgtgaacattcatacatatgtttattcttgcataaataagcctatagtataaatattcttctatg

SEQ ID NO: 41809 - DNA, 201 bp, Homo sapiens
tctcaaaaaaaaaaaagaaaaaaagaagtagtttatagaggccgggcgcggcggctcatgcctgtaatcccagcactttcggaggccaaggtgggcggatygcgaggtcaggaaatcgagaccatcctggctaaaacggtgaaaccccatctctactaaaaacacaaaaaaattagctgggcgtggtggcgggtgcctgta

SEQ ID NO: 41810 - DNA, 201 bp, Homo sapiens
tgaacccaggaggtggagcttgcagtgagccgagatcacaccactgcactccagcctgggcgacagagcaagactccatctcaaaaaaaaaaaaaaaaaaagggagtttataaaatggtattattctctcccaaacatcttgttcttattgttcatttaataaagtgaacataacaaggatatcataatgaggtgaaatca

SEQ ID NO: 41811 - DNA, 201 bp, Homo sapiens
ccctgtccacctccttcctccccaccagcctctggtaaccctattttactctctactaaaagtttggcttttttagattccacttataagtgagatcttayagtattgaggcctttcaattttaacattcattgattctacccttcttccattttcccagtgcttgcagagtgtagccatagcttcccatcagggatggaa

SEQ ID NO: 41812 - DNA, 201 bp, Homo sapiens
agtatgtgtgaacattcatacatatgtttattcttgcataaataagcctatagtataaatattcttctatgaattatcttttcagatgtatctattcatcmaatattcttccatgacatcatttttaatgtctgtaaaattcttgttatatggctataccatatcttttggacataagatttattattatgatttttgtct

SEQ ID NO: 41813 - DNA, 201 bp, Homo sapiens
tagaaaagctcagagttctactttaaattgggagtttataggtcaggcgcagtggctcacacgtgtaatcccagcactttgggaggccaaggtgggcggaycacgaggtcaggagatagagaccatcctggctaatatggtgaaaccctgcctctactaaaaatataaaaaattcgccaggcgtgatggtgggcgcctgta

SEQ ID NO: 41814 - DNA, 201 bp, Homo sapiens
ctggccaacccaccatctgaagcctagtttggggagtgaatagtaagtagtgcaatagcagtgacatatatgcttagcatagttatttatcagtctcacaygagagacaggccacattattgtacgtgaagaattgtgatcaactggggatctggagtggtatggctggagcagactgaagctctgggtcaccatgggcct

SEQ ID NO: 41815 - DNA, 201 bp, Homo sapiens
gtctgaaacatattaaggcacttgcctgatgttgcacaagtgaaaaggactgagccagaatttgaacccacaaatgtctgattgcagcatggcaggtgcakattctgtgctgacccgagtgtcttccagtgaccttagccctgacatagccccaggatggcctctctagcctgctagacctgctggagacagccctggatc

SEQ ID NO: 41816 - DNA, 201 bp, Homo sapiens
taactacagttatcactgctcagtgtcattctctaatatcaggcaaagctccaccaggacttggacaaatatgggagaatttgatagaactatttcataasagttttgatcgcagggtaaatgtcacattaattaggtttaccatgcagtatggttgagagagtggttctgtttgtaaaggtggatttatttggggcaact

SEQ ID NO: 41817 - DNA, 201 bp, Homo sapiens
ttttaggacatttttggccttctgaaggttataaaactcaagtttatagagagacaagagctgaattttcttattttcttacaaaatattagtatttgacwacctaagtgtctatcaacagacaaatggataaagaaaatatggtacttatatacaatggaatattatccagtcataaaaaagagtgaaatattgtcattt

SEQ ID NO: 41818 - DNA, 201 bp, Homo sapiens
gagcacaaagaagcagatgctaaataatcctggaatgcaaaaatggataaatgttgcatgagtcttttgcacaccagtaaactctatacctccaatggcgrggatttcaaggtagctaagacttaaggcatcaatgggagaaatacttctaggtggatatactgacttttttttttgtccccagagtaaaaccatagagac

SEQ ID NO: 41819 - DNA, 201 bp, Homo sapiens
acatgggaaggctatagctaaagaatacgagctcctgaagatacagataaaaataattccccctcccctgctgtagagcacaaaaatcccacacccagtcygtgaactgctgattgaaaaaagagctcacacttgattattttggaaatgaaattttccttttttgttgtttttttaaaggagattacccttggtcatttg

SEQ ID NO: 41820 - DNA, 201 bp, Homo sapiens
aatgcaaaaatggataaatgttgcatgagtcttttgcacaccagtaaactctatacctccaatggcggggatttcaaggtagctaagacttaaggcatcartgggagaaatacttctaggtggatatactgacttttttttttgtccccagagtaaaaccatagagacaggtgtctgtctcccccaggtatgtttcccaca

SEQ ID NO: 41821 - DNA, 201 bp, Homo sapiens
aaacaaatctacaagaaaaaaaccaagcaacctcataaaagaagtaggcaaaggacatgaacagacacttttctgtttttttgagactgagtctcactccrtcgctcaggctggagtgcagtgacgcaatctcagcttattgcaacctccgcctcccaggttcaagcaattctcgtgcctcagcctcccaagtagctggga

SEQ ID NO: 41822 - DNA, 201 bp, Homo sapiens
tgggaaggctatagctaaagaatacgagctcctgaagatacagataaaaataattccccctcccctgctgtagagcacaaaaatcccacacccagtccgtraactgctgattgaaaaaagagctcacacttgattattttggaaatgaaattttccttttttgttgtttttttaaaggagattacccttggtcatttgata

SEQ ID NO: 41823 - DNA, 201 bp, Homo sapiens
tcttcttcagaaccagaacttggacatttggatgtttgactttgcattcagggcattgttcagagggcctggttgagtaaaatttggcccatgcctatcaraatagatcctgttaaatttctaagtacctctgaaagttgtagggggatgattataaactgacattgccaatgaagaggaagcatggtgccttgaaccaag

SEQ ID NO: 41824 - DNA, 201 bp, Homo sapiens
cttgctgaggcagccagccatagtgaagtggaaggaaccctggaactgagggggttgaggaattatgaagccagacaatagcatgattgtcagcctggacmttgaagtaactgaatgtcaggggccactgatggagaggaagaaaccaacccagatggaagtcgctgagtcctataatattcaggtcatggaataggaaag

SEQ ID NO: 41825 - DNA, 201 bp, Homo sapiens
cagcctcctgagtagctgggattacaggtgcacaccgccatacctggctatcttttgtattttagtagagatggggtttcactgtgttgcccaggctggtstcgaactcctgagctcaggcaatccacctgccttggcctccctaaatgctaggattgcaggcatgagacacaacgcccggcctctcacctccattctaac

SEQ ID NO: 41826 - DNA, 201 bp, Homo sapiens
ctgaaggaagcggccacttctcatgcatttcatgttctagtgacagtgattgtggtagattaaggttaatgatattgattatatagagaaggccccttctkgttatgtctgtggtgtttgcttgatacttagcagaatgaaaaataaaatgcatctagatttaagtgggaagaatggcttcaaataagagtgttatcatgt

SEQ ID NO: 41827 - DNA, 201 bp, Homo sapiens
ttcccatactactgttaactcttatctgttcaattatgctggtcataataactaaactttagcctcaatgtcaaagatatcgatgaagaatcctttaataygttaattttgttaaaagtaggacaatttgcacacatgcagtgtccctctttgagtcggtatgcatgtgtctatgcctctgtgtatctccatgtgaaggac

SEQ ID NO: 41828 - DNA, 201 bp, Homo sapiens
ggtggcagcagtggcaatggtggtgctggtggtggtgatggtgatgctggttggtggtgctggtggtggtgatggtggtggtggttggtggtgctggtggkggtgatgatgggggtgatgctggtgggtggtgggtgatgatgggggtgatgctggtgggtggtggcagtggtggtggcaatggtagtggcagtggtggta

SEQ ID NO: 41829 - DNA, 201 bp, Homo sapiens
ttgataaatgcctgttgaactgagtattgattagcctatctcaatattctcatcacacaccctaaaggaagaggctgtagattattcaccaaacatattaytgagtgtctgtagtatggtcttggtcatcaagggcttatagtatcgtggaaaaaccttcactgctaatcatttcttctacatttactttgttccaagccc

SEQ ID NO: 41830 - DNA, 201 bp, Homo sapiens
tgtcctgcttccttgctgggtgtcacctgagggcagctctcagcttctagaggctgtcacactccccctcctcaccctttatcttggagccagcaacagcrtggcaaatccttcttgtgctttgaatttctataatgttgtcttttgctaccaactggaagaaactctgtgcattttaaaggcctccccgattggtccagg

SEQ ID NO: 41831 - DNA, 201 bp, Homo sapiens
atacagtggtggcagcagtggcaatggtggtgctggtggtggtgatggtgatgctggttggtggtgctggtggtggtgatggtggtggtggttggtggtgstggtggtggtgatgatgggggtgatgctggtgggtggtgggtgatgatgggggtgatgctggtgggtggtggcagtggtggtggcaatggtagtggcagt

SEQ ID NO: 41832 - DNA, 201 bp, Homo sapiens
ttggcctcccagagttctgggattacaaatgtgagacactgcaccagggcaaccaatttttttaattgccagaggtaacaaaatatttcagtaagtagaargggttagagtctgtgggtggcctttgtttaactcactacaaaactataaattaaagattttaagggaagaggactggattcattctgtgggttaattata

SEQ ID NO: 41833 - DNA, 201 bp, Homo sapiens
tctttctttcaacaggatttattgagaagcaaatgtgtatccagctttgggtctggtacaggggtgaggtgaaacagctgcagtacaagagtggactttgytgtcctcacttcccagaggtttacagggacacatatcaagtcgggacatctggccttcctagccttggcacctattgtcttttttaggacatttttggcc

SEQ ID NO: 41834 - DNA, 201 bp, Homo sapiens
gttttcagcacagtgctgaactcataggttcagtagtttagtaaagtttctgcttattgattcttagataagcaatcccatggaattctggtttgccctcyataatctcacgcctctcttggccatatttcattatggtcctttatgtacctggtcctttacaagctctagtttgcttttgtgtacactggctaaattctt

SEQ ID NO: 41835 - DNA, 201 bp, Homo sapiens
cagttgagattccagtgatttggactcgcttgctcaacttggacatgtgattcagacaatttcaaaaaggtttttaaaggggttgtacatgacaaagtggycctagttggccatgaatagtcatggttggaaaagtggggatcaagaaagtggtcattttcaatgtgtaattactgccagtcttgctgatcttgctcgtgt

SEQ ID NO: 41836 - DNA, 201 bp, Homo sapiens
gagagatggtttctttgacattaaagtatttccttgttggtgaatgaggacctctcaagtgacatctgttcaggccactcataagaaccaaccctaagccwtcctttccccatcagagagacactagttttcatgctagtactgcactgcagcaaacatgagcctcctttcttcttatgtaagaaacaatagggtcatagg

SEQ ID NO: 41837 - DNA, 201 bp, Homo sapiens
taaaggtgctagctagggagccgagctcaagcgggctgctctaggcatagcaagccccaccccttgcacggtgtcctaatcaccagctaacccctggaatmaattctccactcgccctgcgtgggttcattcacagctctgtagtccggggctgggcgcttcctctctgggactgaaataagagcgctctagacagatcag

SEQ ID NO: 41838 - DNA, 201 bp, Homo sapiens
tctgtcctttcccctatcctgtgatattttttccatcaggtaattttccctgcttatgtgcttgcctatggtcaggctctatgtgtgtcatatttactcamaagatactcttatgatgggaacacttttcaatcatagatgcttttttggctgaacagataaatctgctcatgatgatctctcaattatgccagtgcccag

SEQ ID NO: 41839 - DNA, 201 bp, Homo sapiens
catttacttataaaatgtaataaaagtgatcctcattctgcatattaggaaactgaggttcaaatattacataattgtaatgttaaaaacagtttataagytttgaagctggttatctgaactcatgtcttctggtttcaagacaaatattaatcttcaattcccggcttgaacatctaaattgaccaaaacattctcttt

SEQ ID NO: 41840 - DNA, 201 bp, Homo sapiens
gagttgtaagtgagacacattgtattttcagaaaaatcagtcttattatctagaaaagctcagagttctactttaaattgggagtttataggtcaggcgcrgtggctcacacgtgtaatcccagcactttgggaggccaaggtgggcggatcacgaggtcaggagatagagaccatcctggctaatatggtgaaaccctgc

SEQ ID NO: 41841 - DNA, 201 bp, Homo sapiens
tatgctttatcttaagatttcaccaaataccctatacaaaggatgcatgggtgaatattgttacttttaagaggaatttgttttaatgtgtattagttttwaaaaatgtaactagtacatcaaattcatgaattcttggtcattgcttaggatgaagcgtaagcataagtaacagcattgttactacagtagtctccccat

SEQ ID NO: 41842 - DNA, 201 bp, Homo sapiens
actttaaaagttaaagtgttgcaagtctgagtatcagttgtaatatcacagaagccagtgtgatacgtagttacaaatattcatcagctattcacctgtcrtttaaattccgcacccccaccccccagcccatcacttgtgacactctgtgcccttcactgcatctgtccctgatctaaatcttcatttgtgtgatgaggt

SEQ ID NO: 41843 - DNA, 201 bp, Homo sapiens
atcaaattcatgaattcttggtcattgcttaggatgaagcgtaagcataagtaacagcattgttactacagtagtctccccatatcctgggcttccctttyggcagtttcaggtgcccacagtgcagtacaataaatagtttcagagagatcatatttacacaacttttattacagtatcttgttataattgtcctatttt

SEQ ID NO: 41844 - DNA, 201 bp, Homo sapiens
gcaagctgccccttccttggggatagaaagtaatgtgcccctagggaacaaaggttccaccttagtttaatattgccatcagcttctccctactgggaagyagggtctggaagcagtggcctggactcttcccaggacagcagcagcattggctctgaatctacactagcctcttctgagcaaagagctcaataattctgt

SEQ ID NO: 41845 - DNA, 201 bp, Homo sapiens
ggttttgctattctcccaatattcccacacttatttctctagattaagaatagaattttctttaaaagctgctcctctgtatctcttatgttcagtctatsaccaaatgctgatgagtattccttcaaaatatcccttccctcatccacctatattgctgttaccctttccagttccttcagtggattcaatcaatctcct

SEQ ID NO: 41846 - DNA, 201 bp, Homo sapiens
gttgacagaagtgtctgtcagagaaagcaagtagaaaatcatttttttggtggtggttctaaagcagttattcctaacttttcaaggggtgttgggacttytttgaaaccaatagaatcattttaagaaaatgcccatgtataatttcaagttcacagaatctctgaaaccatacatgagtttgggtatgcttgtgtatat

SEQ ID NO: 41847 - DNA, 201 bp, Homo sapiens
ttgtggctaggttgtccttgtttaaaaagaattgctgataggatccaaataagacctggattttcttgtcaacagaaggctccttaaagtgaatagcttgytctcctacattgaatttctcctttgggaggtggcggagagtgagggctgagctcctgaacagagggaagctggggcgggctgagctgaggtgtgctgtgc

SEQ ID NO: 41848 - DNA, 201 bp, Homo sapiens
attggcccagaagacacagatgaacttggtgagtgttttagcccagcatgactgctgcctttttgctcattaacttctgtaggtttttaatgaaactgcgraagagctcctcttggtttcttccatcccagttctcagtaggcacatgggtcacctactggttttcatggcattgatttatagttccccttcctgtttttg

SEQ ID NO: 41849 - DNA, 201 bp, Homo sapiens
attcccatggcattatttgttaatcttcagggtagttttgctctttttgagaggtcactgatttccaatgtccttcagtaggaaacttgcctagaatcttygtttgcctcccagctgcttgtttactaaatagtaaatcctcccagaaacttggtgtgcctgttccttcagcagctcctgtcaacaacctcagttcttgct

SEQ ID NO: 41850 - DNA, 201 bp, Homo sapiens
actgctttataggaaggaaatatcagtcctacagcccaaactgccaggtagttatttaatttttttaatttactttttacattagaccaagtactgtgttrttatacctgattgtatttgtcttaaactgattacaaatgagaattctgaatttgaagagacttgcctggccaaggatataacaactgccaataagtggta

SEQ ID NO: 41851 - DNA, 201 bp, Homo sapiens
acatagggagagtaaaagatgttctcagagatcagaagctgtccattggacatttcccttggttattgctcaaattcaatgagattgagagacattaaatmatgcatcccaggtcacaccagtgacaaaactgggacgagaatctgggtcttcctgagcctgtggctcgtgtttttatccattatggcaaactgcctcttg

SEQ ID NO: 41852 - DNA, 201 bp, Homo sapiens
tttactttgaattatacagtggtggcagcagtggcaatggtggtgctggtggtggtgatggtgatgctggttggtggtgctggtggtggtgatggtggtgstggttggtggtgctggtggtggtgatgatgggggtgatgctggtgggtggtgggtgatgatgggggtgatgctggtgggtggtggcagtggtggtggcaa

SEQ ID NO: 41853 - DNA, 201 bp, Homo sapiens
tttttactttgaattatacagtggtggcagcagtggcaatggtggtgctggtggtggtgatggtgatgctggttggtggtgctggtggtggtgatggtggtggtggttggtggtgctggtggtggtgatgatgggggtgatgctggtgggtggtgggtgatgatgggggtgatgctggtgggtggtggcagtggtggtggc

SEQ ID NO: 41854 - DNA, 201 bp, Homo sapiens
aagtttagttttgaaggtgaatatttttcaggtctaaaataaatggaaacaaagccacaaagaaacaaccatatgggctacaacccagactagctttggasttcagcccttgggatttaattaatgttctgggaaaaatgactggttaggggcttatccaacttaagacctgtgcttttggataatttaagtactagtaac

SEQ ID NO: 41855 - DNA, 201 bp, Homo sapiens
ttttttactttgaattatacagtggtggcagcagtggcaatggtggtgctggtggtggtgatggtgatgctggttggtggtgctggtggtggtgatggtgrtggtggttggtggtgctggtggtggtgatgatgggggtgatgctggtgggtggtgggtgatgatgggggtgatgctggtgggtggtggcagtggtggtgg

SEQ ID NO: 41856 - DNA, 201 bp, Homo sapiens
cagtagacaactccagcttctgtaataatcacaaatagcccccagattttctacatggcccctaggggacataccatcaccctgtaaaaacacaaaaacamaaaaaaacccactaaatttcatgatagataccttatctaaaaccatgttttatgtgagtctttattaacatggggacatgatctaagtggaaaaaagcag

SEQ ID NO: 41857 - DNA, 201 bp, Homo sapiens
tgcgggagctgcggacacactgttgtgtgttaggcatctacttagctggcctcatgttctgcttttgctggcagaattccttgctgaagctgcaagccctygaatctgatctgtgctctgcatttttaacaaaccaggaagaagctgctcaggtgcatggagtcaaggacccggcgccagcatcaacccagagcgtgcttg

SEQ ID NO: 41858 - DNA, 201 bp, Homo sapiens
ggcttggggaggcagggagagtggaagtcctatcagagagggctgggttgaggtggcactaggactgtaggggtttactaggacctggaatgaagggtccytcatctttctgtagagggaaaagcatgttcctgcattgaaggtcactaagtcgggcatgatggaagtgaaatgggtggttagtcactcactccctgggct

SEQ ID NO: 41859 - DNA, 201 bp, Homo sapiens
attagctgggcacggtggcacacacctgtaatcccagctgcttgggaggctgagacatgagaatctcttgaacctgggaggcagaggttgcagtgagctgrgatcatgccactgcactgcagcctggatgactgagtgagaccttgttaaaagaaaaaaagagatatacaattttcagttgtccgatcatggaagaagata

SEQ ID NO: 41860 - DNA, 201 bp, Homo sapiens
cctgcagaaccttctcgtggagagggagagagcctggccagggactcaggctgactcactttcacctggtcggaggaattaatttgctggcatctgcatcrtggcaggatgcatgcgtcaatctgtatgactttgttcttattaagaatcatgggagaaattttaaatgagaaatgaagagagtgggtgggaggttatgct

SEQ ID NO: 41861 - DNA, 201 bp, Homo sapiens
tggctactcccatatttctgttatagttatttgtcaatgaggtattccttttcaagatttacattaaatactacacacacacacacacacacacacacacattatgtatagtgacatacacatacacacagagctcctactcaaccctccatatgtattttttcttatattattaatgctaggttaaaacatttttgggat

SEQ ID NO: 41862 - DNA, 201 bp, Homo sapiens
agattggttctccagatgcagcgtctcttgctgatgaaatcaccagtcccatgtgtcacagataatccatatacgttaggatttaaatgaggcagaaactsagcctgcatgtggaatgatgcgtatatgattctggcacaaccagttctttccctgaagcagctgttgccaccaccctcttcctgccaggcagtggaggaa

SEQ ID NO: 41863 - DNA, 201 bp, Homo sapiens
gtggctactcccatatttctgttatagttatttgtcaatgaggtattccttttcaagatttacattaaatactacacacacacacacacacacacacacacattatgtatagtgacatacacatacacacagagctcctactcaaccctccatatgtattttttcttatattattaatgctaggttaaaacatttttggga

SEQ ID NO: 41864 - DNA, 201 bp, Homo sapiens
atctctgagtaccccactcccacttcatgctaaaaagcagaatagggactcagcagttggttcttgatgtaatggagagtccgaaggaacaagggtctggrtgttagagtcattcttgggccaagtgccaggcaggaatctggtgagctacactctagcccatgcagccttgctgtctccaggatttgggggtgagtgagg

SEQ ID NO: 41865 - DNA, 201 bp, Homo sapiens; identical to SEQ ID NO: 6679

SEQ ID NO: 41866 - DNA, 201 bp, Homo sapiens
tattgtcttgtttggtttccatttttttttttcattaatttccttgtcaaaaagtcccaaattgagtctcaattttctgttagtctctggctttaattccrgggatggtagattggctagccaacagcaggcaaattaatgttcccaggaatatttggagaggaaagaaacactgatttatataagtgagagcacagctta

SEQ ID NO: 41867 - DNA, 201 bp, Homo sapiens
cgtggctactcccatatttctgttatagttatttgtcaatgaggtattccttttcaagatttacattaaatactacacacacacacacacacacacacacmcattatgtatagtgacatacacatacacacagagctcctactcaaccctccatatgtattttttcttatattattaatgctaggttaaaacatttttggg

SEQ ID NO: 41868 - DNA, 201 bp, Homo sapiens
cacaagttactccctaatttattaaataataattccttatttgctttaaatgtcttccttaaaagtcaggatctgtccctaattattttatttcaagagtygatcaaaaattcatagtcattctttctacttcttaaataaatggttagctgtatcatctgtcctctatttttctgtgtcaacccaagtctcattatacac

SEQ ID NO: 41869 - DNA, 201 bp, Homo sapiens
gtatacaaatattcaaatcataattgttataaaaattcaattagtaatttttgatgtcaataacatggacaaaatccgtgattttgaacacggatttgaayatgtgatatgaacaagtgattttcataagaatacctggatataatatgctgtcacttaaccataaatagcaaacattcaaaggataaattcatgtgacct

SEQ ID NO: 41870 - DNA, 201 bp, Homo sapiens
ctaagtggaggatacatcacaggggaaaagaatgaaaaggggagatggaatgggtggcttggattagcacggtggccttggagagggaaagaagtggatayattcaaagtatattttgaaggtagaatcaaaaggacatgttgaagcattagatgggaggaaatgaaggcaaaaaaaaaaatccgggatggtgatgggtcc

SEQ ID NO: 41871 - DNA, 201 bp, Homo sapiens
ttggggaaacttgaaggacgtgcaatatgaatgggacagagatcatcaaagagggtggatgtgttcacactcatggattgaaatgtcctgtatcattcccrgcatttctcaacttattgaacaccaaactcttttatggaagaaccacctaataacatttctttaggcgacagagtctctatggaacacaaatgggaaaca

SEQ ID NO: 41872 - DNA, 201 bp, Homo sapiens
gcattaggagatatacctaacgctaaatgacgagttaatgggtgcagcacaccagcatggcacatgtatacatatgtaactaacctgcacattgtgcacawgtaccctaaaacttaaagtataataataataaaagaaaaaaaaagaagcactatttacatcaagcagatcatagaatagaaagctagacaagaatgcatt

SEQ ID NO: 41873 - DNA, 201 bp, Homo sapiens
ttgaaaacccagatatattttcatatcaatggttgtttaaaaatttcttcttccatgtcatttctgaaatgtaaaacaagattaatccaggatgcacttamaaggattggaactgaattattttcttaaaatattaattcaactctgccctttgcaaaaggttctgcctagctcagaaagatagttccttgcagaacttta

SEQ ID NO: 41874 - DNA, 201 bp, Homo sapiens
gactattataatttaccaataaaaaattattttcttcctctctccacactctaactttaatacttagagacatgggagtttttccaaatttctgcaaggaragtgactaaaaagaactggaagggaatactaattcagtggtattaaactgtaatgatgtggcaggtttataaaatatgcaatgtttaaacatcaagacaa

SEQ ID NO: 41875 - DNA, 201 bp, Homo sapiens
aaggggaacatcacactctggggactgttgtggggtgggggaaggggggagggatagcattaggagatatacctaacgctaaatgacgagttaatgggtgyagcacaccagcatggcacatgtatacatatgtaactaacctgcacattgtgcacatgtaccctaaaacttaaagtataataataataaaagaaaaaaaaa

SEQ ID NO: 41876 - DNA, 201 bp, Homo sapiens
ttgactatactttctaattgacttgggatgagactagtaaaggtaccgcccacatcgaaggttggaatttccttcagtggtctttctgtttgctttgtatrttcaatgttccccaaatattctccccatagtgcttctgctcataaatgaaaactcccatttgaaaatagcttttgtcatcttaatagcagatttttatca

SEQ ID NO: 41877 - DNA, 201 bp, Homo sapiens
cccctccagctccctaacacgtctagtggccatctatagaaactggcacataagactgcttggagtgctgacctcctcactgctcagtcagtctccccaaygcagagtcccttttcatctgccctcattcccacctgacatgacgatactgcatctcctttctcagtgctgtctacccaaggaagctcatctgttttctcg

SEQ ID NO: 41878 - DNA, 201 bp, Homo sapiens
aatagtccaatagcttcttttatccgggtataaacatctttaaagttccccaattattcagaaggacatcaagtcactttcacagatatgtgaaggttaaraaaaaagggactcttgggtgatgtaggatagggtagatttacaacactttctcttgttcaccttaagaactgaaaatataagattttccaaattatagtg

SEQ ID NO: 41879 - DNA, 201 bp, Homo sapiens
gtgggggaaaggatatgcagagggtagggtgtgagtaggtgtgtgtgtgcctgtgtgtgttggagggtcctagcagggaaaggaccagtggctctgctccyggtgcccacccctgctggagctgggaggacagaagagcagctgagacctgcagaaccttctcgtggagagggagagagcctggccagggactcaggctga

SEQ ID NO: 41880 - DNA, 201 bp, Homo sapiens
ctggaaggacatgtatgtggcagtggtgtagatcaggggtctccaaccccagagccatggaccagtaccggcctgtagcctgttaggacctgggctgcacrgcccgagaagatgagcagtgggcagcgagctttactgcctgagctccgcctcctgtcagatcagtggtggcattagattctcaggagcatgcaccctatt

SEQ ID NO: 41881 - DNA, 201 bp, Homo sapiens
tgcttcattatgatagggaacaaagaagtaggtctagcattgatttcttcttttcttccaaatgaaacttcaagctcattaattttgctattttatttagraataatcgtggtcttgctctcgctataagattggagtgattttgggttatgccagctgaacctgtggtgccatgatttagagacattttaaaatttgatt

SEQ ID NO: 41882 - DNA, 201 bp, Homo sapiens
tccagaaacatttacttataaaatgtaataaaagtgatcctcattctgcatattaggaaactgaggttcaaatattacataattgtaatgttaaaaacagyttataagttttgaagctggttatctgaactcatgtcttctggtttcaagacaaatattaatcttcaattcccggcttgaacatctaaattgaccaaaaca

SEQ ID NO: 41883 - DNA, 201 bp, Homo sapiens
tataaaacagcaaccagtaagagaccttgttagttttgaccctggggccacaaatgagctgaagggttgaaggtctcagaccttttccatttcagtaaaawtatggtggtcccaggtgcctgctaaagattattttcttccccattatttccagaagatatttccaagaaactggtagcatgaataaaacacatttcttct

SEQ ID NO: 41884 - DNA, 201 bp, Homo sapiens
gctcatctgttttctcgccttggttattgggatgacttcaggtttacccatgttctctctcccctaaccatatagctaaccctttagtgcctcaggaactsaaatgtgacatacctaaaactgaacccatcatgtatccatgttttcttggttgtttttcatctttgtttttctggccctctgtgtgtgggtgatgctatt

SEQ ID NO: 41885 - DNA, 201 bp, Homo sapiens
tcatcaaataatgaacttccctctggacttctctgacaatccaggaattttggtttgtagatcaacagaactgtttactggaagcccactgtttttgataytccttcctccttgtaatcactgcaggccgcggagttcttcacgctgcagctgtggagatggcaaggagccacagaccatcacccagctcaccaagcacat

SEQ ID NO: 41886 - DNA, 201 bp, Homo sapiens
tctagagccctgttttcacacccgattgggagcttatgctaatggctctggttataagggttgccgttgccctgtggaaagccatcattagtgttcatttmtacagatttggcatcaggggaaggaattcctgaaagtctctccattcttagaactagtgggttctctttgcttatgataactcatagcatttctcttaga

SEQ ID NO: 41887 - DNA, 201 bp, Homo sapiens
ggagcacactggggttgtagataaaaacataaacggtcagtttgggatatattacatttagtatctttcaggaatagggtgaccaatcgtcccagtttgcycaagacttttttgcttttagcactgaaaatcccatgtcctgggaaatgcctcagtcctgggcaaactgggatggttggtcatcctactgaggcatgtaag

SEQ ID NO: 41888 - DNA, 201 bp, Homo sapiens
tgaaaaaataggtatatcttgcatactacagccagcagcaactatagaattagggaggaaggaggatgtacttcagaaagagagagccattgaattcagargagaaaattatctgattcttagcagacagtagctgaagaataacaggaaagtctaatgtatttctgcccccttagatttggggtatcctgcagagcttac

SEQ ID NO: 41889 - DNA, 201 bp, Homo sapiens
gatattggtaactccaacctccttcttgtataggtaggaaattgaggattcagagaagttaaatgttttgtccaaaataatttagttgatatcacagcctrtcagtaacctagtatataatacaagcatgtagtgatgaagacctgtataaggttggtatttgtgactacatataatcaggaaagtctagataaaatacat

SEQ ID NO: 41890 - DNA, 201 bp, Homo sapiens
tccacacagtgctaatgagatcatccaatttgtcagagcactttgccattacatcaatatttttattagcctggctccaaaatttcagatgagttcctgayaggttactggccacgagcagtagtgccacatgatgccaggctatgccaccattctggaggttatagtgttgtgtgttgataggaagtaaatggcaaagac

SEQ ID NO: 41891 - DNA, 201 bp, Homo sapiens
ctcagcagtttatgatgtgagaaaactgttttgttattgtcttcatttcatacagtttttcaaataccacatttataagctacaatgaagtgtgactgaartagcacaaatgtgcctgcctaacgcaactgcgagactggaacaataaatgacaaaaattagtgtacttgctagttggggatgccattgcaggccttgata

SEQ ID NO: 41892 - DNA, 201 bp, Homo sapiens
ataaatttgagttccctgaataaatttatattttttagcaatttgaactcaggaatctatcgtaaggggtttgagaacttcccagtgtgctactagtcctscctactggatctgcagtgtcacttggtgtgctttttgtcatacatacagggaagttagttatgttctatgtatagtgttccactgcacctatgagtctta

SEQ ID NO: 41893 - DNA, 201 bp, Homo sapiens
gagcacaaaaatcccacacccagtccgtgaactgctgattgaaaaaagagctcacacttgattattttggaaatgaaattttccttttttgttgtttttttaaaggagattacccttggtcatttgataaattgttagcactttcactgataatttggcataaggataaaagggaaacttagaaacattctctcattcaaa

SEQ ID NO: 41894 - DNA, 201 bp, Homo sapiens
ccgcccgcctcggcctctcaaagtgctgggattacaggcgtgagccactgtgcccggcctcaaagcactcttattagccaaaatggaatatgcaaaactayggaaaattacataattgattattaatgtttctctgtaataattagacaatttctttacttagatctatttatacaaattaaggtggtattcagacatcca

SEQ ID NO: 41895 - DNA, 201 bp, Homo sapiens
atgccttcaagtgccaagaaacagtgcgacttcaaccaaggtgggccctttgttatcagaagctattctgtgcttgtggttcctttctcagaaatgccaactgtgtgcttgccactcccacacaagaggcaaggctttctgacttttgctggcattccttatagtcagaaaagctgcttaaaggggcctagaagaggaatc

SEQ ID NO: 41896 - DNA, 201 bp, Homo sapiens
aataattcctgattctaccatgctttgtagttgctatgtaacctctttgatcttttagtgcatctatttgtacatataaacgtatgtgtttatgtaaaacrgaatgttttgttttgaaatttgtggtttccatttagcatattctgaacatcattccttgtagataagcagagttctccatcatttttgatgattgctgaa

SEQ ID NO: 41897 - DNA, 201 bp, Homo sapiens
aatgccttcaagtgccaagaaacagtgcgacttcaaccaaggtgggccctttgttatcagaagctattctgtgcttgtggttcctttctcagaaatgccaactgtgtgcttgccactcccacacaagaggcaaggctttctgacttttgctggcattccttatagtcagaaaagctgcttaaaggggcctagaagaggaat

SEQ ID NO: 41898 - DNA, 201 bp, Homo sapiens
cctatggtagccttgacttgtttaagatcagtttttactgatctgtgggggtagagggacagtatgtttgactaccactagtgaagatattagaaatccgygtatccccctaacaaactgacttctcgggaatattgtcaggttttagagattccggagtctcctttctttagcttagaggatataactgataagagctaa

SEQ ID NO: 41899 - DNA, 201 bp, Homo sapiens
ttatatacctaccccaaattctctacatctctacatctgattttgcatttgattattggactcttgggctaagaaaaggctgcgtcagccacacgtctacyttcagtggaatcagggaatgttagaattggaaagaatcagtcttttgtcttatctgacaactgaagatgctgaggcccagaaaggggaagtgagtttccc

SEQ ID NO: 41900 - DNA, 201 bp, Homo sapiens
caatgccttcaagtgccaagaaacagtgcgacttcaaccaaggtgggccctttgttatcagaagctattctgtgcttgtggttcctttctcagaaatgccractgtgtgcttgccactcccacacaagaggcaaggctttctgacttttgctggcattccttatagtcagaaaagctgcttaaaggggcctagaagaggaa

SEQ ID NO: 41901 - DNA, 201 bp, Homo sapiens
acagaacccctagatttggtcattaacaatgcacatatttcaggctattatgtttatgatcatgtcaccttgagcatattttatacttccttgtacatccwtaatttaaagtaaccattaattttcttcagcctgcatgtaagttcctatggtagccttgacttgtttaagatcagtttttactgatctgtgggggtagag

SEQ ID NO: 41902 - DNA, 201 bp, Homo sapiens
acaatgccttcaagtgccaagaaacagtgcgacttcaaccaaggtgggccctttgttatcagaagctattctgtgcttgtggttcctttctcagaaatgcyaactgtgtgcttgccactcccacacaagaggcaaggctttctgacttttgctggcattccttatagtcagaaaagctgcttaaaggggcctagaagagga

SEQ ID NO: 41903 - DNA, 201 bp, Homo sapiens
caactccagcttctgtaataatcacaaatagcccccagattttctacatggcccctaggggacataccatcaccctgtaaaaacacaaaaacaaaaaaaamcccactaaatttcatgatagataccttatctaaaaccatgttttatgtgagtctttattaacatggggacatgatctaagtggaaaaaagcagttacata

SEQ ID NO: 41904 - DNA, 201 bp, Homo sapiens
atgttacagccgattctaaacagagtgatgaagcttaaatgggcaaaggtaatcaaatgtgttatttatttcctttcttgatgttgtcaccttttttgggkggggggtggggacaaaatgttaactctcaatctttcacaaatatgttatttactctaaggactttctttggcagccctagttaaccttcaccaggtggtg

SEQ ID NO: 41905 - DNA, 201 bp, Homo sapiens
aatgttacagccgattctaaacagagtgatgaagcttaaatgggcaaaggtaatcaaatgtgttatttatttcctttcttgatgttgtcaccttttttggkgggggggtggggacaaaatgttaactctcaatctttcacaaatatgttatttactctaaggactttctttggcagccctagttaaccttcaccaggtggt

SEQ ID NO: 41906 - DNA, 201 bp, Homo sapiens
ctgaatgttacagccgattctaaacagagtgatgaagcttaaatgggcaaaggtaatcaaatgtgttatttatttcctttcttgatgttgtcaccttttttggggggggggtggggacaaaatgttaactctcaatctttcacaaatatgttatttactctaaggactttctttggcagccctagttaaccttcaccaggt

SEQ ID NO: 41907 - DNA, 201 bp, Homo sapiens
cgcagttgcttacgactgtaatctcagcattttgggggccaaggcaggtggatcacctgaggtcaggagttccagaccagactggccaacctggtgaaaaytcatctctactaaaaatacaaaaattagctgggcatggtggtgggacctgtaatcccagctattcaggaggctgaggcaggagaatcgcttgaacctggg

SEQ ID NO: 41908 - DNA, 201 bp, Homo sapiens
gaactcatccttttttatggctgcacagtattccatggtgtatatgtggcacgttttcttaatccagtctatcattgttggacatttggcttggttccaaktctttgctattatgaatagtgctgcaataaacatacgtgtgcatgtgtctttatagcagcatgatttataatcctttgggtatatacccagtaagttttg

SEQ ID NO: 41909 - DNA, 201 bp, Homo sapiens
tattaatccagaaacatttacttataaaatgtaataaaagtgatcctcattctgcatattaggaaactgaggttcaaatattacataattgtaatgttaawaacagtttataagttttgaagctggttatctgaactcatgtcttctggtttcaagacaaatattaatcttcaattcccggcttgaacatctaaattgacc

SEQ ID NO: 41910 - DNA, 201 bp, Homo sapiens
ataatcctctacctccttattttggaatggatgattttaatcagtcatcttttttaatgctatgctgggacctctgttatattttgaaaacaacctgcccyatgcacactgagctggcctttcctttcacttctcaaactatcagtttcactagcaatcccttttggggcaaaactatcagtgagttttgctcaattttcc

SEQ ID NO: 41911 - DNA, 201 bp, Homo sapiens
tgaggcaggttgatgactagtcatttagatttagtagttgtatcgaagatggagaattagctacaacatggctggtaaccaggtagaacatatgatcttayggcctgactttctcaaaatcataaatgtagttgacgctttgtgcaggatgttagttttattatcaattttggcacagttagatggcaagatgcagagttt

SEQ ID NO: 41912 - DNA, 201 bp, Homo sapiens
gttatatttactgatagaacagaataccaggaactggaaggcaatgcaagaatgcccccaaataagttaaggtatttagaaggagaacgcttatttgaatwggaatcagttttcctttctgcttgtttatctcttttttccttagacaataggctttgcaaaagaatgccttaaataaggaccatttaatgacctgtctcc

SEQ ID NO: 41913 - DNA, 201 bp, Homo sapiens
ttgtcttcatttcatacagtttttcaaataccacatttataagctacaatgaagtgtgactgaagtagcacaaatgtgcctgcctaacgcaactgcgagaytggaacaataaatgacaaaaattagtgtacttgctagttggggatgccattgcaggccttgatacctcaagaggaaatggtcatgagagacaggatagcc

SEQ ID NO: 41914 - DNA, 201 bp, Homo sapiens
attaggggacagggatgggaagaagtttttttttttttctttttttgtggaaaaaaaattatctcttcaggcaagagtcctctctttcacaaggaagcctkgtcattcccaagggtactgacaggaagctacaagtcactctgtccaggccaatagagcaggcctctgttgatttcctggcattgtaaagattctggcttc

SEQ ID NO: 41915 - DNA, 201 bp, Homo sapiens
agcaggtaactattgttattaatgtcttatgtgtcttttttggagtttctatgtagagcatatacaagaaattatcaatatacattcctttttattttaawttttttagagacagggtgtcactttatcattcaggctagagtgcagtggcacaatcatagctcactgcagccatgaactcctgggctcaagcaatctccc

SEQ ID NO: 41916 - DNA, 201 bp, Homo sapiens
ttgattcagttttctttatgaagatcactttgcaggcctatagcttttctgtgagtagaaaacagctcctggcacataatcccactactaaccttcctcargcaatctgctttcctgtcctctatctgaggatgagcacttgtagacttagaggtttcacagtgttttgtacttactatgcatgagggtatggaaccctca

SEQ ID NO: 41917 - DNA, 201 bp, Homo sapiens
agggaaggaaaagaagacatgatgcaaaaaccaagtggaggctgttacagtatactttctcatgtatgaattataaaagaatgtttaaataatgacttgaytcattgtgaactaacaaatgtatttttgttttgcagaagtccacaaaaggaagataggataccaatggcagatgagtattatgaatataagcacataaaa

SEQ ID NO: 41918 - DNA, 201 bp, Homo sapiens; identical to SEQ ID NO: 6686

SEQ ID NO: 41919 - DNA, 201 bp, Homo sapiens
atcaatatcaaaacagttacttgttcaagatatcaatataaaaaggaataaatattaacaaatataaatttaagtatgcttgggtacatttatacttccaytttttttgagacaaattatacttccacatttttaaagacattaagtgaataataattcatagtctttggaattttccctttatggaagcataatttaaaa

SEQ ID NO: 41920 - DNA, 201 bp, Homo sapiens
tcaaatcacaaaaatcaaattgcaatggagagataccaataatagttaaatgcatcattatctgaaatactttctatgaattgtaagtcccagtaagataytacatttaaaaaacactatttcaatgttttctgaacttagactgagatttttttctgctgtcatctattaaaatcccatggaatagattttgataggaac

SEQ ID NO: 41921 - DNA, 201 bp, Homo sapiens
atatttaattttcaaatgaagtcttcttgaggagaatgcctcctttccctgttctattgtacattacctggtattaatcataaagtgacaacatattccaratctcaaaaggctcaacatatgcccctggattagtcatttacataaggacttgtgatctacaagtagaaatgggcctgtgaccacatctttctttatgaa

SEQ ID NO: 41922 - DNA, 201 bp, Homo sapiens
ccttctcctcccaaggtagaaataaccagttgtactcatgtggtctgagagctgccaggattttttttttttagttcaaactttaaagggtaaagtttgartggaaaggaagttagcagactaagtctaggaggtttgtttctctatttattttatttttagtgttcaaacagcatgaaacatcctggaaaaagctgctca

SEQ ID NO: 41923 - DNA, 201 bp, Homo sapiens
aggattttttttttttagttcaaactttaaagggtaaagtttgaatggaaaggaagttagcagactaagtctaggaggtttgtttctctatttattttatytttagtgttcaaacagcatgaaacatcctggaaaaagctgctcactctcttgggataataaagccttgaaaatttgatagatgttctcaaaaagtttgaa

SEQ ID NO: 41924 - DNA, 201 bp, Homo sapiens
gtttttttgtccttgcgatagtttgctgagaatgatggtttccagcttcatccatgtccctacaaaggacatgaactcatccttttttatggctgcacagyattccatggtgtatatgtggcacgttttcttaatccagtctatcattgttggacatttggcttggttccaagtctttgctattatgaatagtgctgcaat

SEQ ID NO: 41925 - DNA, 201 bp, Homo sapiens
taaccatcagaatgtattgttttgtacctgtttaactgggtcaataacaacttgctctggcaatcatttgtgcttttgtaagctagccagtcagttgcttytgaaagctagccaacaccacacacagttgtaaagccagacaattggcaacagctaaactctagtgcacatgcccaggcaagtcagccagtcagcaacatt

SEQ ID NO: 41926 - DNA, 201 bp, Homo sapiens
catagtaaaagctcaataaatgttagaatgttagctgttagtatggttattgtatcctaatacattatgacaacagtgagaatgaaaatgaaaagttcagsctgggcatggtgtctcacgcctgtaatcccagcattttgggaggctgaggtgggtggattacctgaggtcaggaattcgagaccaggcgggccaacatgg

SEQ ID NO: 41927 - DNA, 201 bp, Homo sapiens
cctggggaaacagtgagaggaacaggcagtggagtccttagcatgcactggcaagagcactgcctctgttgtcatttttttcattcctgcatcccagtgargcatctaaggttaacaatctgaaaaatgagggataatatgacccacctattaggttatttgaaagattaaatgagataatccttttaaaatatctactgt

SEQ ID NO: 41928 - DNA, 201 bp, Homo sapiens
tagacaggaggtttgtaggggctggattgtaagggccttggattccatcctaatgagttttcttattctgatacttcacaaacatttttctatttctacttctaacagctgaggagactgaacttttaccataagagggaatttctttgaaatctccctatagggaatattttccctcttgtatgttgaagggagaagtag

SEQ ID NO: 41929 - DNA, 201 bp, Homo sapiens
ctttctcaaaatcataaatgtagttgacgctttgtgcaggatgttagttttattatcaattttggcacagttagatggcaagatgcagagtttattgaccrtcagtccaggttttgaactaatagaatgattcaggaccctctttcttcattcctttaacaaccgacattggagggtgcctctgcttgagaggccatggac

SEQ ID NO: 41930 - DNA, 201 bp, Homo sapiens
caagatgcagagtttattgaccgtcagtccaggttttgaactaatagaatgattcaggaccctctttcttcattcctttaacaaccgacattggagggtgmctctgcttgagaggccatggacttctgtagttgtggatgcaaaaagagatgagccctggtgtttgggcttgggacaggcatgttatctgtcctggggaaa

SEQ ID NO: 41931 - DNA, 201 bp, Homo sapiens
ttctggtgctttgcaaacgtttttctatttctaagttctaacagctgaggagactgaacttttaccataagagggagtttctttgaaatctccctatagargatatttgtcattctattttggctgccaagcatctgaactctgttcttgcacttggagaatttcccattggagggagaaaagcagaatgctttgttcact

SEQ ID NO: 41932 - DNA, 201 bp, Homo sapiens
aggcatgcaccaccatgcccagctaattttttgtattttcagtagagacggggtttctccatgttggtcaggctggtcttgagctcccgacctcaggtgayccgcccgcctcggcctctcaaagtgctgggattacaggcgtgagccactgcgcctggccagggatttctttcaggaacaaagatgttcagcactgcctct

SEQ ID NO: 41933 - DNA, 201 bp, Homo sapiens
tgggcgtggtggcgggtgcctgtagtcccagctactcgggaagctgaggcagaagaatggcgggaacccgggaggcagagcttgcagtgagccgagatcgygccactgcactccagcctgggcgacagagcgagactccatctcaaaaaaaaaaagaaaaaagaaaaaaaaaaagaaatagtttatagagtattttataga

SEQ ID NO: 41934 - DNA, 201 bp, Homo sapiens
aggaaatcgagaccatcctggctaaaacggtgaaaccccatctctactaaaaacacaaaaaaattagctgggcgtggtggcgggtgcctgtagtcccagcyactcgggaagctgaggcagaagaatggcgggaacccgggaggcagagcttgcagtgagccgagatcgcgccactgcactccagcctgggcgacagagcga

SEQ ID NO: 41935 - DNA, 201 bp, Homo sapiens
ttaatttgtttttagtttgagatagcaccatacataatattccatttcctccttatttttatcccagtttttaaaagtttcttaaattggtttgcatgaargtgaaatccatgtcagcatttctggtttctgatacaatactattttcctttctcatttcccctgccatctcttgtctctctcaaaagaaaaaaaacaaaa

SEQ ID NO: 41936 - DNA, 201 bp, Homo sapiens
gatttaacaatataccatcagtgctgtaaatattggcattcctcagggttttctcccaagttttctcttccctctctgcctactctgaattgtgttacctsacttgtggttttggtcaccctcctgatcattctcaaatatgtattgccagccctagtctgtctctaagattccagctcctctatttatcattgcctactt

SEQ ID NO: 41937 - DNA, 201 bp, Homo sapiens
cagagatgaccagtttgtgaatcctaggagttacagtggtcaagtctaggacatctcattagctgtgagggatcaggctggttctaaggtcagggtaggtrtatttcggggctcaggcatggtagttacagatactagtgctatgagggagtgaagcaatgtgatcataatcagaaactatttgccttttgctttccttca

SEQ ID NO: 41938 - DNA, 201 bp, Homo sapiens
gggagtgaagcaatgtgatcataatcagaaactatttgccttttgctttccttcatgctttttgctgtttggagccttctgtagtcttagcaatgtgttgyaattggagagttggagacctgtgcaaggcctaactcctcagtggggcaggagaaatgcaaggattcctagagaggggtagctagattttggttagctgat

SEQ ID NO: 41939 - DNA, 201 bp, Homo sapiens
atagtatgtcctaagggggagaatgaaatactggacaatagcactaatgacttccacatcctctactcaaagtagcacataatccaaagcaagatgaagttaattggtcttttttcttttctagcccttcacactactgaagtaatgttattaatgtgaaggactaagagaagaaaaagaatattaattaggttaattaag

SEQ ID NO: 41940 - DNA, 201 bp, Homo sapiens
aatatttactatatttctggtattgtagagcatagttcttattcttactgtattacactctgaattaaaataaggacaatagttaattctgggccatttcyaccctcccctacaaaagaactaagattatgttttcaattatggacgtactttatatgcatttttttcttgatgtattactgatccagtgagcaacttcaa

SEQ ID NO: 41941 - DNA, 201 bp, Homo sapiens
aggaattcattctcatgaaaacttagtatttttgcttttaagtgaacttgtaatacttatagttctttgttcaattggtaatgtttttcctttttccggarcaaacatttaaaatactgtttgtgaggtggcttgcgatgtcttggccctaacccaagtccagcagtcattttgttacactcttttcagctttgcttcagg

SEQ ID NO: 41942 - DNA, 201 bp, Homo sapiens
tgaacttcttacatggaagcactatttataggtcatgacctccccttttctgcacatagtaggtattgaataaatgtttgctgagtgaatggaaaaatgarcagatgaatgaacaaactagcatatttaattttcaaatgaagtcttcttgaggagaatgcctcctttccctgttctattgtacattacctggtattaatc

SEQ ID NO: 41943 - DNA, 201 bp, Homo sapiens
cgtgaaggtttaaaggtaagtcgatttgccagcgtggtaggggtagcaattggcgtttagagtgtttaaatccaggaaacactgaccctactaaaggtgcracctaccagatttaaaaatcaccaggagaaaatcagtgaatgtggtgcttgtggatccacaggagggcattacgcctcccacctcttccctctgtcaggt

SEQ ID NO: 41944 - DNA, 201 bp, Homo sapiens
ggccacgtgtcactgtccatggtcctgaaaccaggattcccccccccccccgccaaaaccccttccctatccctctgccatccctcagggaaaccagtctsctattcaagctcttctaggaaagaaacattgtcaatcttcttttctattttaattttaaaatgtatggtttttaaatcactttagaactgacagaatcat

SEQ ID NO: 41945 - DNA, 201 bp, Homo sapiens
gccaaggtgggcggatcgcgaggtcaggaaatcgagaccatcctggctaaaacggtgaaaccccatctctactaaaaacacaaaaaaattagctgggcgtrgtggcgggtgcctgtagtcccagctactcgggaagctgaggcagaagaatggcgggaacccgggaggcagagcttgcagtgagccgagatcgcgccactg

SEQ ID NO: 41946 - DNA, 201 bp, Homo sapiens
tcggaggccaaggtgggcggatcgcgaggtcaggaaatcgagaccatcctggctaaaacggtgaaaccccatctctactaaaaacacaaaaaaattagctrggcgtggtggcgggtgcctgtagtcccagctactcgggaagctgaggcagaagaatggcgggaacccgggaggcagagcttgcagtgagccgagatcgcg

SEQ ID NO: 41947 - DNA, 201 bp, Homo sapiens
ttcggaggccaaggtgggcggatcgcgaggtcaggaaatcgagaccatcctggctaaaacggtgaaaccccatctctactaaaaacacaaaaaaattagcygggcgtggtggcgggtgcctgtagtcccagctactcgggaagctgaggcagaagaatggcgggaacccgggaggcagagcttgcagtgagccgagatcgc

SEQ ID NO: 41948 - DNA, 201 bp, Homo sapiens
ctttcggaggccaaggtgggcggatcgcgaggtcaggaaatcgagaccatcctggctaaaacggtgaaaccccatctctactaaaaacacaaaaaaattarctgggcgtggtggcgggtgcctgtagtcccagctactcgggaagctgaggcagaagaatggcgggaacccgggaggcagagcttgcagtgagccgagatc

SEQ ID NO: 41949 - DNA, 201 bp, Homo sapiens
aagaggttgttgaggattaaagttaatgatataaacgtaaacattcaaattttaggggattagaagtagtttacaggccgggcgtgatggctcaagcctgyaatcccagcactttgggaggctgagacgggcggatcacgaggtcaggagatcgagaccattctggctaacatggtgaaaccccgtctctactaaaaataa

SEQ ID NO: 41950 - DNA, 201 bp, Homo sapiens
gcaagacaccaaggcacgtgtatatctatgtaacaaaattgcacattctgcacgtgtaccccagaacttaaagtataatagtaaaaaattaaaaaaaaaaataggtgtggggcagataaaaggagccagatggtaactgtctaaagtttggcctaatgctccacttttcttacctttattctgatcgccaaagtcagaatc

SEQ ID NO: 41951 - DNA, 201 bp, Homo sapiens
ccccagctgttacattttaactgtgactgtattcacattgacttgcatgggatatttctcagttctatagtaaatgtgggtggttagaatatataatggaragaactctgggtttgggtttaggagactggagttaggaactgggtgctctagctcagtcatgtgatctggtgtggtcctattttatacaatttttaatta

SEQ ID NO: 41952 - DNA, 201 bp, Homo sapiens
agcaagacaccaaggcacgtgtatatctatgtaacaaaattgcacattctgcacgtgtaccccagaacttaaagtataatagtaaaaaattaaaaaaaaarataggtgtggggcagataaaaggagccagatggtaactgtctaaagtttggcctaatgctccacttttcttacctttattctgatcgccaaagtcagaat

SEQ ID NO: 41953 - DNA, 201 bp, Homo sapiens
ccggctaataatttggtgccccttaaaacgtgttcttaaatattggactttgatttattttttaatttttatttatttatttttatttttggagacagagyttcgttctatcccccaggctggagcacagtggcgccatctcggctccctgcaacctccgcctcctgagttcaaacgattctcctgccttagcctcctgag

SEQ ID NO: 41954 - DNA, 201 bp, Homo sapiens
ggtataaacatctttaaagttccccaattattcagaaggacatcaagtcactttcacagatatgtgaaggttaagaaaaaagggactcttgggtgatgtargatagggtagatttacaacactttctcttgttcaccttaagaactgaaaatataagattttccaaattatagtgctatcagatatattaatcatgtctta

SEQ ID NO: 41955 - DNA, 201 bp, Homo sapiens
agcagcatttttttttatgagacagagtctcactctgttgcccaggctagagtgcagtggtgtgatcccggctcactacagcctccacctcccaagttcargtggttctcgtgcctcagcctcctgagtagctgaaactacaggtgtgtgccaccacacccagctaatttttgtatttttagtagagacggggttttacca

SEQ ID NO: 41956 - DNA, 201 bp, Homo sapiens
atgcacactctcctagcctctgtacctggatgagataaatagcctaaattatgtttgcttcatggacagctttcttatgaactatctcagaatgtagtcartttgatggtccctgcatttggcagagaaccaacaaatcaccccactgaggtggacttgggacatactaggggtgaggtggagggtagatgaagatggctg

SEQ ID NO: 41957 - DNA, 201 bp, Homo sapiens
aaaagtgcttggtatataatagtggggtttttttaggtaaaaatatatcttatttatttcagaatacataccctactttaatgttctacaatttttgagcygaatgttacagccgattctaaacagagtgatgaagcttaaatgggcaaaggtaatcaaatgtgttatttatttcctttcttgatgttgtcaccttttttg

SEQ ID NO: 41958 - DNA, 201 bp, Homo sapiens
gggtatcagctagaagacttaaagcctagaaattagaagcatctgaaggctcattgattcccatgtgagctttgctggggctatttgcccataggtgatcmttccataaggagataatggagtggaaggaactaaactaaaaatctttattccttttcttatgagtgaaatattttccaagatcataaggatctctggaag

SEQ ID NO: 41959 - DNA, 201 bp, Homo sapiens
gtacttgggtttctgatctgaggggggcttatagatcagaactttcatgatctaacttttggcattgggaagggcagcctgtcatgacaatcacacatacmtatcacatcagagcctgttccattcatcagtattcaggatgatttgtaccagactccttacttagtcttccccaattctccataccatcttgaggtttga

SEQ ID NO: 41960 - DNA, 201 bp, Homo sapiens
tggattttgagcctatgcctgcgttttcccatgatttattttatttctttgttgaaataatgagtaagatggccagaaatgttttaaaaatagatctgaaraaactgctctcttggttccctatttcttaaagggccagaaaattttaaataatagacacacatttttgaaaggaaatttaaatcaactcgtacaggacgc

SEQ ID NO: 41961 - DNA, 201 bp, Homo sapiens
ggaaactgagcccagataacttatgtaatttggccaaggtcatacactgagcaagtagcaagcagaattctgtctcacgtgaaaaccattgtgtgagagartttgaccagtattttggtagctgtagaatttttctcaagcaactacgaagtctaggggactagtgcatactaatggaaacttttcatgtggagtgtcttc

SEQ ID NO: 41962 - DNA, 201 bp, Homo sapiens
tgacagagcaagattctgtctcaaaaaaaaaaaaaaaaccagaaagaaagaaaaaaagaaaaaaaaatggaatcagaggacatcctacttcatggatataygtggattttgagcctatgcctgcgttttcccatgatttattttatttctttgttgaaataatgagtaagatggccagaaatgttttaaaaatagatctga

SEQ ID NO: 41963 - DNA, 201 bp, Homo sapiens
aaacaaataaaaaccaaaaaaaagtcattcatgcttgtgtatggaatgtatggtggtcctgtaggggtagatatttaacagagaccaacaggggaaaatgrcgttagcaattaaccttctcaaagatgcttgatgttcagtaaacttaaaaccattgtgtatcccattttgtatttctcttcctctgcctcttagcaaacc

SEQ ID NO: 41964 - DNA, 201 bp, Homo sapiens
cgtgcttgccgatgggacagattctgcaggtaagatacagggctgggggttgtcccaaattgtactctcaaggtagttcagtctcttgctggttcacactyagcctgagcccctgagggaaaacagtgcctggggcaacatgaaagcccaagaggtgcttctgagttgcccaggagttgctgagggggagcaggaaggatt

SEQ ID NO: 41965 - DNA, 201 bp, Homo sapiens; identical to SEQ ID NO: 6682

SEQ ID NO: 41966 - DNA, 201 bp, Homo sapiens
attgagctttctgacctagcaacattccagactgttctgtgcaccgctgtcagcaatcgcaggatctggtgataagtcacatatcaggagtgctgtgaggrcagttatgtctagtactcttagttaagtaacctttaaactacagttatttatcacaaccatggtgacatcaccaagggacattctaatggaactttaaaa

SEQ ID NO: 41967 - DNA, 201 bp, Homo sapiens
tgccaaatagaatcttgatagagacatgatactgtaatgggacactccagacctaggtctggttcagagtgaaagaataagccaggctaagtctcagcagktgtaaaataccaccttctttggggcagtgggctggggagaatgctattaatataatgaacactgtaagaaaaggaagaaagatctctctgtagcaagagg

SEQ ID NO: 41968 - DNA, 201 bp, Homo sapiens
ggagaacgcttatttgaattggaatcagttttcctttctgcttgtttatctcttttttccttagacaataggctttgcaaaagaatgccttaaataaggaycatttaatgacctgtctcctggaaagataggttttagggatgctattgccagagttcattgagataatgaatcctgaagttaggagatgttgagttggtt

SEQ ID NO: 41969 - DNA, 201 bp, Homo sapiens
ttgtggctttaaacacaaatttattatctcatagttctgtaggatagaagtcctacatatgtctccctgggccaaaaaaaaaaaaaaaaaaaaaaaaaaargtgttggcagggctccattcctttctagaggctctagggaagaatctatccatttccataccttttccagtttccagaggctgcccacattccatggctt

SEQ ID NO: 41970 - DNA, 201 bp, Homo sapiens
acctgtctcctggaaagataggttttagggatgctattgccagagttcattgagataatgaatcctgaagttaggagatgttgagttggttggtgctaagsataaactcctgatcaaagtggaatccagtgacagtttgcccttatgtgatatctaattagatagaaaacaccctttccaaaaaggagaactgatttaagg

SEQ ID NO: 41971 - DNA, 201 bp, Homo sapiens
agacttaactaatggaaccaacttcctgtaatggacctcataactgtccagaaggcactcatttttagcaatggtagaggcagtcttgtcatccccactcygtgccatctggcatcatgctatgcactgtcctgctgccctcccctctggtggctattttagcagaagacaaaaagtaggaggctatatagagcttttctg

SEQ ID NO: 41972 - DNA, 201 bp, Homo sapiens
gtaatggctgtaaaatacagtcatgtaccacataataacatttcagttaacaacggacatgtatgatggtggtcctataagattaaaataccatatttttrctgtacctttgtatgtttagatatgcaaataccactgtattacagttgtctacagtattcagtacagtaacatgctgtagaggtttgcagcctagaaaca

SEQ ID NO: 41973 - DNA, 201 bp, Homo sapiens
tgctttcaggcaaaataacctaactataaaatatttactatatttctggtattgtagagcatagttcttattcttactgtattacactctgaattaaaatraggacaatagttaattctgggccatttctaccctcccctacaaaagaactaagattatgttttcaattatggacgtactttatatgcatttttttcttga

SEQ ID NO: 41974 - DNA, 201 bp, Homo sapiens
gttggagatatcacatgctcatcactactgagggccataattgggctctgaggagtgcaggctgcatttctcattgccaggacctgggctagaggacaagyttacactggagttagcacagtactatgactggctgactcattttggtcccctttaaaagcatgcatttgatatatatttgcttagttactttcctattat

SEQ ID NO: 41975 - DNA, 201 bp, Homo sapiens
gcaaaataacctaactataaaatatttactatatttctggtattgtagagcatagttcttattcttactgtattacactctgaattaaaataaggacaatrgttaattctgggccatttctaccctcccctacaaaagaactaagattatgttttcaattatggacgtactttatatgcatttttttcttgatgtattact

SEQ ID NO: 41976 - DNA, 201 bp, Homo sapiens
ttctcctgcatgtcctgttcttcttgccttgctttctttttctccataatacttagcatctggtgcaccatagataatcactggtttatttctttttgttmtccttccgtgagaatataagttccacaagggcagactttattttatccactgctttgttcccaacacctgcaacagtacctagcacatctttggtgttta

SEQ ID NO: 41977 - DNA, 201 bp, Homo sapiens
gcagtgagccaagatcatgccattgcactccgcctgggtgacagagtgagactctgtctctaaataaataaataaataaataaataaataaataaataaatgactttccttttcatgataactgctgcattatagtattataatcctttactttgaggctttttgtctgctaaaaatgttgacgttttcattcttgtctga

SEQ ID NO: 41978 - DNA, 201 bp, Homo sapiens
gggtagtaagggctggtgaattgaagtcattcttgggtctagtgctttctctcatttatccatctcttgaaaacatacatactgagaagcttctaggtackttgcctagcacataacgaagcaaaaagtgatgcagaatctgcccacatgaccttatctgtggccactgtacaccatcataattatctcaccccccttctc

SEQ ID NO: 41979 - DNA, 201 bp, Homo sapiens
caggaggatgtgaggcactaagtagactggcaaggcagagacatatgggcatagggcaatatgactgggatccagtgactacacaatggtatggagtgggkacttctaccttggggaagctgaggcaggttgatgactagtcatttagatttagtagttgtatcgaagatggagaattagctacaacatggctggtaacca

SEQ ID NO: 41980 - DNA, 201 bp, Homo sapiens
ccattccagggtgaaccctggccagacatttttacttctctatttcagtctcacctcaagcttcaaatatctaaatctgaactcatgaattgcctctcttyatgaaagacattacatgtttttctggcttcattaaaaaaaaagaaacctgccattttccttgtcacacagactcaagtttgtaataattttgattaccgc

SEQ ID NO: 41981 - DNA, 201 bp, Homo sapiens
attcctgcatcccagtgaagcatctaaggttaacaatctgaaaaatgagggataatatgacccacctattaggttatttgaaagattaaatgagataatcmttttaaaatatctactgtaatacatagtacatagtaaaagctcaataaatgttagaatgttagctgttagtatggttattgtatcctaatacattatgac

SEQ ID NO: 41982 - DNA, 201 bp, Homo sapiens
cagaattatcaagcaaatcttgtcaacaccttcccttattccaacaattgtaagtcaggatacttgcatgctgttactttgtactgatgtgtagttaacakgatgtcacatagtagtacaagagttataaaagacccttcatggcagtatatactgcaaacaaggctagttgtcatttcaaaaagtgaaaatttggtcttc

SEQ ID NO: 41983 - DNA, 201 bp, Homo sapiens
aaggtcattctggtgtcagatttttaggcttttcagctgtaggtaacatgaaataaccaaagggagaccgtgaaggtttaaaggtaagtcgatttgccagmgtggtaggggtagcaattggcgtttagagtgtttaaatccaggaaacactgaccctactaaaggtgcaacctaccagatttaaaaatcaccaggagaaaa

SEQ ID NO: 41984 - DNA, 201 bp, Homo sapiens
ctggatacaagaagagctcctctgcctcctgtccccaccccattcctacatccttctactcacacccacttattttcttcgatgcctgaaatttcacctasagatgatttctttggatgaaggcctctggtagtgacccttattaaattggaaattaaaaagtttgtgcccttgggaagtggattcaaattgtcatgaata

SEQ ID NO: 41985 - DNA, 201 bp, Homo sapiens
gctccccggccagacttggctgatgttttcttgtttctgtttcagccttcaggataattccttcagcagcaccactgtaacagagtaagtgattcttaccrttaaaattagacttgcatgcctttctctggaagcaactatcgtgaaggtatcctccaccgttcccagccgctgttcgttttagatgcattgtctcccgga

SEQ ID NO: 41986 - DNA, 201 bp, Homo sapiens
tgtgtgtgttattaatccagaaacatttacttataaaatgtaataaaagtgatcctcattctgcatattaggaaactgaggttcaaatattacataattgyaatgttaaaaacagtttataagttttgaagctggttatctgaactcatgtcttctggtttcaagacaaatattaatcttcaattcccggcttgaacatct

SEQ ID NO: 41987 - DNA, 201 bp, Homo sapiens
ttctttttactttacctttcattcatttttaaaaattcttaaaatatatctaacctaaaatttaccatttaacttttttttttttttttttttttttttttgagacagagtctcactctgtcacccaggctagagtgcagtggcatgatctccactcactgcaacctccacctcctgggtacaagcaattgtcctgtctca

SEQ ID NO: 41988 - DNA, 201 bp, Homo sapiens
ttagtacgtctgattaaggtcatagcaaagagaatgaaaagacctgatgatcagatgccaaaaagagaaatgatgggctttacgcaaattgtttatttgaygttttgaagatgcatcccttcctcctcttcctctcccaccccacaaaaagggtatttcacttaatttaggtgattttatttttcttttctttctttttgg

SEQ ID NO: 41989 - DNA, 201 bp, Homo sapiens
tgctccatcttcagccaaagccagagattcaacttagaccccgagtcagccccatctccacccagcactcagcagtttatgatgtgagaaaactgttttgytattgtcttcatttcatacagtttttcaaataccacatttataagctacaatgaagtgtgactgaagtagcacaaatgtgcctgcctaacgcaactgcga

SEQ ID NO: 41990 - DNA, 201 bp, Homo sapiens
gagattttggagcggattgaggtcatgagatgggcattgatcttttcacgaatgccaaataatttcatacctacagctctcagagtcctcatgttgtataytgggctcttttgagcacaaggagcctttatgtatttatgaggatgagactcaggaaggtctatgaatgtgtttgcccaagtttctgtgtatatatactct

SEQ ID NO: 41991 - DNA, 201 bp, Homo sapiens
ttatccttcttttttttaaagaaattattgaatagataatactttctcacatagttcaaaaagaaaatatataacagaaaatggtaaaaagactccttccmaaaccaactgccatctccagctctgaggtctcccaccccaagcaggtaactattgttattaatgtcttatgtgtcttttttggagtttctatgtagagca

SEQ ID NO: 41992 - DNA, 201 bp, Homo sapiens; identical to SEQ ID NO: 6683

SEQ ID NO: 41993 - DNA, 201 bp, Homo sapiens
agtcacagcccatactaaggctgataaatcctatagcattgccttgttgcttcagatactgtcaatgagtaattttcttcctgttttatctatggatgatytttggagataatcacttctgggttacagggcatggctgtacactggaaattaattaatcatcccctgagctgaactgtagtgcctatttatgtcttttat

SEQ ID NO: 41994 - DNA, 201 bp, Homo sapiens
tagtcacagcccatactaaggctgataaatcctatagcattgccttgttgcttcagatactgtcaatgagtaattttcttcctgttttatctatggatgawttttggagataatcacttctgggttacagggcatggctgtacactggaaattaattaatcatcccctgagctgaactgtagtgcctatttatgtctttta

SEQ ID NO: 41995 - DNA, 201 bp, Homo sapiens
cttgaatagaattccactcccttttcagtgagaggaagacttaggttctgattatggctttgagggctctattcttgcagtgtgtctaaagcatgaattcwctgagatcctaaaaattggtcttagttagacaattgttttgacaccttagttcatgttgtattatttctcatgcatgatttagtagctccagtttacatg

SEQ ID NO: 41996 - DNA, 201 bp, Homo sapiens
tttaaagtgtctggtcctttactatgaggctcttgagatttatctttgccaaagacacaaactgtagcctaaagctgaataaaacctcaggcaaccattgraggaaaatgtaaccatctatagatgacagaaataggaatcactgtggttagtttactactgataattttaaaatgtgaaaggtctgatgagagtttataa

SEQ ID NO: 41997 - DNA, 201 bp, Homo sapiens
ctgtcacccaggctggagtacagtggtgtgatcatggctcactgcaacctccgcctcccaggctcaagggatcctcctgcctcaacctcccaagtaatggrgactacgggcatgtgccaccacgccctgctaatttttttttttgtatttttagtagagatggggtttcaccatgttggccaggctggtctcaaataatct

SEQ ID NO: 41998 - DNA, 201 bp, Homo sapiens
atagatgtctatgtgaggagaggtgtgaaggtgtgtatggagcaggtgtgtgtgtgtggacagtatgtgaaggcatgggaattggatgtgggtgtgtgtgrggtgggtgtgcatgggtatgtgtggagtaggctgggaggtttcgggggctggatgtgagggtatgaggtatgtgtggggtaagggtgtgtgtgtgtggaa

SEQ ID NO: 41999 - DNA, 201 bp, Homo sapiens
ggggataaaagaagacagattattattgaatgtatacaaattatcctattgccgtaagaatgtaaggacacttggtatgagtttctgaactctggggatcrgtgagactcggatgccatttttaaatgttttatttcagtttatattagcagcatctactaaattgttgtgaattacagatagttgaagtatagagaggac

SEQ ID NO: 42000 - DNA, 201 bp, Homo sapiens
ctccctgcaaacagacaacatatttaatacaaaacacataaagaagtctcaagccaagtacaagttaactgttgagttatttgatgatttggattaactawacaagtttctgacaaagtgttcagtaaaatatttgttgcatgttggatgtggatatattttttcttcttttcatcatgacttttatgtgtcttcccaaca

SEQ ID NO: 42001 - DNA, 201 bp, Homo sapiens
tgcagtgagccaagatcatgccattgcactccgcctgggtgacagagtgagactctgtctctaaataaataaataaataaataaataaataaataaataaatgactttccttttcatgataactgctgcattatagtattataatcctttactttgaggctttttgtctgctaaaaatgttgacgttttcattcttgtctg

SEQ ID NO: 42002 - DNA, 201 bp, Homo sapiens
ttgcagtgagccaagatcatgccattgcactccgcctgggtgacagagtgagactctgtctctaaataaataaataaataaataaataaataaataaataaatgactttccttttcatgataactgctgcattatagtattataatcctttactttgaggctttttgtctgctaaaaatgttgacgttttcattcttgtct

SEQ ID NO: 42003 - DNA, 201 bp, Homo sapiens
cacatccaactttaaacaacaaagatgaaataaatctacaaccaggtttgttacaaatgtaactaagagctctgtattttgaagatgctcaacagatgtgmgttgaaccaagaacgtcatacttggaattgtcgttagttttgtttgttatgttatgactatttgagccatgtagtggctcatttaaaaggggctgctccg

SEQ ID NO: 42004 - DNA, 201 bp, Homo sapiens
tgttcttccttcatcttccagtcagtctttgagacccatatgaggtttttcaactgctcattagagtgagtacattagaatgcttatgccttttgtgtacrtgtgtggtgtctgaaaggatcatttggaaattaattactttagatataattatatttggtaggttgtggttatttggggcagttaacatggaagaaatac

SEQ ID NO: 42005 - DNA, 201 bp, Homo sapiens
taagtgcacttcatctcctgcactagtcatgtttttgacttccccaaattatggaaagtgtgacatgcttcattaacataatacttaacattacaaatagraaaagatgggcttctttagcaaaacaatacagtaagagggcccttttctcaatgaatgataggctaacacaacagagatctttcagttaaagcagaatct

SEQ ID NO: 42006 - DNA, 201 bp, Homo sapiens
cgaacttgtctcttgataaagttgggccttagtttttgcatatagcaaataagagatttaaatataataattgttaagtatctttaagcagaaaaattctrttgtcagtcaggaacttaataagttattctccattgtttacagttgattaaagttatactactaaattaacttcctccttttccctccttccttccctcc

SEQ ID NO: 42007 - DNA, 201 bp, Homo sapiens
accacatagcccacaaaccttaaaatacttattgtctagacctttataggaaaagtttgccaacacctagtgcagaagattgagacatgagttaatctctyttgataggagtaaaaatattgcaaagagagtttttgggaaaaaactgtgtactcatcttacttttatatatttccagggttttgcgattaggcgagtcag

SEQ ID NO: 42008 - DNA, 201 bp, Homo sapiens
aagcaaataagtagtatcctaattctgtcattcctgctccgtttgagaaccagtcatgggagaaaggaaatataaatacaagatggtgttaaattaaaatyctatagtactgaatttgaattagaagtattggtggaactcatgatgagttttctacttaaaaataaaacaatgaaatgcctacttctatcaaatgaaaaa

SEQ ID NO: 42009 - DNA, 201 bp, Homo sapiens
tgacaggatttacccatataatgtgatggcaaaacattgtactgtcatatgtattttttaaatgatagttattaacttctacattgaatctacagaaaagrtcattgccttctaatgggttatcacctgagtagtaaaagaaaaacatgcagtttggtagttcagagtcaactgaaacatttggataattcattatgagac

SEQ ID NO: 42010 - DNA, 201 bp, Homo sapiens
tccatgtagcatagctagaattccaacccatgtctgtctgactagtaggtgctcttagccactctgtaactaatcattgtgtacttatgtatgtgggatayagctatcaacataggaaattcattgggatattagcataatggaggtatgtaatttgtgataaatgttcagaggtttccaaacaaatgcagtttaccttac

SEQ ID NO: 42011 - DNA, 201 bp, Homo sapiens
cagggacatgagctccagccacagaatgtacagcaaagagccaagggctgagattttgggaatgcccactattgaattgtagaagaaaaataatgttgtgyaagttagagttcttggctgaaaatagccaagactagcttgattttaaacaaaaaacaaaaaacacccactacaacatatcagaaagattttaagtgactc

SEQ ID NO: 42012 - DNA, 201 bp, Homo sapiens
tatcctgctaggagactagaccttaagttaacactaaaatattatgaaaattgatgactgctgccatttaaattctgtgttactattagggtagatggtawtgaggtgacagttcataaccattctaaacagtctaagtgattacaagttaaataaagttatattttatcatgtaatgagtctgtgtatgatgacttttaa

SEQ ID NO: 42013 - DNA, 201 bp, Homo sapiens
gtgcaaaagcaaatgtagagatctgacccatatatattctcattgagttaaattggaaagatcttacataatctcagcatttgaattaactaggtatatgygatgaatattttttgtattacattttcaggtatgtaccaatattttgtttcagttttttgacagcagctcactcatttaacatttgttgcagtatcaata

SEQ ID NO: 42014 - DNA, 201 bp, Homo sapiens
gatttttttgagaaatagtgtctcatcttccatgaatttgaatattggtgaatctctcagtctttaacattttaaaagctgttgataaatgccaacaagarttatgtaacttttgatcatctactgtgcaataggtccaataggtccttaatggctgcattttagagttatatctgtgatgcagaacaggggcgtgcatgt

SEQ ID NO: 42015 - DNA, 201 bp, Homo sapiens
actaattaatagtaagacttaatatatcttgagtcaaataagtaacaacatatccattttaaatttgtctgttatttcctgttttcagccagtttcatttmtagttttagagataattatttcatttcctatactggaaaaagtataactttatcccaaacaagaataactttatcagaatacaattagagaagaaatatg

SEQ ID NO: 42016 - DNA, 201 bp, Homo sapiens
gtgttcttccttcatcttccagtcagtctttgagacccatatgaggtttttcaactgctcattagagtgagtacattagaatgcttatgccttttgtgtayatgtgtggtgtctgaaaggatcatttggaaattaattactttagatataattatatttggtaggttgtggttatttggggcagttaacatggaagaaata

SEQ ID NO: 42017 - DNA, 201 bp, Homo sapiens
agaactaagtgtatgattatctgtgcttactgtagaaatacactggattaattttttccccttaagcaacataatctgtgttgcataaaataaatacagtrcataaaataaatgaactggtggaactcaaattagcagaaaaacagtgacagtgaagcctaaagaaaaattaaaatcttcagcaaatctgtgtctaaggct

SEQ ID NO: 42018 - DNA, 201 bp, Homo sapiens
ctattttctgttggtataactgaatacccaagactgggtaattcattaaaaaaagaaatttacttcttgtagttcaggaagctgagaagtccaaggtggagggcctctacctagctggcttctggtgagggtcgtgtgctgtgtcacagtgtggtagagaagcaaggcaagcaaacatccaaagaaacatgcactagaggc

SEQ ID NO: 42019 - DNA, 201 bp, Homo sapiens
taattttcatgtttactagggtatttgttgagtgctaggctacaataagacatagtctctttttttaaacttatttttcttgcagactctttttgtttaarcttagataaaccttccattttaataaatatggttttttagtttttgtataacattttcaagctgtgctaaggctgaatatttgagcctatttctatatat

SEQ ID NO: 42020 - DNA, 201 bp, Homo sapiens
attagctgatgttggccacacacagaaaaataatattctaggtattttgagagactttttgatgcctcataatcatatttggattgtcctgcatatattcmtaaaaataagaaagtgctatttaagtgattaagtaggaagccaaagaagtagagttaggaataaattgctgtagtgtttctgcacatggaagatattctt

SEQ ID NO: 42021 - DNA, 201 bp, Homo sapiens
gaaagtgctatttaagtgattaagtaggaagccaaagaagtagagttaggaataaattgctgtagtgtttctgcacatggaagatattctttacgtagttkgatatttatattctgtgatatggtatataaaaatgaagtacccatcaataagtttcctataataaaagtgtctgtagttactcaggtaggaataaataaa

SEQ ID NO: 42022 - DNA, 201 bp, Homo sapiens
ttccacatggctggagaggcctcacaatcatggtggaaggcaaggagaagcaagtcacatcttacatggatagcaacaggcaaaaagagagcttgtgcacrgaaactccccttttaaaaccatcagatctcatgagactcattcactatcatgagaacagcacaggaaagatttccccctccccataattcaatcaactcc

SEQ ID NO: 42023 - DNA, 201 bp, Homo sapiens
tgtgatgtatttgacttgggaaaaaataaagattatatgtaactctaaaaccctatcattctaataagttttgtaagaaaatgaaatgccatgctttttgytagaagataattttcaaaaaaaggtaaaatcatgactatcatctagatgtaaaaattagtttaccttaaagattttatttaacttattaacgaggaaacc

SEQ ID NO: 42024 - DNA, 201 bp, Homo sapiens
ctctcatagatattgttttaccaggatgatattatatatactgctttgtcattattgtttcagtgtgtttccccatgagattacccactgatattcttttraggcttttttttttcttcattctcactcctcaaaggctatacaaggtctgatgataatactgtgagaatcagtacaatataaaactaaccacttaatagt

SEQ ID NO: 42025 - DNA, 201 bp, Homo sapiens
aatgtgccacacagacaatgaatattttcttttttaaatggaatttcctatttattaagttgaattccctagaggtgaattttaataatcttcaatttatkaagtatatggttggtacttttggtgcaatatttttaataacagactttttgggttttttccagactattcaaaagttcatctaacacaattgttggagaa

SEQ ID NO: 42026 - DNA, 201 bp, Homo sapiens
aggcaaacaggatctggagtggacctccagcaaactcgagcagacctgcagctgcggagactgaacgttagaaggaaaactaacaaacagaaaggaatagygtcaacttcaacaaaaaggacgtccacacagaaacctcatctgaaggtcaccaatatcaaggaccaaaggtagataaatccatgaagatgaggaaaaacc

SEQ ID NO: 42027 - DNA, 201 bp, Homo sapiens
ttgccagagaggaaaacttttcgttaatatttaggtgtcagattattccatatagaactattttgctaatattatgacagttaaatttccatgtcctctayttctaactcctaacccttggagtaatgagaagctgtgagaaagtgttagtatcaggaggtttcagtacccttgtagctggttcaataaatgtagtttcat

SEQ ID NO: 42028 - DNA, 201 bp, Homo sapiens
aaaacaagttgatggtgattatgttgtgtctgaatggagtgaaattatagaattctgcaccgcaggtaagagaactaggtacaaatatagaaaagctttarttgttctgggaaagctaattatagaaaaatatttcttttttgtaattataaagtgatatatgtgacattggtcattttttgcgttgtcagtagcattgtg

SEQ ID NO: 42029 - DNA, 201 bp, Homo sapiens
aatgataaacgttccaaattccaaatacaatttagctacttcttctagaacttttgttttgcactatgtattgtagaagtatttctttacctatatgtttktttttttttttttttttgaggcagtcttgccctgttgcccaggctggagtgcagtggtgtgatcttggctcactgcaatctttgcttcccaagttcaagc

SEQ ID NO: 42030 - DNA, 201 bp, Homo sapiens
agctcccaccccacacacagaattttatattacttgtgcttttcgtcttttaatcatatatatacacacacacacacacacacatacacacacatatataatatatatatatagaaaaagtatatatatatatatatatatatatatatatatatatatatatatatactttttcttcctcgttgaacaggaaagatttat

SEQ ID NO: 42031 - DNA, 201 bp, Homo sapiens
caaatacaatttagctacttcttctagaacttttgttttgcactatgtattgtagaagtatttctttacctatatgtttttttttttttttttttttgagrcagtcttgccctgttgcccaggctggagtgcagtggtgtgatcttggctcactgcaatctttgcttcccaagttcaagcaattctcctgcctcagcctcc

SEQ ID NO: 42032 - DNA, 201 bp, Homo sapiens
gctcccaccccacacacagaattttatattacttgtgcttttcgtcttttaatcatatatatacacacacacacacacacacatacacacacatatataatatatatatatagaaaaagtatatatatatatatatatatatatatatatatatatatatatatatactttttcttcctcgttgaacaggaaagatttatc

SEQ ID NO: 42033 - DNA, 201 bp, Homo sapiens
tcttgtgaaatgtcaaaaacattatttttaagtaaaaaatgacccctgagaaagaaaagtgtggaatataagaaaacagaaagggggaaaggatttgttaraagtgttttacaaaatatttgcactgactaatgttattatattaattatgtaatttaaggtattgtttaatttattttggtgctagaatttaattgcttt

SEQ ID NO: 42034 - DNA, 201 bp, Homo sapiens
ctcttagctactgtaactaagattttagtttggcttttattgtagcactcaaggaaagatattatgtagaagaaaaattattcattgttttcaaggcaaarctggtgggactaaggagcaatggtgcccagaatatgatcaaaacaaggaagacttcaataagttagatatgttctattacagtatttgccagagcacatc

SEQ ID NO: 42035 - DNA, 201 bp, Homo sapiens
cagtgtttggagacaacttaaatgtatagaagaataggacagtctgagcagaaaaaaataggtagaaagcttcagcatattctgtatatgttaagggtagkgactggaaatggtatataagaaaccaaaaaagaatcatgaggaattcatgatgattgaaatttcaggcaacatggaaagtgatcaggagtaacttcagga

SEQ ID NO: 42036 - DNA, 201 bp, Homo sapiens
tcatggtgataaaagatttaacacagtactttcagtccgagacagctaaaatggacaaaaatgaggaaaacatactaaagaatttaattgatagatcttayaaatctatctctatctacatttatacctatacctttaatccctgatagtagagaatgtaccacatatggaacattcacaaaaataaatcaaatattaatt

SEQ ID NO: 42037 - DNA, 201 bp, Homo sapiens
acccattaactcgtcatttagcattaggtatatttcttaatgctatccctccccccctcccccaaccccacaacagacccaggtgtgtgatgttccccttyctgtgtccatgtgttctcatggtttaattgccacctatgagtgagaatgtgcagtgtttagttttttgtccttgcgatagtttgctgagaatgatggttt

SEQ ID NO: 42038 - DNA, 201 bp, Homo sapiens
ataagtgtgaaagagggagcaagattgagcagtcattattttttctgagttccagttctgtttatgctttcagtgatggatattctctttgctgacatttkccttgttgatatagctttgaaatcttaaatttcaaacattaaatgatgaattgtttgagatttgaccctttttcttcactctccacttggaataccatat

SEQ ID NO: 42039 - DNA, 201 bp, Homo sapiens
gttatgccatgattaggattttggatttattatcttagatttcaaactttctaatttgtggagaacgtttgttttattatataacattgtgtaataagtaraagtagcattttattgtgtaattgtactataattttatacgtacagcatttttcaaatagtcaatcagtggtatagtgggaatttaaattagcagctatg

SEQ ID NO: 42040 - DNA, 201 bp, Homo sapiens
tcagtccataagaaatcaactcattttgacctcttcctctagaaatgaattcctaaatgaacattactttcccatactccaaatgaaaacaccactttctytcttacctcttgttcatattcactaggtagtctaattgtccttaaaactccttttatatctgaagggtttcaggaattcactgagattggtagacatgtg

SEQ ID NO: 42041 - DNA, 201 bp, Homo sapiens
tgtgcagggtagcataatttttactttccattatacctcagtcccacaccttgttgtctgtttatttcaatacctaagatacttatcctcagttcctagcwtactttagttctgaaagttggatatccataattgtagtggtcttaaatctgtaaaacacatatggatgggaaaccactgaataatgtaaataaatatgaa

SEQ ID NO: 42042 - DNA, 201 bp, Homo sapiens
gttcatattcactaggtagtctaattgtccttaaaactccttttatatctgaagggtttcaggaattcactgagattggtagacatgtgtaggaattcctstacctctggtgtcaaattgtatatcctcaaagtgtaggttctagtacatattttctgtttatatatatgttgctgttattatttcatgtaattgcactta

SEQ ID NO: 42043 - DNA, 201 bp, Homo sapiens
ggctacaataagacatagtctctttttttaaacttatttttcttgcagactctttttgtttaagcttagataaaccttccattttaataaatatggttttytagtttttgtataacattttcaagctgtgctaaggctgaatatttgagcctatttctatatattttcttctggtgtaattcagtatatccaatgttaatt

SEQ ID NO: 42044 - DNA, 201 bp, Homo sapiens
tatactacttgttttgctaaaagctttacatatttacattctaatgatcaaatttacagaattgaaattaagcttaaaataatgataaacgttccaaattmcaaatacaatttagctacttcttctagaacttttgttttgcactatgtattgtagaagtatttctttacctatatgtttttttttttttttttttttgag

SEQ ID NO: 42045 - DNA, 201 bp, Homo sapiens
aatctgaaatatctaaacttagaaaacacattaatcagggaatagttattttccctgcaatagtgttctctgtcagttctgcagtgttcttcgttgtttcyttcagaaggatttgacaaaaaggcaaaatggcagtgaaatgtgataccaactaatttgtcttaaaacaacggtttcttaagttatctctgaaatttttat

SEQ ID NO: 42046 - DNA, 201 bp, Homo sapiens
acataaacatacagattcaagctgagaaaaccctaaatgggataaacccaaagaaatccatgccaagatatattacaaactgaaaactgcaggccaaaggaaaaaaaaaaaacattgaaagtggtgagatacaagacaccttatgtataaggaaaaataaaacaatttgaatgacatcatcatcagaaattacctagcaaa

SEQ ID NO: 42047 - DNA, 201 bp, Homo sapiens
ggcatatgcctgtagtcccagccactctgaaggctgaggcaggagaattgcttgaacctgggaggcagaggttgcagtgagccaagatcgtgccactgctytccagcctggcaacagagtgagactctgtctcaaaaaaaaaaaaaaaaaaaaaaaaaaaaaaaaagccaaaacaaaacacaacgcttttgtgccagtata

SEQ ID NO: 42048 - DNA, 201 bp, Homo sapiens
agggggaatttttatagactgtcactgctaggtcatggacttttaaagaaatgtttccttcatttggatgggccctttcattatcaacatgtctatgaaaktatctggcttaaaacacctgatattactttagagcaaaattgattggtcatgtagaaaaataggctcttgaggttttttagagggaacctaaccatataa

SEQ ID NO: 42049 - DNA, 201 bp, Homo sapiens
ccctctttttctgttgatggaaatagtttcagaggaaatggtaccagctcctgcttgtacctctggtagaatttggctgcgaatccatctggtcctggacyttttttggttggtaagctattaattattgcctcaatttcagagcctgttattggtctattcagagattcaacttcttcctggtttagtcttgggagggtg

SEQ ID NO: 42050 - DNA, 201 bp, Homo sapiens
gttagttcttcttgttgaattgatccctttaccattatgtaatggccttctttgtctcttttgatctttgttggtttaaagtctattttatccgagactargattgcaacccctgcctttttttgttttccatttgcttggtagatcttcctccatccctttattttgagcctatgtgtgtctctgcacgtgagatgggtt

SEQ ID NO: 42051 - DNA, 201 bp, Homo sapiens
aataatgataaacgttccaaattccaaatacaatttagctacttcttctagaacttttgttttgcactatgtattgtagaagtatttctttacctatatgtttttttttttttttttttttgaggcagtcttgccctgttgcccaggctggagtgcagtggtgtgatcttggctcactgcaatctttgcttcccaagttca

SEQ ID NO: 42052 - DNA, 201 bp, Homo sapiens
tttaagttctagggtacacgtgcacaacgtgctggtttcttacatatgtatacatgtgccatgttggtgtgctgcacccgttaactcatcatttacattaygtatatctcctaatgctatccctcccccctacccccaccccatgacaggcccagtgagtgatgttccccttcctgtgtccaagtgttctcattgttcaat

SEQ ID NO: 42053 - DNA, 201 bp, Homo sapiens
ccccctacccccaccccatgacaggcccagtgagtgatgttccccttcctgtgtccaagtgttctcattgttcaattcccacctatgagtgagaacatgcrgtgtttggtttttttgtccttgcgatagttttctgagaatgatggtttccagcttcatccatgtccctacaaaggacatgaactcatcattttttatggc

SEQ ID NO: 42054 - DNA, 201 bp, Homo sapiens
tgaactagtttacagtcccactaacagtgtaaaagtgttcctatttctccacatcctctccagcacctattgtttcctgactttttaatgatcgccattctaactggtgtgagatggtatctcattgtggttttgatttgcatttctctgatgaccagtgatgatgagagttttttcatgtgtctgttggctgcataaatg

SEQ ID NO: 42055 - DNA, 201 bp, Homo sapiens
attttgtctctgccaggctttggtatcaggatggtgctggcctcataaaatgagttagggaggattccccctttttctactgatcggaatagtttcagaargaatggtaccagctcctccttgtacctctggtagaattcggctgtgaatccatctggtcctggactttttttggttggtaagctattatttactgcctca

SEQ ID NO: 42056 - DNA, 201 bp, Homo sapiens
taggcagtaatagaccaggtataaggaatcactccaacgaaggcttagtagtgactggggttagggtaagattgagagttagatgagattatgttagagaygaaaatatgccaggtcttgaaggactagtttaaaatattatcccaaaggagtgggggttgaaaaattacccaccgggtacaatgtctaatatttcagtaa

SEQ ID NO: 42057 - DNA, 201 bp, Homo sapiens
tagtttgtatttctgtgggatcggcagtgatatcccctttatcattttttattgtgtctatttgattcttctctcttttcttctttattagtcttgctagyggtctatccattttgttgatcttttcaaaaaaccagctcctggattcattgatatttcgaagggttttttgtgtctctatctccttcagttctgctctga

SEQ ID NO: 42058 - DNA, 201 bp, Homo sapiens
gagtggttttgagtgagtttcttaatcctgagttctagtttgattgcactgtggtctgagagacaatttgttataatttctgttattttacatttgctgargagagctttacttccaactatgtggtcaattttggaataggtgtgatgtggtgctgagaagaatgtatattctgttgatttggggtggagagttctgtag

SEQ ID NO: 42059 - DNA, 201 bp, Homo sapiens
aatgtaaaaataataaggtgatctcaactcatgtctagtgatttgtaatgggagtcagttactagggatagtagtcaaaactttggtgattataatcaggracatgagctccagccacagaatgtacagcaaagagccaagggctgagattttgggaatgcccactattgaattgtagaagaaaaataatgttgtgtaagt

SEQ ID NO: 42060 - DNA, 201 bp, Homo sapiens
aaataaatagataaaaacacctagaaattatggaactgctgtaaatgaaataaataaggaatttatggagaatgtcagtagtaatgggacaaatttactaraatatgtgaatattctagaaggcttctctaagtagtaatagttaagctgaggctaaagggtggaaggagtagctttttaaaaactagaggtaaagcatta

SEQ ID NO: 42061 - DNA, 201 bp, Homo sapiens
ctgctaggtcatggacttttaaagaaatgtttccttcatttggatgggccctttcattatcaacatgtctatgaaagtatctggcttaaaacacctgataytactttagagcaaaattgattggtcatgtagaaaaataggctcttgaggttttttagagggaacctaaccatataaaactaacatgtcatagattagaaa

SEQ ID NO: 42062 - DNA, 201 bp, Homo sapiens
taagttttcagtacctgtcttccctgttaagaaaccttaaaccttaattcaaatgcaacatatatatggactttcatgaacctctttttagggtcatttgkttttggcatctgttaccctgttgtgcaaaacttcacctggctgactagtaagctctactttttttttcctacattttgtgagttttctttccaaaatttc

SEQ ID NO: 42063 - DNA, 201 bp, Homo sapiens
caattccagggcctactttcctttacatttggtcttaaaatgttgctacctgttttcattgacatctaccttatctccaaactattttgtgctcctcttayatattatttatattcattactttttattttaacctaggtcaaataatgaagtttcatttgtgtgtttttattgccagctactcagggttgtgcttgaggc

SEQ ID NO: 42064 - DNA, 201 bp, Homo sapiens
aacattcctttcttttggatatcgggaggatcctctggaataagagtcttatgacctacttcagaggaaaattagagcattttttcatggactgcttcagsggagtaaggtgggagaagatcaatgtgaccttcttacttctgctatttcttccagtgtcaaggtgccatactttaggtagcatgttctaaacctcatcgg

SEQ ID NO: 42065 - DNA, 201 bp, Homo sapiens
tctttttgtcattaactctaattaagacacatttccttgattaaaatccattttaaatatcatcttgttattcagaatgcttgaatagaaaggaaactttyaattactggatacactttccaaagtttataatccattttgaattatgaaaaactggataaatacttactcagtccataagaaatcaactcattttgacct

SEQ ID NO: 42066 - DNA, 201 bp, Homo sapiens
caagtttctgaaaactttatataaagaactattataagtaaaacaaacaaagtataaagtatgttttcagcatgtagaaatattaaatttaaaatcttctrtcctgctaggagactagaccttaagttaacactaaaatattatgaaaattgatgactgctgccatttaaattctgtgttactattagggtagatggtatt

SEQ ID NO: 42067 - DNA, 201 bp, Homo sapiens
ggttttgagtgagtttcttaatcctgagttctagtttgattgcactgtggtctgagagacaatttgttataatttctgttattttacatttgctgaagagwgctttacttccaactatgtggtcaattttggaataggtgtgatgtggtgctgagaagaatgtatattctgttgatttggggtggagagttctgtagatgt

SEQ ID NO: 42068 - DNA, 201 bp, Homo sapiens
cagctcatctcattgggactggttagacagtgggtgcagccaacagagggccagccaaagcagggtggggcgttgcctcacctgggaagcgcaaggggtcwggcaactccctcccctagccaaaggaagccatgagggactgtgccatgaggaccagtgcactccggcccccatactacacttttcccacagtcttcgcaa

SEQ ID NO: 42069 - DNA, 201 bp, Homo sapiens
ggtaataacaaactcctttgagctaaaggagcgtgttctaatccaatgcaaggaagctaagaaccttgaaaaaaggttagaggaattgctaactagaatamccagtttagagaagaacagaaatgacctgatggatctgaaaaacacagcacaagaactttgtgaagcatacacaagtatcaatagccgaattgatcaagc

SEQ ID NO: 42070 - DNA, 201 bp, Homo sapiens
tgccttacaaaagcttctgaaggaagcactaaacatggaagggagcaaccggtaccagccactgcaaaaacatgccaaattgtaaagaccatcgatgctaygaagaaactgcatcaactaacaggcaaaataaccagctaacatcacaaagacaggatcaaattcacacataacaatattaaccttaaatgtaaatgggct

SEQ ID NO: 42071 - DNA, 201 bp, Homo sapiens
caagttaaataaagttatattttatcatgtaatgagtctgtgtatgatgacttttaacagaacccttttttgtgggagctttaaatttctcctgtcagtcraactagaattattttaaaaagaaagaggaggagaatttcagagtcctggattagtgcaaatttagtttggtttcattcccatgtcaactaggataactca

SEQ ID NO: 42072 - DNA, 201 bp, Homo sapiens
gtgtggtattacacgtgtgagccaccgcgcccggccaagtacactgtcaacattttttatgcaggggtatgagatgaaaaaagttttaagaatagatttgkattatattctatttttgtacgtcttgctttacacagcaaggtatatctgtaataaataaatccacccaatgtattcaaagatggatttcattacacaatt

SEQ ID NO: 42073 - DNA, 201 bp, Homo sapiens
actaggataactcaaggaccagattctcagtttatgttgattttgttcccttttgtgtgtatgtcctttttattttaagtgtgaccttttaacattggctktaatctgagatttttttttcttaacatattacttattgccaacattggtagggagtgccatctccactatgcttttagtcatatctttatatttttatgc

SEQ ID NO: 42074 - DNA, 201 bp, Homo sapiens
tttcaaaatagtacaaaattactaattgctattgtttgagtgttttttgcctttccttttcccaaggccattataaggatttcacttgatttcttccctgytcttaacttttgaaaagctttaagctagaagtaatttggggattctatgcgacctgatggggaggaaagtaaaggtgaagtagtttttccaggagttttg

SEQ ID NO: 42075 - DNA, 201 bp, Homo sapiens
tcctattatttggagttctcgtgattggcatcgctgcttcaaaggtctttctaatctctggatctctgcaaactgactcttaatggtgtaacccaacgtartctaactgagtctgtttttacagtagccagctagaaattctggaaattctagaaattctggaaattctggaaattgcctagttctggaagtccaacaaac

SEQ ID NO: 42076 - DNA, 201 bp, Homo sapiens
aagggaatgtagaaaaaaatggggtaaaatttgattctaatatgtctttcctatatgtaaaacaaacttgacatgtttgtattttctttttgtcctatgakccatcaaatcctgctctatactgttagccaaattgttagcattttccctaagtggaagtgtaatctttaaagtaactagttgtcatataaattcttcaag

SEQ ID NO: 42077 - DNA, 201 bp, Homo sapiens
tcttgttattcagaatgcttgaatagaaaggaaactttcaattactggatacactttccaaagtttataatccattttgaattatgaaaaactggataaatacttactcagtccataagaaatcaactcattttgacctcttcctctagaaatgaattcctaaatgaacattactttcccatactccaaatgaaaacacca

SEQ ID NO: 42078 - DNA, 201 bp, Homo sapiens
tggatgtctgaataccaccttaatttgtataaatagatctaagtaaagaaattgtctaattattacagagaaacattaataatcaattatgtaattttccrtagttttgcatattccattttggctaataagagtgctttgaggccgggcacagtggctcacgcctgtaatcccagcactttgagaggccgaggcgggcgg

SEQ ID NO: 42079 - DNA, 201 bp, Homo sapiens
aatgtgctgatcaattttttaagcagtgatatgaatacaaatagagcctcaattttagagaaaacattactatgcaatagatcctctagtgtttaaaagcrtatttgataaaaatgggaataaaataaaatgactaatttgtcaataactattatgtatatatttttaagatgcaaatttttgaatttctagtgcagaaaa

SEQ ID NO: 42080 - DNA, 201 bp, Homo sapiens
gtctatgaaagtatctggcttaaaacacctgatattactttagagcaaaattgattggtcatgtagaaaaataggctcttgaggttttttagagggaaccyaaccatataaaactaacatgtcatagattagaaagatagagtgtcagtgtttttgtgttcactctgtgaaaacaaattggaaacataaatggaaaaagta

SEQ ID NO: 42081 - DNA, 201 bp, Homo sapiens
gtattcatatgtatcttacactctggtgggaaaaacagataacgatataaataaatagataaaaacacctagaaattatggaactgctgtaaatgaaatarataaggaatttatggagaatgtcagtagtaatgggacaaatttactagaatatgtgaatattctagaaggcttctctaagtagtaatagttaagctgagg

SEQ ID NO: 42082 - DNA, 201 bp, Homo sapiens
ggtatgctgccagcatacaccttggactaagatcagacttttatactctattcattcattgctactttccagttgaccgtccaaagaaaaatttctaacgktaataatatacgtatacttgacatcagacccaaagttgccagtggcattgctcggagtcatccaagtccctgagctaaggatttgggggttctaactagc

SEQ ID NO: 42083 - DNA, 201 bp, Homo sapiens
aaattttataaattaattggcagacatactctgtatatggttccaaaatatggcttttgcttaataatttgtagaagactatttagaatgtataaggagcyggtaaatatatttggataaaagggctttcttaaaaaaaaaaatctaatctcattttctccaatgcactttcttcagtgctgccagagtgatcctctaatg

SEQ ID NO: 42084 - DNA, 201 bp, Homo sapiens
atgcagtttggtagttcagagtcaactgaaacatttggataattcattatgagactttatgaatcaaatgaataataactaaaatttattttaccagatcwtcaagtggtatttttagaaacatagaagtaatgtcctatttctgaagtcagggagtagactggttcctttacttaagcattcatttattcagtaaatatt

SEQ ID NO: 42085 - DNA, 201 bp, Homo sapiens
tataagttttgccttgtagaatgtgcctccttcttggatttattttccatttctgttatattgctgtatgtgaatctttttatcctttattaattaaattctatttttactataaaacctatacctcctttttaaactttaaaatatttcattattagcattattattattgagacggagtttcgctctttcacccaggct

SEQ ID NO: 42086 - DNA, 201 bp, Homo sapiens
agtcatcaggaaaggcatttgggaggttgggcttgagattaccttcaaagaataggttaaaatagggctggattcatatattcatttaaaaaacatttttsagtgatcttggtctgatatagtttgagggactctctttagaaaaaagaatacataattataaatattgagtgatcttggtctgatatagtttgagggact

SEQ ID NO: 42087 - DNA, 201 bp, Homo sapiens
aaccataacaaaaatatttttgtaggaagaaaaatgtgccacacagacaatgaatattttcttttttaaatggaatttcctatttattaagttgaattccytagaggtgaattttaataatcttcaatttattaagtatatggttggtacttttggtgcaatatttttaataacagactttttgggttttttccagactat

SEQ ID NO: 42088 - DNA, 201 bp, Homo sapiens; identical to SEQ ID NO: 6699

SEQ ID NO: 42089 - DNA, 201 bp, Homo sapiens
aaggaaaaatttgaagcattagagtaacattgtcttcacatgaatggttgggaggagaatttcaacaattattgttcagataattaaacctcaaataactkttgctgaatgacttgggtaatttagatatgtgtgtctgtgcttccttattctgaatgataccacttttataccattttggtgtgcttatacagctttgag

SEQ ID NO: 42090 - DNA, 201 bp, Homo sapiens
gagaaaaagggaacaactttgagttgacatcagtaaggacagatataattttccctaaggcaggtttagaatcatgtagtaatttcacttcaaatgtatartttcctcagagtttctagttaactacatggtattaaacacaaaatacaggtccctactgaagtcatgtaaaaataacaaagggacaggtacatgaaaaag

SEQ ID NO: 42091 - DNA, 201 bp, Homo sapiens
gagtctgtgtatgatgacttttaacagaacccttttttgtgggagctttaaatttctcctgtcagtcgaactagaattattttaaaaagaaagaggaggaraatttcagagtcctggattagtgcaaatttagtttggtttcattcccatgtcaactaggataactcaaggaccagattctcagtttatgttgattttgtt

SEQ ID NO: 42092 - DNA, 201 bp, Homo sapiens; identical to SEQ ID NO: 6700

SEQ ID NO: 42093 - DNA, 201 bp, Homo sapiens; identical to SEQ ID NO: 6702

SEQ ID NO: 42094 - DNA, 201 bp, Homo sapiens
gttgtcacccacctgtctcatagtgtttataagtggcctgctgggagtgagtgctccctctgttccctccctggaatgtgtctattaaatgcatgtgtcayctgtttggtgtctggccctctgtttggaatggtgactgacccaaagcaattctcctcctctcccaggcctgctcccagcatggggatcacacaaccagtg

SEQ ID NO: 42095 - DNA, 201 bp, Homo sapiens
tttaatcatgtatacctagaagcgggaacctgagctattcagcactttcaagaaccccacagatcttgactctggcaggggatctccttttgtcagggaarggtgtaggtttcacttcagtctgctggaggagacagggtgtaattattgctcttaaattcacatgtcctggatatgcaccattagattgagaactacctg

SEQ ID NO: 42096 - DNA, 201 bp, Homo sapiens; identical to SEQ ID NO: 6704

SEQ ID NO: 42097 - DNA, 201 bp, Homo sapiens
ctccacacctatatacaataagctcagccctggctcagtgcatgacaatggtcccttgttgagagacaaatcttattataggacaggcccttctttccagytgatgccagtatatgattacttttaatttccttaaggcatctaactagtttaaaccaaaaattgtatttctgagattatagattttgctcctgtgaacct

SEQ ID NO: 42098 - DNA, 201 bp, Homo sapiens
cccccatatctcctccctgtttccccagcactggtgtttggagggctaccaaaattcatgggcacagttggtctggatgcacgctctgtgaccaggaactmcccagggaccttgatcaaatcaccgtctcactcctagaactcaccatgttccttccctgacccagggtcttcatgcaggctgtttcctttgtctggaatg

SEQ ID NO: 42099 - DNA, 201 bp, Homo sapiens
gttggtctggatgcacgctctgtgaccaggaactacccagggaccttgatcaaatcaccgtctcactcctagaactcaccatgttccttccctgacccagrgtcttcatgcaggctgtttcctttgtctggaatgttctcccccacaactggtcacttaggtccctccttctcatccttcagaccacagttcaagcatctc

SEQ ID NO: 42100 - DNA, 201 bp, Homo sapiens
gctccagtaggttctggaaggggaggaggaagccattccagcctaagaggctgcctggagctgcagctcaggaacacaggcagtgatctcactaagcaggrgacattggaaggaggcaaactgctggctgacgagaccaccccctccccacccaaggactccagggcacaggccctcacactcccagctgtcttctcgctt

SEQ ID NO: 42101 - DNA, 201 bp, Homo sapiens
aagctgaactgaggaacatgcaggatgttgtggaagatttcaaagtcaggtaagtgggagactggcttctggccacacacagccatctgaaggctcctttrtgtgaggaccagagaggtgcaaaggagcaaatgccgatatcagccgggagctttggaactgcagcctttatcctgcaaggtggagacagcactgtgtggg

SEQ ID NO: 42102 - DNA, 201 bp, Homo sapiens
gggctgcagactcaaaggagcatcctgcgctgtcattccaggacgtagatgctgcctatatgaacaaggtggagctggaagccaaggtcaaatctctgccygaggagatcaacttcatccactcagtctttgatgcagtaagagtctgcaagtatttctgtctctcctaggtctggagcctggaaagaaaaggatgatgca

SEQ ID NO: 42103 - DNA, 201 bp, Homo sapiens
ctggacgtggagatcgccacctaccgcaagctgctggaaggcgaggagtgcaggtgaggcagatgcaccaacttcatcctcaaagcaagttgagctcaccycagcttcctgggcattcctaggggctcgggctgttgcagccccttcttctcctggaagaaaatgcagttcagaattgggctatggcaaaaaaataatttt

SEQ ID NO: 42104 - DNA, 201 bp, Homo sapiens
ccagagtctcctgactcctcttcacctgcaaatcgaccccaccatccagcgggtgcgggccgaggagcgcgagcagatcaagaccctcaacaataagttcrcctccttcatcgacaaggtaagcaggggcttcatccacccccttgggtttgggatcaaataaactcttggaagggccatcccatggggggagagcaataa

SEQ ID NO: 42105 - DNA, 201 bp, Homo sapiens; identical to SEQ ID NO: 6708

SEQ ID NO: 42106 - DNA, 201 bp, Homo sapiens; identical to SEQ ID NO: 6711

SEQ ID NO: 42107 - DNA, 201 bp, Homo sapiens
atcgccgaggtcaaagcacaatacgaggacattgccaaccgcagccgggctgaggctgagtcctggtaccagaccaaggtgagcatggacacctccatgakaggttccagggttagtgttctctgaggctccacattatcacttaactcagcctcaggaaacgtgtgagcacattcgtttatttcaacttagcaggcatgt

SEQ ID NO: 42108 - DNA, 201 bp, Homo sapiens
gcccatgtttgatgtccacatcgacaacatgaagcagcagctggactgcctgggtggagggtatgtgaagttggatgtggagttaaagaacatccaggacrtggtaggggacttcaagaacaagtgagcagacgctcagccagtgcctgggccagggtcctgccctggggctccaggggaggtcagagggggcaggagaaa

SEQ ID NO: 42109 - DNA, 201 bp, Homo sapiens; identical to SEQ ID NO: 6712

SEQ ID NO: 42110 - DNA, 201 bp, Homo sapiens
gcttcagggggaatgagtgaatgaccaggaatgaatgagcctgcttgtggcacccagggtgggtctgtgtgcacagcgagtgcctgggccaggcatttgaytcagtgactgggtttgctctggttctctcagtacgaggagctgcaggtcaccgcaggcagacatggggatgaccttcgaaacaccaaacaagagatctct

SEQ ID NO: 42111 - DNA, 201 bp, Homo sapiens
atgctaattcagttaatgtctatgtcccccaataaactgtaagcttcagggggaatgagtgaatgaccaggaatgaatgagcctgcttgtggcacccaggrtgggtctgtgtgcacagcgagtgcctgggccaggcatttgactcagtgactgggtttgctctggttctctcagtacgaggagctgcaggtcaccgcaggc

SEQ ID NO: 42112 - DNA, 201 bp, Homo sapiens
atgataggttccagggttagtgttctctgaggctccacattatcacttaactcagcctcaggaaacgtgtgagcacattcgtttatttcaacttagcaggmatgtctttgatgctatgacaacttagcttgaaatgcatgtggaaaccgaaccagacacactaatacatggtcagcccaatgctgggagctcaggacatcc

SEQ ID NO: 42113 - DNA, 201 bp, Homo sapiens
caggcagtaggtgctgagaaaatgcttagggaataggaagcaccccaaggaaacagtgaagtgtagtggcttgtattaacacaagatgtttggacaggacrgagttggtcccaggcctaagaaagcggtttagaaatgaggcagtgtttgctgagtcctttacaagatgcatcattagcacatgacggaaagcaattaact

SEQ ID NO: 42114 - DNA, 201 bp, Homo sapiens
gaaagattttcaccacactgatcttttgggatgaatgggaatacctagggaatagctgggagaatctgccaggaataccaaggaaaggattcctgacctarttgggtagttaaccacgaagatttaagattcttcatcttatgccttggtgatgctgagtttactgccctgcaggagctgtcccagttgcagacccaggtc

SEQ ID NO: 42115 - DNA, 201 bp, Homo sapiens
gaggtcatatggctgatgggcagagcagctgagatcaaaaccacagctgtctagcaccacgagggtggggtgtgctgatgcacccaagtaggttgggtggrgaatgggtcacctggaacagaagcaaaacttccttcccagagatcagtgagcaggaggcacctccacatgcccctgggggacagacagggtggggttgct

SEQ ID NO: 42116 - DNA, 201 bp, Homo sapiens
agtcctgggccttcctgcttggtggccagggccagaacagggttgtcctcacaatgtgaggtgatgcaggagacctttcaatgtggcaccagagctgatgrgcaggtgggcacccctgaaggccctggtcttcacagagtttggaagttctactccctccctcctctccaagttctaagttctactccatggcctggagta

SEQ ID NO: 42117 - DNA, 201 bp, Homo sapiens
agtgccccgcccccacaggatgctcataaaagccacgagaccagggctctccagccacctgtcttctccactgcctgtaccagcccacctcaggtgccttytcgccggccttcctcacccaccatgtctcggcagtcctccatcaccttccagtctggcagccgcaggggcttcagcaccacctcggccatcaccccggca

SEQ ID NO: 42118 - DNA, 201 bp, Homo sapiens
cctcacactcccagctgtcttctcgcttgcacttgatctgaccacacctcctctcttcccggcagctgtggtcacctctactctttccagtggctatggamgcggcagcagcattggaggtggaaacctgggcctcggtgggggcagcggctactccttcaccaccagtggtgggcatagcctgggtgcaggcctgggagg

SEQ ID NO: 42119 - DNA, 201 bp, Homo sapiens
taggagtgtctaactctgcctctccaacttctcaaggtttcattctctcttcttccctccaggtgaggttcttggagcagcagaacaaggtcctggagacyaagtgggccctcctgcaggagcagggctccaggactgtgaggcagaacctagagcccctctttgattcctataccagtgagctccgacggcagctggaaa

SEQ ID NO: 42120 - DNA, 201 bp, Homo sapiens
ttctgggcctttctgccatctttaagaactcctccccaagaagcaccacacctccatgggctgtcagcaggactcatggcttcctcctgtccttacagtgytccagcttgcaaacggccattgctgatgcagagcagcggggagaactggctctcaaggatgcacgggccaagctggtggaccttgaggaggccctgcaga

SEQ ID NO: 42121 - DNA, 201 bp, Homo sapiens
agacagcactgtgtggggtagcacaaggaccttcatcttgtgtattgctatgaagatcctattcctatttgttcacatgactgcaaagggatatcaacatyatccgacaaaatattgctactcactctagaaatcataatgtaatttcacagtcagcatattgtttaattccattggacatgggctcaattattgagatgg

SEQ ID NO: 42122 - DNA, 201 bp, Homo sapiens
aaagattttcaccacactgatcttttgggatgaatgggaatacctagggaatagctgggagaatctgccaggaataccaaggaaaggattcctgacctagwtgggtagttaaccacgaagatttaagattcttcatcttatgccttggtgatgctgagtttactgccctgcaggagctgtcccagttgcagacccaggtcg

SEQ ID NO: 42123 - DNA, 201 bp, Homo sapiens
ggaaacagtgaagtgtagtggcttgtattaacacaagatgtttggacaggacggagttggtcccaggcctaagaaagcggtttagaaatgaggcagtgttygctgagtcctttacaagatgcatcattagcacatgacggaaagcaattaacttgcttcttactcatatgctgatcaagttgcaactggaaaggagtttgc

SEQ ID NO: 42124 - DNA, 201 bp, Homo sapiens
ccgtggtgctgtccatggacaacaaccgcaacctggacctggatagtatcatcgccgaggtcaaagcacaatacgaggacattgccaaccgcagccgggcygaggctgagtcctggtaccagaccaaggtgagcatggacacctccatgataggttccagggttagtgttctctgaggctccacattatcacttaactcag

SEQ ID NO: 42125 - DNA, 201 bp, Homo sapiens
cgctttcagctcggacttcccatcaggtgacaaacacccccaagcctccacagcaaccaccagaccctgtgacactggggaggtttcagcagcatcccgcrgcgtgccaggatcaccagcccctgagcctgcacccacaggctggaactccatgccagtgttcaccaggctggtttctaggtcctgcgctcctcagttcag

SEQ ID NO: 42126 - DNA, 201 bp, Homo sapiens
gtgggtttaaaagatcctggccacatctcctacctcccagaattccctgcctttttgttggggctgcaagcctagcacagaggtgagcacttgatgtagaygggatttatgaaaattcctggtctggcttggacctttgaagggagccttcatgctgtggacaagagcattgccaactaggcagcttctctcctaaacagt

SEQ ID NO: 42127 - DNA, 201 bp, Homo sapiens; identical to SEQ ID NO: 6705

SEQ ID NO: 42128 - DNA, 201 bp, Homo sapiens
tgacagcgtcaagaagcaggtaaagatttggcagggccaagagctcctcaaatgctcatttcttctgggcctttctgccatctttaagaactcctccccargaagcaccacacctccatgggctgtcagcaggactcatggcttcctcctgtccttacagtgctccagcttgcaaacggccattgctgatgcagagcagcg

SEQ ID NO: 42129 - DNA, 201 bp, Homo sapiens
accgcatgatccagaggctgagagctgagattgacagcgtcaagaagcaggtaaagatttggcagggccaagagctcctcaaatgctcatttcttctgggsctttctgccatctttaagaactcctccccaagaagcaccacacctccatgggctgtcagcaggactcatggcttcctcctgtccttacagtgctccagct

SEQ ID NO: 42130 - DNA, 201 bp, Homo sapiens
tttgactcagtgactgggtttgctctggttctctcagtacgaggagctgcaggtcaccgcaggcagacatggggatgaccttcgaaacaccaaacaagagrtctctgaaatgaaccgcatgatccagaggctgagagctgagattgacagcgtcaagaagcaggtaaagatttggcagggccaagagctcctcaaatgctc

SEQ ID NO: 42131 - DNA, 201 bp, Homo sapiens
agagcagcggggagaactggctctcaaggatgcacgggccaagctggtggaccttgaggaggccctgcagaaggccaagcaggacatggctcggctcctgygtgagtaccaggagctgatgaacatcaagctggccctggacgtggagatcgccacctaccgcaagctgctggaaggcgaggagtgcaggtgaggcagatg

SEQ ID NO: 42132 - DNA, 201 bp, Homo sapiens
ataaactgcaaacagagaacccaagctctgggaggccatgaagtgaatggacaatcatggaagggaaaagatagcatgaataaaaagcttccaggaagacrtgggggctttgtacagttgggaagccatgagggacaaaagattgctgaggagtggggagaggtttaaggctgaacaaggagctggcaggcaagaacaagc

SEQ ID NO: 42133 - DNA, 201 bp, Homo sapiens
ggatgtttctctcaaaggagaaggtttaaaatggaatctggagtgtggggtaacctgacctctgacccttgggccacccaagaaatgtcacatcaaccttsagaatatctgcagagttcaaacctcccaacatgttccctctacgttgatggccccattagccctacttgggtttctgtgagctcagggaattcaagcccc

SEQ ID NO: 42134 - DNA, 201 bp, Homo sapiens
caatggtcccttgttgagagacaaatcttattataggacaggcccttctttccagttgatgccagtatatgattacttttaatttccttaaggcatctaastagtttaaaccaaaaattgtatttctgagattatagattttgctcctgtgaacctcaaactccaccttattttattcattagattattaatattatcttt

SEQ ID NO: 42135 - DNA, 201 bp, Homo sapiens
tttgagggctcttaactcttgctacaccagcctggaaagagttcaatgcagacttgctcaacagcacaccccccgctctgtccttataggtacgaagatgraattaacaagcgcacagctgctgagaatgaatttgtagccctgaaaaaggtgagtggggatgtttctctcaaaggagaaggtttaaaatggaatctggag

SEQ ID NO: 42136 - DNA, 201 bp, Homo sapiens; identical to SEQ ID NO: 6715

SEQ ID NO: 42137 - DNA, 201 bp, Homo sapiens; identical to SEQ ID NO: 6714

SEQ ID NO: 42138 - DNA, 201 bp, Homo sapiens
ttatggagggagaaatagaggttaaatgaatcacccaaagtcatgcccaggtcagcagaagagctggaaatgatttgagggctcttaactcttgctacacyagcctggaaagagttcaatgcagacttgctcaacagcacaccccccgctctgtccttataggtacgaagatgaaattaacaagcgcacagctgctgagaa

SEQ ID NO: 42139 - DNA, 201 bp, Homo sapiens
gtcctggagaccaagtgggccctcctgcaggagcagggctccaggactgtgaggcagaacctagagcccctctttgattcctataccagtgagctccgacrgcagctggaaagcatcaccaccgagaggggcaggcttgaagctgaactgaggaacatgcaggatgttgtggaagatttcaaagtcaggtaagtgggagac

SEQ ID NO: 42140 - DNA, 201 bp, Homo sapiens
caaggtcctggagaccaagtgggccctcctgcaggagcagggctccaggactgtgaggcagaacctagagcccctctttgattcctataccagtgagctcygacggcagctggaaagcatcaccaccgagaggggcaggcttgaagctgaactgaggaacatgcaggatgttgtggaagatttcaaagtcaggtaagtggg

SEQ ID NO: 42141 - DNA, 201 bp, Homo sapiens
cgtggtgctgtccatggacaacaaccgcaacctggacctggatagtatcatcgccgaggtcaaagcacaatacgaggacattgccaaccgcagccgggctraggctgagtcctggtaccagaccaaggtgagcatggacacctccatgataggttccagggttagtgttctctgaggctccacattatcacttaactcagc

SEQ ID NO: 42142 - DNA, 201 bp, Homo sapiens
tgggctcacccagagtggggcagtcgatgtgggcttggagggagtgagttcaatgctcaggaactgatgtgagctacttgggacagggttctaaaacaccyttgtccagggtgaaggagcaggaagtgaagtcgggggagagggaggccgtgaatcaggagggaagatgagtgtaaaaccaggggctaaaatttggagtgg

SEQ ID NO: 42143 - DNA, 201 bp, Homo sapiens
cacatccgtggtgctgtccatggacaacaaccgcaacctggacctggatagtatcatcgccgaggtcaaagcacaatacgaggacattgccaaccgcagcygggctgaggctgagtcctggtaccagaccaaggtgagcatggacacctccatgataggttccagggttagtgttctctgaggctccacattatcacttaa

SEQ ID NO: 42144 - DNA, 201 bp, Homo sapiens
cggtgacacatccgtggtgctgtccatggacaacaaccgcaacctggacctggatagtatcatcgccgaggtcaaagcacaatacgaggacattgccaacygcagccgggctgaggctgagtcctggtaccagaccaaggtgagcatggacacctccatgataggttccagggttagtgttctctgaggctccacattatc

SEQ ID NO: 42145 - DNA, 201 bp, Homo sapiens
agatcaagaccctcaacaataagttcgcctccttcatcgacaaggtaagcaggggcttcatccacccccttgggtttgggatcaaataaactcttggaagrgccatcccatggggggagagcaataatgcaatgaccccactgtgggaatgagcactgttcagcacgggctcccaggggctgagacccttccaagtcaggc

SEQ ID NO: 42146 - DNA, 201 bp, Homo sapiens
caggggatctccttttgtcagggaaaggtgtaggtttcacttcagtctgctggaggagacagggtgtaattattgctcttaaattcacatgtcctggataygcaccattagattgagaactacctgagattgggaatacttttacaaagtcttcaaaattgtgccttccacagcctctgcaccatcccacaccattccccc

SEQ ID NO: 42147 - DNA, 201 bp, Homo sapiens
gagatcgccacttatcgcaaactgctggagggtgaggagatccggtgaggacaggggctccagggtcccttcaggttcctactcagagctggactgaaatmttccaggcagagaatgttcaaactgggaaagactctagaaatcatggactccaaccatgtccccattttgcagatagggaaactgacatcagagagggga

SEQ ID NO: 42148 - DNA, 201 bp, Homo sapiens
atgaactccaagctgggcttggacgtggagatcgccacttatcgcaaactgctggagggtgaggagatccggtgaggacaggggctccagggtcccttcasgttcctactcagagctggactgaaatattccaggcagagaatgttcaaactgggaaagactctagaaatcatggactccaaccatgtccccattttgcag

SEQ ID NO: 42149 - DNA, 201 bp, Homo sapiens
gtagtagagtatacaggtgaagagcacaggccatgagcccactctgggttcaaatcccagctctgccacttattagcatgtgacctctttgtacctcagcrtcttcagctgtaaaacagagataatcacaaaatccaccttgtaaggctgttgcaggattaagtgagttttaatggaacatagtaagccccagtaggagga

SEQ ID NO: 42150 - DNA, 201 bp, Homo sapiens
tcgctgctgccaatacagaaaataagaaaacaaaagcattcagagccactcaactcagagatagctgtcgccagcattgtggtttgacaggcaccaccacrggcactgtgggttccttgaaagggcacagtcgtaaggctgtggcaatgccagactgagtggcaggaaaccgagccagatgtgtacatcctcactcaaaag

SEQ ID NO: 42151 - DNA, 201 bp, Homo sapiens
tgagctgatgtctctgggatccagacaaactgatgacctcaaatatttgaccatacatggatccatctggaacacccatgaagtctaagttaatgaatggkgcaaattctgaacccctatttggttctgcaaaaatagcttaagccttttagttacacacagaatactactcaagtggtagcatgttctagtaagaaaaaa

SEQ ID NO: 42152 - DNA, 201 bp, Homo sapiens
catttgcataatgggaacaataatgcctgtagtgacaagcttgcagaataactttgaaggtcaaataagataacatctatgaaagtaccttgtaaacgaayaacggtatatacaagtataaggtaatatcactaataatgatcattcctatttcagtgctaacatttcctccctctaatggctcacctgccaaactcaagt

SEQ ID NO: 42153 - DNA, 201 bp, Homo sapiens
gttctgcaaaaatagcttaagccttttagttacacacagaatactactcaagtggtagcatgttctagtaagaaaaaaagctaggtttatattctgatcaygtgggtctctgcaggcaacttgtaaatctctatctaataatccaatgtacacacagcccctgggccaggtgtctgattcccatccctccattcccctcac

SEQ ID NO: 42154 - DNA, 201 bp, Homo sapiens
ttttgccacaagaatgcatatctgatctcatgacatagaaaagtctttaaaaggttttttttttcttttcttttccatggtgctcacgcacattgccaaamcttctggtaccagctccggacctgccaaggcaatggcttggcaccccggcctaggggtggagtctgggggagcagggcctggccttttgactacctgcgg

SEQ ID NO: 42155 - DNA, 201 bp, Homo sapiens
ctgagtaatgaaatatgcgagtggtttactttttagatgtgaaattagagaagattcgaagttgtcccgtgataacagtgcttttgttcatttgcttctgwtatgctttcttaagcggggtgaagggaggggctgtagttagtgtgtccggagttgttgcacatgggagcttctttcagcaagatgatctcagcaggccaa

SEQ ID NO: 42156 - DNA, 201 bp, Homo sapiens
caagtgcctgccaccatgcctggctaatttttgtatttttagtataaaaagggtttcgccacgttggccagcctagtctcgaattcctaggctcaagtgayccacctccctcagtctcccaaggtgctgggattacaaaaatgaattgtttataatgttggtagcaaacatattggatttccttactatgtgccagtctcc

SEQ ID NO: 42157 - DNA, 201 bp, Homo sapiens
gagaaggagcacatcaggtgtctcaacaagtttgctgccttcattgacaaggtgggtctgtgagctgtttcctgggactgtggcttaggaaggggaaaggracttggaacccgatgatagggtggttctaattctcctgttactgactagcacgtggctgtgagaacgtggctgaatcagggtcttggttttcaaatgttg

SEQ ID NO: 42158 - DNA, 201 bp, Homo sapiens
ctaatttgctcaaaagcacagtgagaaccctgagagtgcatgctcaaaggggtctctgcatgtggccttttgggcatcacccatgaatgctgctctctcckttgagaggaaccagttctgggtctggggagaggaacttataccactgcaccaggctggcttttccctcccttggggttgctgatggccaccctcttccct

SEQ ID NO: 42159 - DNA, 201 bp, Homo sapiens
aaggtcagagccatggtctgggccacacacacaccagggcaaggtgggggcaaaggtacaaaaggggtgaggaagggagcctgtatttgttaaacacctgytaggtgtctggcacattatatatgtatttcattaatttctcacagcaaccagaatattatcctcattttacgtataaataaattaaggctcaaagaagta

SEQ ID NO: 42160 - DNA, 201 bp, Homo sapiens
ggaggccaacgtgagccgctgaaggaggagtcagtcttcctgcagtccctctacggggaggtaaatctctccccatctctggaagagcaagtgagagaggrgacaggggagggtttccttggagtgtggcctgtcctggttcctgggttctaggaaagctgtacattcttgactctcctaggcctggatatttttccttat

SEQ ID NO: 42161 - DNA, 201 bp, Homo sapiens
ggcacagcgagggggacaaaggtcactccacatcctcttgtgtctatctccaccaggatgtaggctacacctatctgcacgagacggacctggaggccaaygtgagccgctgaaggaggagtcagtcttcctgcagtccctctacggggaggtaaatctctccccatctctggaagagcaagtgagagaggggacagggga

SEQ ID NO: 42162 - DNA, 201 bp, Homo sapiens
cttgtggatctgataggtgtaaactggcacctaattgttattttaattttcatttctttggttaagtagtgatatcaaatctttcctcatacacttactasttatttgtattccccttctaagacctgtctactcatatatctgcccatttttctattgtggttccttccttttttcttagtgatttgcagtattcctttg

SEQ ID NO: 42163 - DNA, 201 bp, Homo sapiens
ctaccatttggagaggcgtgtatttgaactgtgccagagtacactactataatcagcatgcaagggctcctgttccaacacccactattatcaaacttccraattcttgtggatctgataggtgtaaactggcacctaattgttattttaattttcatttctttggttaagtagtgatatcaaatctttcctcatacactt

SEQ ID NO: 42164 - DNA, 201 bp, Homo sapiens
actggagacccaccagagtccccacaacctgcaccctttttaaactccttcccttctgtccatccccacagcgctgcaagctggaggctgcggtggcccaktctgagcagcagggtgaggcagccctcagcaatgcccactgcaagctggctgagctggaggacgccctgcagaaggccaagcaggacatggcctgcatgc

SEQ ID NO: 42165 - DNA, 201 bp, Homo sapiens
cagaaccaaggatgagctcaacgagctgaactgcatgatccagaggctgacggcagaggtggagaacgacaagcagcaggttggggggcgccgagaccccrctccatacacctgccacttcttgtctggttcctgcttccctcctatcttcagggactgctaccatttggagaggcgtgtatttgaactgtgccagagtac

SEQ ID NO: 42166 - DNA, 201 bp, Homo sapiens
ttggtagcaaacatattggatttccttactatgtgccagtctccattttaggcactttccatgtagaactcaatcgaactttacaataatcctttcaggcrggtattatcacccccattttatgctggagaaattgaggcacagaaaggttaagcgacctgcccaagatcacccagctagtaagccgcacagccagattta

SEQ ID NO: 42167 - DNA, 201 bp, Homo sapiens
cagtaggctggctgattgggtcggggacagcagcctctagccattgtttctgcgtgtttgcctctcaacctgcagtgcgaggaggtgaaggccacagtgayccaacagggtgagaacctccgcagaaccaaggatgagctcaacgagctgaactgcatgatccagaggctgacggcagaggtggagaacgacaagcagcag

SEQ ID NO: 42168 - DNA, 201 bp, Homo sapiens
agcaggacatggcctgcatgctcaagcagtaccaggaggtgatgaactccaagctgggcttggacgtggagatcgccacttatcgcaaactgctggagggygaggagatccggtgaggacaggggctccagggtcccttcaggttcctactcagagctggactgaaatattccaggcagagaatgttcaaactgggaaaga

SEQ ID NO: 42169 - DNA, 201 bp, Homo sapiens
cataaagtggcattttggatcctgtaagctaacatactcctgtccttttgggatcccagcaagcaggaccaacactgatgctgtctgcagcaggtgggtakcttccccctgcctcttagggcccttcttctccttcagcatggaggagaataggtttggtgcaaaagcagaggaactcagcactaaccgtacactctctcc

SEQ ID NO: 42170 - DNA, 201 bp, Homo sapiens
gctgaggtcctgggtagagcagggccagaaggcgggagagctgtggaacagtaggctggctgattgggtcggggacagcagcctctagccattgtttctgygtgtttgcctctcaacctgcagtgcgaggaggtgaaggccacagtgacccaacagggtgagaacctccgcagaaccaaggatgagctcaacgagctgaac

SEQ ID NO: 42171 - DNA, 201 bp, Homo sapiens
ttaagccttttagttacacacagaatactactcaagtggtagcatgttctagtaagaaaaaaagctaggtttatattctgatcatgtgggtctctgcaggyaacttgtaaatctctatctaataatccaatgtacacacagcccctgggccaggtgtctgattcccatccctccattcccctcacctctctagcaaccata

SEQ ID NO: 42172 - DNA, 201 bp, Homo sapiens
ctcttagaactacagtttttaaattttcctgacttgctggtagttttctaatttcagagttgggatatttttttttttttttaatttcctgagaagatagkatcagaaggggatttggagttgagggcactggttgctgtcttctacaggaaatctgcctccttcaatcacaaatctctgacacctccatggtggtgaaga

SEQ ID NO: 42173 - DNA, 201 bp, Homo sapiens
aggcctctccctctggccacaatctggttgattagatttgtgcatagagctatagctgatctggattattcaggccccaaggcggggtgagccggggtgayggcatacacataaatccagctctgttgatccctgtattagtagaattccacgttactcattgctttgaggccacagtcccaattccagccttttcctctt

SEQ ID NO: 42174 - DNA, 201 bp, Homo sapiens
aacttcaggccagcagatgttaaattaagtcctgactgtgtgccagatcctcttggaacggagccagctagagggtgtggagtatgtgggaacatctctgygctttgccctcggatgacaggggctccagatgctgcctcagcatggaagggtggtgtgggtgtggagctgggctcctcacttgctctgagagattgtata

SEQ ID NO: 42175 - DNA, 201 bp, Homo sapiens
tgcaatgggaggtaacgtcactggcagacaacaaaggctctgtcccttctagggggtccctgaaggtgaagatcagaagtctaggttagacttgtaagtgmagggtggctgggcagggtcaggccagaggcagagaggtgggccaggaggtggcctcagggcccgctgaggagagccgaggctcaggggcacagcgagggg

SEQ ID NO: 42176 - DNA, 201 bp, Homo sapiens
ggtctcaggcaggagagtcagctatttgagtgctggtggtttcctggcctgggctctgaggacaacctacagagaggctctgtgactgtcgcatgcttgtrctctgtgggtcagtctggctgggaggcagcagcctgacgttctgggccgtggtatgaggcttccttctttggcaaggtcctcggctctccacttcatttc

SEQ ID NO: 42177 - DNA, 201 bp, Homo sapiens
ctccagaagctgagactgctgaaggccagggttgccctgacaagctatcagacacttctgctttaccgtctgctttatctcgtgtcagctcctagttcttrcacccctgtgctgggggctgggaaaagatttagagaagagttccctgtctgggagggatgggacacacattcagggtacagactgatgcagagatgaaga

SEQ ID NO: 42178 - DNA, 201 bp, Homo sapiens
gcttggccttggtctcaggcaggagagtcagctatttgagtgctggtggtttcctggcctgggctctgaggacaacctacagagaggctctgtgactgtcrcatgcttgtactctgtgggtcagtctggctgggaggcagcagcctgacgttctgggccgtggtatgaggcttccttctttggcaaggtcctcggctctcc

SEQ ID NO: 42179 - DNA, 201 bp, Homo sapiens
gagtgctgcgagagcaacctggagcccctgttgcagggctacatggcgactctgcggcgggaggctgagtgcgtggaggccgacagtggcaggctggcctyagagctcaactgcacgcaggaggcgctggagggctacaagaagaagtgagcatgacagggctgggatggttctaggcagtggagtcagtcttagctgaga

SEQ ID NO: 42180 - DNA, 201 bp, Homo sapiens
gcccatgcaggaatccagacagtgccgatagagccttcataaaaagaaaacctcaccatgctcctgcttgactttttttaaactactggattggctgaaakgttcaattttaattccgtcttggttttttgcgggcattgcctccccctgttatccaagactaggggttggttctcagcttgttaatgatttcaaagtgtg

SEQ ID NO: 42181 - DNA, 201 bp, Homo sapiens
tcagttaagctgggaccagataccagggacctggacttcaagtccagtgtccttccaatgggttctttgtggctgggaaatagaagtccagagaggcaaarcctcttctccaaaggcacagagaaaggagaaaaccagggagtttggcacacctgggctctggcctggccaggtcctcagtcccaggggcctttccacctg

SEQ ID NO: 42182 - DNA, 201 bp, Homo sapiens; identical to SEQ ID NO: 6746

SEQ ID NO: 42183 - DNA, 201 bp, Homo sapiens
tcttgctggctggctgccagaggttgttctcagcttccagaggctatccacattccttggcttgtggccccctcttcctccatcttcaaagccataatagygggttgagtccttctcatgtttcaaatccctctagtgcaggcacctttggggggatcattatttgcctagtatgcatagtatgaaatatttctgcaggat

SEQ ID NO: 42184 - DNA, 201 bp, Homo sapiens
gccctccctaggagctcacagtctttgggggaggacagccaccaaagtttaaaggaggagaagctcgtcttccagggctgaatggtgtgtatatctacacyctgggactgcataagaaggcacaaaccagggcgatggtgggtggaagttctgctctcagatcaacgctacatcagaagtgggcatatctgcacacagagg

SEQ ID NO: 42185 - DNA, 201 bp, Homo sapiens; identical to SEQ ID NO: 17910

SEQ ID NO: 42186 - DNA, 201 bp, Homo sapiens; identical to SEQ ID NO: 18052

SEQ ID NO: 42187 - DNA, 201 bp, Homo sapiens; identical to SEQ ID NO: 17835

SEQ ID NO: 42188 - DNA, 201 bp, Homo sapiens; identical to SEQ ID NO: 18043

SEQ ID NO: 42189 - DNA, 201 bp, Homo sapiens
tggtagatgacagtgaacattttatgaatgattgtgggaatgatctgagcagtttctactttaacagagtctctgtgggcttatgagagtctcttccttcyggatctcaaagctttttttgcacagaatctggtaacccttctgtgtgtatatgtgtgtgtgagtgtgttattgcacatatggtttgctttgcagtttggg

SEQ ID NO: 42190 - DNA, 201 bp, Homo sapiens
ggcactcggcaggctgaggcaggagaatcaggcagggaggttgcagtgagccgagatggcagcagcacagtccagcttcggctcggcatgagagaccgtggaaagagagggagagggagaccgtggggagagggagaccgtggggagagggagagggactgggactgatctgcccttctttggcttcattctgaccacctc

SEQ ID NO: 42191 - DNA, 201 bp, Homo sapiens
agcccttctttagcagcaggacttggcttttaaacctgccatgggctccgaggctgccctcccaccctgatcacagtgcccctgctccttatgggttcctygctctgtcacccaggctggagtgcagtggcgcgattatggttcactgcagcctctacctcccaggctcaggtgatcctcccactttagcctctagagtag

SEQ ID NO: 42192 - DNA, 201 bp, Homo sapiens
ctaacagcacaagcgggtttctcttgagaggcctgggatgggcagttgtcaggtaggagctgaagctcacatgtcctctggagcctggggtttctggaggkgtcaggagggatgggcaggggaacaacaaccccaaccctgaacagctccactttaccggcctcagataggcttctttcaaagcctttcactaacttcgaa

SEQ ID NO: 42193 - DNA, 201 bp, Homo sapiens
aggcactcggcaggctgaggcaggagaatcaggcagggaggttgcagtgagccgagatggcagcagcacagtccagcttcggctcggcatgagagaccgtggaaagagagggagagggagaccgtggggagagggagaccgtggggagagggagagggactgggactgatctgcccttctttggcttcattctgaccacct

SEQ ID NO: 42194 - DNA, 201 bp, Homo sapiens
gcacctgggggctggggatgggggcggtatttttcctctgtctttgtaccttctttgggtgtaacttggtggacatcagagttcagagttgaggtggtgcrgggtgtagcagacccagaattaaggcaggactgttggtctctgtggcctcgtgagactgctgaagacccgacgtcccttgttcctgctgcttctgtggca

SEQ ID NO: 42195 - DNA, 201 bp, Homo sapiens
caggcactcggcaggctgaggcaggagaatcaggcagggaggttgcagtgagccgagatggcagcagcacagtccagcttcggctcggcatgagagaccgtggaaagagagggagagggagaccgtggggagagggagaccgtggggagagggagagggactgggactgatctgcccttctttggcttcattctgaccacc

SEQ ID NO: 42196 - DNA, 201 bp, Homo sapiens
ccaactcctcctggtctttgcagcctgtctgcagggcctgtcttctccactgtttccttgctagcactgagcccagcacctggcatcaacatgaagcgatrgttgtagaaggtgggctagagctggcaggcagggacttgagcttggtagagccaggatagttgggaagatgatttgggcacctgggggctggggatgggg

SEQ ID NO: 42197 - DNA, 201 bp, Homo sapiens
cagcttaagcaaaaagggtgatttatgatagggcttcatggaggactcaggaccccacggcagggttgctgcctggccttaagcagggattagaaaaaccytgttagattctccctctctctcagctctgcttctctttgagcttccttcacttctctgcagcctggctttcccctcctgagcccacacggtcccaaatgt

SEQ ID NO: 42198 - DNA, 201 bp, Homo sapiens
ctcaccccccagacagggtcgcggccggccgaggcactcctcacatcccagacggggcagcggggcagaggcgctccccacatctcagacgatgggcggcygggcagagacgctcctcacttcctagatgggatggcggccgggaagaggcgctcctcacttcctaggtgggatggcggccgggcagagacgctcctcact

SEQ ID NO: 42199 - DNA, 201 bp, Homo sapiens
gggaagtgacatcttaccccaccgggacattttatagacagtgtcttcaccctgaaggtgggaatttcatgaattgtggcaggtcaacaaggtggccatckgggagcaatagagggaaatgggcatttgcggagtgtcttccatgctccaggcacagactattgtgttctcccagcacctggtggtgtggcatcattcatc

SEQ ID NO: 42200 - DNA, 201 bp, Homo sapiens
caaaaaaaaaaaaaaaaaaaagaaatgcctctcttaggccgagcgtggtggctcacacctgtaatcccagcactttgggaggctgagacgggtggattacctgagctcaagagttcaagaccagcctgggcaacataggaaaaccctgtctctactaaaatatgaaaattaaccaggcgtggtgacaggcacctgtaatac

SEQ ID NO: 42201 - DNA, 201 bp, Homo sapiens
ctgccacaacatcaagtttctatagatgggagcccttccgtaaacctcagaaggtggcaagagcatgtctgacagtgattggaattgagctctgcaagacrtagacaagatcacctcttcaactccagagtgttgtggcagggcaccagagctggaaaagcctgaaaggtcatgtccagctgcccacgcaatgtggggtcg

SEQ ID NO: 42202 - DNA, 201 bp, Homo sapiens
tttttctttgccatactgactttctgtggccatatggttagctttggatacagagaggtgtgaggtggtcccacagtgcctgccacaacatcaagtttctrtagatgggagcccttccgtaaacctcagaaggtggcaagagcatgtctgacagtgattggaattgagctctgcaagacatagacaagatcacctcttcaa

SEQ ID NO: 42203 - DNA, 201 bp, Homo sapiens
gagtcttacttgctctgttggctaggctgaggctcagtggtgggatctcggctcactgcatccttcacctcctgagttcaagcaattctcctgcctcagcmtcctgagtagctgggattacaggcatgtgccaccatgcctggctaattttcgtatttttagtagagacggggtttcaccatgttggccaggctggtctca

SEQ ID NO: 42204 - DNA, 201 bp, Homo sapiens
gctacggagtttggtccagatttcccccagcagcagctgggcagcagtgtgtgcctggccccctttggagtgggtcacacacccacctggccaggctctgrcatggaggctggcactagaatgggcttcagggatagcatgcacctgttttgtgctgctgttgtcaagtagctggccttgggcttcttggaactacagatg

SEQ ID NO: 42205 - DNA, 201 bp, Homo sapiens
accacctttgggtgaattagagaaagatgcctcctctgggcaggggcacagctggagagagaaagggaaataagcaagtggccaccccggtttctgccctsttggggtaaggaggtgttttccctttccaggagaaaggagagagaggccgtgtccaggacactgtccggagctgctaaactggccagcaagtgctcagag

SEQ ID NO: 42206 - DNA, 201 bp, Homo sapiens
gagatggagtcttacttgctctgttggctaggctgaggctcagtggtgggatctcggctcactgcatccttcacctcctgagttcaagcaattctcctgcytcagcctcctgagtagctgggattacaggcatgtgccaccatgcctggctaattttcgtatttttagtagagacggggtttcaccatgttggccaggctg

SEQ ID NO: 42207 - DNA, 201 bp, Homo sapiens
tgagcattgagtttctccatgcccagtgccgtgcttgatcctgggtgtgcagctgagcaaaatagatacggtccttccctcccaggtcccacagaataacrgggaaacacatgatactcaggtaatcaaaatgtaagacatactacaaaggtaagaataaggtactgggagagaattatggggtaggagaaatgaattatt

SEQ ID NO: 42208 - DNA, 201 bp, Homo sapiens
ttatgtggtccttgaggtcctggttcaaggctaatctgaagcatctgtctgcataaagcccagatgagcattgagtttctccatgcccagtgccgtgcttkatcctgggtgtgcagctgagcaaaatagatacggtccttccctcccaggtcccacagaataacagggaaacacatgatactcaggtaatcaaaatgtaag

SEQ ID NO: 42209 - DNA, 201 bp, Homo sapiens
agctggaacgggccctgggaaccatgttacagatgagtggctccagggagaagacctgcgcagatcacatggtgcattagggccatgcctggcagtgcttstgttgccctgggcctgaggtgtcccagttcaggcagctgagttgggtgctgcccaggaggtgaaggctgtctaacagcacaagcgggtttctcttgagag

SEQ ID NO: 42210 - DNA, 201 bp, Homo sapiens
atgatagggcttcatggaggactcaggaccccacggcagggttgctgcctggccttaagcagggattagaaaaaccttgttagattctccctctctctcakctctgcttctctttgagcttccttcacttctctgcagcctggctttcccctcctgagcccacacggtcccaaatgttcctgctgcagctccagccacact

SEQ ID NO: 42211 - DNA, 201 bp, Homo sapiens
tctcagctcactgcaatctctgcctcctgggttcaagtgactcttgtgcctcagcctcctgagtagctgggattacaggtgtgtgccaccatacccagctyatttttttgtatttttagtagagatggggtttcactgtgttggccaggctgatctcgaactcctggcctcaagtggtccacccacctcagcctcccaaag

SEQ ID NO: 42212 - DNA, 201 bp, Homo sapiens
caggaggcggaggttggagtgagccaagatcgtgccactgcactccagcctaggcaacaaagcgaaactcttgtctccaaaaaaaaaaaaaaaaaaaaaaagcctgccttggcaggctgcggtggcttatgcctataatcccatatgcgttgggaggccaacgcaggaggatcacttgagtccaggagtttgagaccagcc

SEQ ID NO: 42213 - DNA, 201 bp, Homo sapiens
tccaaagtccatattcccatgggagaaagagagtctggttggcacagcctgggtcacatctctaccctcagtctactcagctccagccaagggatggggtsacacgtgatgaaacaggtctggcaggagccactcctgataccatgcagatcggaggcagctccaaacaggggaactttgacagccacaaagccgggtgct

SEQ ID NO: 42214 - DNA, 201 bp, Homo sapiens
ctgtctttggggagctgtgtggcctctctgcttttgtctgagcatctgctcctggcctccctcttacagaggacccaggcttctcctcttacatgtcggcrtgttccatggttgaacacacagtgccaccgtggatggcttctctgggtcacaggcagccagtgagggggctggacctcgttgactgggaggctgcccctt

SEQ ID NO: 42215 - DNA, 201 bp, Homo sapiens
ttatagtcttccgtaaagctttaagaacttcacgacattatccttgcaaataaggggctacagaggaagaaataatagcctaatcttgacttttctctgaygatctttccacttaaatcatgttcccttctctcctgagcatgcttgaaatgccccaagatgcctgttctacacattctgtattgacagggaacatttctg

SEQ ID NO: 42216 - DNA, 201 bp, Homo sapiens
aagcagaggattcgatctctggcagggcttcatccctaagggtctaacaagcactcttgtgcactgctggtggaagtgaaaattgatagtctttctggaargcaatttggcaaaaggtaacaagaaccttaaaactatccctgctctttgacctagaaattccacaacaaggactttatcatagagaatgaagccgaagtg

SEQ ID NO: 42217 - DNA, 201 bp, Homo sapiens
ctgttgaaagccctcattggccaggagggggcggcctttctccctgccacccccttgaggcccacactcctctttgcctggaagaagagggtttgtgtggrcagtgcagaaatctcacctggactctggaggctgggggcttctgggcttttctgcccattcttcctcactctggccatatctctcacctcctctgtctca

SEQ ID NO: 42218 - DNA, 201 bp, Homo sapiens
taatttgcccaacatcatcaatgagtaagtagcagaaccagaccagaacctgtatcagtctgactcccagggcactctcctaaccactagaggaggagacrgccatgggccaggcatctccggagcccacttgaacttcaagttttcgttttctctagttgcctgttgcaaataataacgtgctcaaaggagacctcatag

SEQ ID NO: 42219 - DNA, 201 bp, Homo sapiens
ctgggcttttctgcccattcttcctcactctggccatatctctcacctcctctgtctcatggccccaagaaaccaagtcacagaggcatcaccatccaggytggccaaagcctcctttctggactggcctgctaccagctccgtgtgaacggctagttcccatatgctgataagacatatcaacagctaggtcttagcatt

SEQ ID NO: 42220 - DNA, 201 bp, Homo sapiens
tctcctgcctgctcgtttccaatctcagaccccttggagcattattttttctaaagtgcagcagctgtgcatctccctggtctgcccagctgttcttgtcsttgactggagagtttatgtcacttgtgacaataaataggaaatgagaatgagagggttgccagactgcccttccagctgcctgaattcctctcgggaaac

SEQ ID NO: 42221 - DNA, 201 bp, Homo sapiens
cagagtggggagagagtgccacttccctggccctaggtcagctccaaagcaacttaccctgcagactgatgtgccatttgtgtagtctggaagcctattcrcagtcattgtgtttggggcgaagcagaggattcgatctctggcagggcttcatccctaagggtctaacaagcactcttgtgcactgctggtggaagtgaa

SEQ ID NO: 42222 - DNA, 201 bp, Homo sapiens
tcatgcctaccggcccgaggctgcctccagctcacctgcagcttcctttctccaggaaggcctggcttctatgtgtgtcttccttgccctccagcccgttyggctatttctgttcattttccctccacggagcatctggcagagctgcctgctctctcccaccccaagccagattttgtcttctcctgcctgctcgtttcc

SEQ ID NO: 42223 - DNA, 201 bp, Homo sapiens
acttggaagctcatggagggctagtggctcaggtgtggtctgagcctagtggaagtgagtgagagaacaggtcccagctgtctatgcggctcacttctccstccactggcctctgcacccatctccatattagaggccttctctggtcccccattctcaattctaatcactgtatttttctgcttaacttggggatgacat

SEQ ID NO: 42224 - DNA, 201 bp, Homo sapiens
atcaagttttgtgattgtcactcatatgtgtgtgtgtgcgtgtgtgtgtatacatatatacgtatatatacgtatatatgtatatatatacgtatatatawgtgtgtatatatgtatatatatatttttttttttttgagagagagggtcttgttctctcgctcaggctggagtatggtggtgcagttatagctccctgca

SEQ ID NO: 42225 - DNA, 201 bp, Homo sapiens
tggcagcctggttctttctccctagctgcccctccccgaggacaaggccctctatcctctgcagccgacatcccacttttcctgtatgagtcatgcctacyggcccgaggctgcctccagctcacctgcagcttcctttctccaggaaggcctggcttctatgtgtgtcttccttgccctccagcccgtttggctatttct

SEQ ID NO: 42226 - DNA, 201 bp, Homo sapiens
caactcctagaggcagctctgtcaccgttagctcccttccttccagatccacctccttaagcattgccaaatcaaatagctgggatgcctgtgcagcccctgaggcccttccaaacaaccacccccagagggctgggtgcagccaaagcctctgaccatttccgccccctctcctgaggggctgccacctcccatctggaa

SEQ ID NO: 42227 - DNA, 201 bp, Homo sapiens
catgtaaagcagagggtgacagtggagccctagaatcacagacttgagtttctttttttttgagacggagtttccctcttgttgcccaggctggaatgcartggagcgatctcggctcaccgcaacctgcgccgcctgggttcaagtgattctcctgtctcagcctcctgagtagctgggattacaggcatgcgccatcac

SEQ ID NO: 42228 - DNA, 201 bp, Homo sapiens
agacaaagcagagacacaatactgtctggtcagggattcttgcattagggagaagggagaggtcctctcgtctcatcaagttttgtgattgtcactcatawgtgtgtgtgtgcgtgtgtgtgtatacatatatacgtatatatacgtatatatgtatatatatacgtatatatatgtgtgtatatatgtatatatatattt

SEQ ID NO: 42229 - DNA, 201 bp, Homo sapiens
gcagtcaggagtggaggtggccctgtctttggggagctgtgtggcctctctgcttttgtctgagcatctgctcctggcctccctcttacagaggacccagrcttctcctcttacatgtcggcatgttccatggttgaacacacagtgccaccgtggatggcttctctgggtcacaggcagccagtgagggggctggacctc

SEQ ID NO: 42230 - DNA, 201 bp, Homo sapiens
tgatgcaggcagggtcacctcggattcagcactcatccagtgggagtgtggtcaggagccccgaggaaccggggcaaggtcgtcttatcttcattgccctytctgtgtaagcccatgaatctctggttcctcatctgagtgatgaaggagttggtctgggaggggaattttgcaccgtttttcaaagctacttgaaccctt

SEQ ID NO: 42231 - DNA, 201 bp, Homo sapiens
tttaaaaaagttcaagactggttgttaacacccaaaacaggcctcacctgcctactccctcaagcctttcttgggggaggggacggcctgcatggagggargtggggctgtgtttagttgggggtcctgctcttgtggcctggtgggaggctggggatatgatgtgtgggaggacaagaggccctgtctctccctgctccc

SEQ ID NO: 42232 - DNA, 201 bp, Homo sapiens
atttctcctcccctagagttgttggggacacagccggttttgccacactgcaaacctttgctgctgcatgaggtcatttcaggggagaaactatatatagyggaggactagcatcaggacagctccacgttgttcaggccggttagcatcgcccttccgctgatgcaggcagggtcacctcggattcagcactcatccagt

SEQ ID NO: 42233 - DNA, 201 bp, Homo sapiens
agcctttcttgggggaggggacggcctgcatggagggaagtggggctgtgtttagttgggggtcctgctcttgtggcctggtgggaggctggggatatgawgtgtgggaggacaagaggccctgtctctccctgctccctgtgcagacaccagggccaactcctagaggcagctctgtcaccgttagctcccttccttcca

SEQ ID NO: 42234 - DNA, 201 bp, Homo sapiens
ccccctctcctgaggggctgccacctcccatctggaaccttctctgaggaagggggaggggcatggcaccaccagggttggggtcatcgcctctcctccasaaatctggatcctgttaccctcctatagagggagcaaggaggctctgttcactgaggtcttgttttttcacatttttttgtgggtttttgctttatattt

SEQ ID NO: 42235 - DNA, 201 bp, Homo sapiens
ggagcaaggaggctctgttcactgaggtcttgttttttcacatttttttgtgggtttttgctttatatttcacaggaacttcaaataactcagctagactstacacagaataggacttgttaataagtgctggaaatggaattagatggaaagaggttcattcattgattcatcttagaactgcttcctgagcatcggcta

SEQ ID NO: 42236 - DNA, 201 bp, Homo sapiens
aagtctttgcaaatctgattcttttgtctgctgtttttgccagtaaagctcgtactgccttgtttccttgcatattgagattttttttttttttttaaaaactattaccttatttatttttcttggaactttatcttgggaattctttgaggcctggtttgaagttgttttcctccaaagagggtttgcctttccttctgc

SEQ ID NO: 42237 - DNA, 201 bp, Homo sapiens
ttagcttatctgcttcttgtgctaacagggccgttgctaccagggcctttggacgtgggggcagcctttggaaaccccatctagttgttttgagagatagrccactgcccttggccaggaccctacagtctgggttaaaactccaactgccattttttctctttctgacacatagagtgtaaagagttttgtcaagtcagg

SEQ ID NO: 42238 - DNA, 201 bp, Homo sapiens
atgattagtgatggcctggatgtggttttgtatgaattgagaaactaaacggaagacacaaggtccaaataaaagaaggagaaaaacaggtattaaaggastaagtattgggagaacccaggacatccaattagagagtgtccaagggggttcagcgtaattatttgcttggttggcgagtttttgggctctatccttgag

SEQ ID NO: 42239 - DNA, 201 bp, Homo sapiens
gcaagcatcaaattttaaggttacatttttgggacccctctttcttctgttctagctgttaccttacttgtgtcacctagaaaaggaccagtccttaattktattttaaaaactgtgatcatgggaggcttaaaatgggtcataacacacatcaggttggttatttcctgggctacataccttggatagaatagcattata

SEQ ID NO: 42240 - DNA, 201 bp, Homo sapiens
actagtttttagaccaaagaaaactaaacaccattttatatttaataatatttcttgtatgatttttataccagagaagctaaattttacctttatattastgtgttattaatattaaacttaattttaataaaaccttgtagacatatttatccaatttttcatgtttgaccataaggtaagattttatagactcttttt

SEQ ID NO: 42241 - DNA, 201 bp, Homo sapiens
tgattcttgacagatatacttatttttttttactgtgtaacttttttttccaatttagagaaccgcatcctattctatgctgcttactatcaatagtggcrcaagcatcaaattttaaggttacatttttgggacccctctttcttctgttctagctgttaccttacttgtgtcacctagaaaaggaccagtccttaattt

SEQ ID NO: 42242 - DNA, 201 bp, Homo sapiens
tggttctttggggctaagaattcatcaggaactgggtctgtaggaactaagtgtcggacttcccatggccattgatctcctgttacggttccaacacaaayataacatgaggtgacttgtagagactgggctacatgtttggctaattgcaaaaataaatttttagtttttcctggaatctcaagtactggcacatttagt

SEQ ID NO: 42243 - DNA, 201 bp, Homo sapiens
aaagtgcagatggaatatttgatccatttcaaccaggcatttgcatcttggtgtgctgtcttaattgccaaagtttgttttaagtctaacttttatgatcstctagtaaaatgaatgtttcctttagcaccaatttttactagtttttagaccaaagaaaactaaacaccattttatatttaataatatttcttgtatgat

SEQ ID NO: 42244 - DNA, 201 bp, Homo sapiens
cggggatgaacaagggctgactgattgataagctcttgaaaattcttaagcttgctgcatcccttcaggtctccacggaatgctaagtctcctccctgccrtgagagacacgaagtgaacttagtgttgggagacggaagctggatggccctcgggggctgacccacagggacttcgggatatagcagagagagcttggca

SEQ ID NO: 42245 - DNA, 201 bp, Homo sapiens
ctaaaaatacaaaacttagccaggcatggtggtggcaggcgcctgtaatcccagctactcaggaggctgaggcagggagattgcttgaactggaagtttcscagaggttgtagtgagctgagattgcgccactgcactccagcctgggtgacagagcgagactctgtctcaaaaaaaaacaaaacaacagcaacaacaaca

SEQ ID NO: 42246 - DNA, 201 bp, Homo sapiens
tccgccactgcactccagcctgggcaacgagcgagactccgtctcaaaaaaaaaaaaaaagacctactttctattctctggtaagtatggggctcgtgtgkgtgtgtgtgtgtgtgtgtgtgtgggtgtgtgtgtgtgggtgtgtgtgtgtgtgtgtcttaagcaagagccttgtggggcttggtgctaggacatcgcctg

SEQ ID NO: 42247 - DNA, 201 bp, Homo sapiens
atccgccactgcactccagcctgggcaacgagcgagactccgtctcaaaaaaaaaaaaaaagacctactttctattctctggtaagtatggggctcgtgtgtgtgtgtgtgtgtgtgtgtgtgtgggtgtgtgtgtgtgggtgtgtgtgtgtgtgtgtcttaagcaagagccttgtggggcttggtgctaggacatcgcct

SEQ ID NO: 42248 - DNA, 201 bp, Homo sapiens
actcctgcagacacattatctatgccacttacttaacaattatgtactctgtattattaatcatgtctttgatgtttacagtcttttatcagcaactacaytgcaagccttgaagacctgggttctgtcttatccttgtagtatatgtctctctcacgcacacacacacattcagcacttaacacaatgagttgtacagaa

SEQ ID NO: 42249 - DNA, 201 bp, Homo sapiens
cagagaatctcttttgttgtatgctgggcaccgcagatagagagctaaaagaccacctggggcctccatatgctcgcagttgggtggactggaaaatggartgaagtgctgagagcagtgtggctgaggaattaggagggcttcacagaagaggtgacattctagctgggcgccgacattttctatttcaaaagatggggt

SEQ ID NO: 42250 - DNA, 201 bp, Homo sapiens
gtgagtgccctctgtttgtggtggcccatcttcagcttggcagaacacctccgagtccccagggcttccttcctggagctttgtgtatttctctgatacayattgtcagccgcagatacctcctctgtgaacttccaaggcactgctgataaacttccacatcagagcctctttcgcacttgatgagcatccccgcatacc

SEQ ID NO: 42251 - DNA, 201 bp, Homo sapiens
ttttctctcattacactctctcccagagaaatcttgttcagtcccacaactctttgtccattgggaatacccctatgcttaaacttcagctcttctctctygaaccccagaaccccatctctagatgcccactggacactgtgatatagatattcccagatttaacacctccaaaaccaggctctgcatcgctccctgtcc

SEQ ID NO: 42252 - DNA, 201 bp, Homo sapiens
aaatgtaaaaaataagaaaagtggttggaccagagactcctgactgtgcttgggatcactgggtcatggagccagtccctgagcttcagcctttggttagycccccaggggcgattctaggtatcgggtccattcctgaccctctggccctttctgagcaccagcatcctggtgctccgagaaactgtctcgtgcccttgg

SEQ ID NO: 42253 - DNA, 201 bp, Homo sapiens
gctgaaactgagaggatgccctgggagctgagcccatagggctccctccctgaccctttggtgactgtgctgaaagcagatacctcctgctgccccgggtktgctgccttctcctccccacccactgctagagcctgtctggcatctatgaagggaggacgtttgggccaaaacaggtggtggtctcctagcacacagcta

SEQ ID NO: 42254 - DNA, 201 bp, Homo sapiens
gaaagctgccctgctgcgttgaaggggtctaatgatacagtggcttaaagaatgaggagtttgtttttctgtctcatgtaatggccctgatgtcctcaacrtgaacagaccaagtgagggggcagctcggctccttgtggtcacctgggatcctgtttttttgaagttgctgccacatcatagaacattgttgtttgcatg

SEQ ID NO: 42255 - DNA, 201 bp, Homo sapiens
aaggctgagaaatgtctgcctgggctgttgtgtggccatgaagaaggggaaagtggctttgggtaggtaactaacagcctcactacagaagatggagagtmttttcacttgtgtgtgctgagagaagaatatgcctccctgctagtcatgtgcccacactctttggcaacttgcacatgtgcccccttccttgggaaacat

SEQ ID NO: 42256 - DNA, 201 bp, Homo sapiens
ctcattgatgctctgctcaccctatgaaggcaggtgcatttctttgtggaaagctgccctgctgcgttgaaggggtctaatgatacagtggcttaaagaakgaggagtttgtttttctgtctcatgtaatggccctgatgtcctcaacgtgaacagaccaagtgagggggcagctcggctccttgtggtcacctgggatcc

SEQ ID NO: 42257 - DNA, 201 bp, Homo sapiens
tgggctgttgtgtggccatgaagaaggggaaagtggctttgggtaggtaactaacagcctcactacagaagatggagagtattttcacttgtgtgtgctgmgagaagaatatgcctccctgctagtcatgtgcccacactctttggcaacttgcacatgtgcccccttccttgggaaacatctgtgtgccagactatgctg

SEQ ID NO: 42258 - DNA, 201 bp, Homo sapiens
agaggcacagagagtcatgttagcaaagtgcttgcagaatcaggtgtcactcttcgtaattaataagattaacaatctctttcttctctcagcattttgcrgttttcaaaatgctttctcaagtattagatatcatttgatctccacagccatcctgttagataggcaaggcaggactcatttttcccgttttataggtga

SEQ ID NO: 42259 - DNA, 201 bp, Homo sapiens
tgtgtcttctgcctggtagacagtagtcacttctcttttttttctttcctttttctttttttttaagtggttacctagatatgacataaaatttacttgtrtgtaacagcaaatttttcagtctatagttttgtagcatgagtacattctttgtatttattgttgtacaaccatcccagtacccatctccagaactttttc

SEQ ID NO: 42260 - DNA, 201 bp, Homo sapiens
aaaaaaatttaaaaaaatacaaaaatagctgggtgtagtggccagcacctgtaatcccagctactcaggaggctgaggcaggagaatctcttgaacctggraggcagaggttgcagtgagccaagttcacgccattgcacttcaacctgggtgacgagagaaactctgtctcaaaaaaaaaaaaaaaggaatctggagaaa

SEQ ID NO: 42261 - DNA, 201 bp, Homo sapiens
cctactctgtgtcaaagcccagatcctgagaggttgaacaccttgtccaaagtcacacagctagttaggagctcacctggggctagaactcagcctcctckcccaccccattgccacatatccccttatgtaagaggagccacaggcagagttgttaatgaagtggaaactctagttggagtttcctgtctcccttgacac

SEQ ID NO: 42262 - DNA, 201 bp, Homo sapiens
ttgggacaaggaggctcttgttcctgccttctcccgtctggtgtgagagccgtgtctctcacaccagccagagcaagcccagacttgtcacataatcggtrcatctgggaaggacactgttggccccatccctggagtaagggcctggggacagaacttggtaaccgagtgtggaacagcttggggattgccgcaggtata

SEQ ID NO: 42263 - DNA, 201 bp, Homo sapiens
tatctgtggctgcccgcacactgaggccttgggtaggtctgtttctcttggctgcaattttgtctctctcatggccacagaggatccgggcctgcctcctycagcaggtttcctcactgtacacctacctcagtgactggttttgtccctcctggactcccacctccacccactccctttctttctgcctcttcctattca

SEQ ID NO: 42264 - DNA, 201 bp, Homo sapiens
acaatactgtctggtcagggattcttgcattagggagaagggagaggtcctctcgtctcatcaagttttgtgattgtcactcatatgtgtgtgtgtgcgtrtgtgtgtatacatatatacgtatatatacgtatatatgtatatatatacgtatatatatgtgtgtatatatgtatatatatatttttttttttttgagag

SEQ ID NO: 42265 - DNA, 201 bp, Homo sapiens
ccctgagaatctgtcttttgaaccagcaccccaggagatcctaatacgggaggtttcgacaactctttgggaccctagcctttgcctctatacacagacayatacattctctgctcaatcacaaatgttggccaggcatggtggctcacacctgtaatcctagcacttcgggaggccgagacaggaggatcccttgagccc

SEQ ID NO: 42266 - DNA, 201 bp, Homo sapiens; identical to SEQ ID NO: 29734

SEQ ID NO: 42267 - DNA, 201 bp, Homo sapiens
attgccaaagtttgttttaagtctaacttttatgatcctctagtaaaatgaatgtttcctttagcaccaatttttactagtttttagaccaaagaaaactmaacaccattttatatttaataatatttcttgtatgatttttataccagagaagctaaattttacctttatattagtgtgttattaatattaaacttaatt

SEQ ID NO: 42268 - DNA, 201 bp, Homo sapiens
tctcacgcatgtgtgcccccttgtccgtatctgtggctgcccgcacactgaggccttgggtaggtctgtttctcttggctgcaattttgtctctctcatgrccacagaggatccgggcctgcctcctccagcaggtttcctcactgtacacctacctcagtgactggttttgtccctcctggactcccacctccacccact

SEQ ID NO: 42269 - DNA, 201 bp, Homo sapiens
agcactggcccagctgtcctgggagggctcagctcttagattctgttcctctctagtgggcaatgggaggttggtagctcctcccgccttgctcctgccgygtgttttccttgctgcttttcccattggcatattcttcagagctgtgcattcagctcctgatattttcatattctagttataattcagcttccactggtg

SEQ ID NO: 42270 - DNA, 201 bp, Homo sapiens
tctcttgaacctgggaggcagaggttgcagtgagccaagttcacgccattgcacttcaacctgggtgacgagagaaactctgtctcaaaaaaaaaaaaaaaggaatctggagaaactgcaggagggaatggagatcttcagcctggagagcagaaaagtgtcagataactccactgaagaggctgtgacttgttctgtgtt

SEQ ID NO: 42271 - DNA, 201 bp, Homo sapiens
atctcttgaacctgggaggcagaggttgcagtgagccaagttcacgccattgcacttcaacctgggtgacgagagaaactctgtctcaaaaaaaaaaaaaaaggaatctggagaaactgcaggagggaatggagatcttcagcctggagagcagaaaagtgtcagataactccactgaagaggctgtgacttgttctgtgt

SEQ ID NO: 42272 - DNA, 201 bp, Homo sapiens
ggtgagccgtgaagggaccctgcctttcagggcactacgcgccaccagttcccggtacccagggagcaggcagccacacacgggccttgcaaccttgtcaragaaaaggcgaacagggccctcaccctgcctgtctcccgaagcaggttcgagccacaagggccaaccaggaggcccctggagcccagatctgtcatctgg

SEQ ID NO: 42273 - DNA, 201 bp, Homo sapiens
ccaactcctagaggcagctctgtcaccgttagctcccttccttccagatccacctccttaagcattgccaaatcaaatagctgggatgcctgtgcagcccctgaggcccttccaaacaaccacccccagagggctgggtgcagccaaagcctctgaccatttccgccccctctcctgaggggctgccacctcccatctgga

SEQ ID NO: 42274 - DNA, 201 bp, Homo sapiens
ttccttttgccccagccagtgggagcagcctggtggtggcccccagcctcagttcttccactcactgtaggacctgagttatagtggaagcagagtgcttsacatctcactcctgtggctcactctgcctttagttttgagatgactgagcctccaaaagcctttgagagatacctctgccctcagtcttggctgtggttt

SEQ ID NO: 42275 - DNA, 201 bp, Homo sapiens
tgactttgtgtccgtgttccccagcacggggcctggtgcatactagaagctcaatacatgtttcttgaatgaatgaatgaatgaatgaatggatggatgaatcgatgaatgaatgaagaatgatgcaagctctttattataagaaatgcatcctgagctgtgcatggtggcttacacctttaatcccagtgactcaggagg

SEQ ID NO: 42276 - DNA, 201 bp, Homo sapiens
agtgactttgtgtccgtgttccccagcacggggcctggtgcatactagaagctcaatacatgtttcttgaatgaatgaatgaatgaatgaatggatggatgaatcgatgaatgaatgaagaatgatgcaagctctttattataagaaatgcatcctgagctgtgcatggtggcttacacctttaatcccagtgactcagga

SEQ ID NO: 42277 - DNA, 201 bp, Homo sapiens
agccttagtgactttgtgtccgtgttccccagcacggggcctggtgcatactagaagctcaatacatgtttcttgaatgaatgaatgaatgaatgaatggatggatgaatcgatgaatgaatgaagaatgatgcaagctctttattataagaaatgcatcctgagctgtgcatggtggcttacacctttaatcccagtgac

SEQ ID NO: 42278 - DNA, 201 bp, Homo sapiens; identical to SEQ ID NO: 29742

SEQ ID NO: 42279 - DNA, 201 bp, Homo sapiens
gagccttagtgactttgtgtccgtgttccccagcacggggcctggtgcatactagaagctcaatacatgtttcttgaatgaatgaatgaatgaatgaatggatggatgaatcgatgaatgaatgaagaatgatgcaagctctttattataagaaatgcatcctgagctgtgcatggtggcttacacctttaatcccagtga

SEQ ID NO: 42280 - DNA, 201 bp, Homo sapiens
aggctgaggcaggagaatcaggcagggaggttgcagtgagccgagatggcagcagcacagtccagcttcggctcggcatgagagaccgtggaaagagagggagagggagaccgtggggagagggagaccgtggggagagggagagggactgggactgatctgcccttctttggcttcattctgaccacctcctgcctcgtg

SEQ ID NO: 42281 - DNA, 201 bp, Homo sapiens
caggctgaggcaggagaatcaggcagggaggttgcagtgagccgagatggcagcagcacagtccagcttcggctcggcatgagagaccgtggaaagagagggagagggagaccgtggggagagggagaccgtggggagagggagagggactgggactgatctgcccttctttggcttcattctgaccacctcctgcctcgt

SEQ ID NO: 42282 - DNA, 201 bp, Homo sapiens
ggcaggctgaggcaggagaatcaggcagggaggttgcagtgagccgagatggcagcagcacagtccagcttcggctcggcatgagagaccgtggaaagagagggagagggagaccgtggggagagggagaccgtggggagagggagagggactgggactgatctgcccttctttggcttcattctgaccacctcctgcctc

SEQ ID NO: 42283 - DNA, 201 bp, Homo sapiens
ggagtctataaaagatggggtgcggggtgagagtcacccttgggattgttgggatccttcccagctttgggagtgagatcgctcgctggtgatcctccagscccgcgcaacgctttctcactttcatggtacaccccgcctgccctggcatttcgccccgggaagaggtctgtcggtcatttttctgggtcttacactcac

SEQ ID NO: 42284 - DNA, 201 bp, Homo sapiens
attacctgggcatggtggtaggcgcctgtagtcccagctactcaggaggctgaggcaggagaatggcatgaacccaggaggcagagcttgcagtgagttgmgatccgccactgcactccagcctgggcaacgagcgagactccgtctcaaaaaaaaaaaaaaagacctactttctattctctggtaagtatggggctcgtg

SEQ ID NO: 42285 - DNA, 201 bp, Homo sapiens
cctccttccacctcttcctacctcccacgcagtgtctgggacacagaccacactgtcctctgttatatgggatactacacatggcattgatttttttttttaacttagtgaaagcgctctgttcccccaaaatagactgtcacatggatgagcatttcatttcccaagacttcacagcagctccaggaattgccatcactg

SEQ ID NO: 42286 - DNA, 201 bp, Homo sapiens
ggactccctgggccctaaacaggtatctctggtttactgatgtcactgccactcatgactagcaaatagtctacttctgccaattcttgcactatatatcygaatgtgccagaaagtgcactttgtgacaaccttcatggatttgtccctccttccacctcttcctacctcccacgcagtgtctgggacacagaccacact

SEQ ID NO: 42287 - DNA, 201 bp, Homo sapiens
gaaagggaggggttggtcttgctgtctcagtggcagaggtggaagaaaactcgaacccatgttgttcaagggtcaaccgtatgatgacagtaataagtacytactctccggccaagcatggtggctcacacctgtaattctagcactttgggaggctgaggtgggtggatcacgaggtcaggagatcaagaccatcctggc

SEQ ID NO: 42288 - DNA, 201 bp, Homo sapiens
gagtcctgctctgttgctcaggctggagtgcaatggcatgatctcggctcactgcaacttccgcctcctggattcaagcgattctcctacctcagcctccygagtagctgggattataggcgtacaccatcacactcagctaatttttttgtatttttaggagagacggggtttcaccatgttggccatgctggtcttgaa

SEQ ID NO: 42289 - DNA, 201 bp, Homo sapiens
cgccaccatccctggctaatttttgtatgtttttgtagggatggggggggtctcactatgttgcccagactagtctcgaactcttggattcaagcagtccrcccacctcagcctcctaaagtgctgggattacaagcatgagccaccaagcccggtcccccatagagtttttaccctgactggcacacctccttcttctag

SEQ ID NO: 42290 - DNA, 201 bp, Homo sapiens
aaatatttattagatgattctgtgtgaagtaaaaacaggatttttttgaagtgttatatttattctatattttctttatgtcctgagtcgatttctaaggmtagaacctagggaagagggggcacaggtaaatccggcaagcagcaggggttgagaaccactggtccagcagctggtttcagattaaaataaaaacaggat

SEQ ID NO: 42291 - DNA, 201 bp, Homo sapiens
ctgtgcatggtggcttacacctttaatcccagtgactcaggaggctgaggcagggggaatgctggagcccaggagtttgaggctgcagtgagttacagtcrcgccactgcactccagcctgggctacagagtgagaccccatctcaaaaaaatttttacaaaagcatactttatagtgctcagcacatatttgctcaataa

SEQ ID NO: 42292 - DNA, 201 bp, Homo sapiens; identical to SEQ ID NO: 29744

SEQ ID NO: 42293 - DNA, 201 bp, Homo sapiens
ttttgtggtaccattttacagcttttgcccaagacaactaagccgccctacaggatgagtgaatccttttccttctctagctatgcaatactgtccaatawttgagacttttagaacccaaaaattgtcagggtggttctttggggctaagaattcatcaggaactgggtctgtaggaactaagtgtcggacttcccatgg

SEQ ID NO: 42294 - DNA, 201 bp, Homo sapiens
tcggcaggctgaggcaggagaatcaggcagggaggttgcagtgagccgagatggcagcagcacagtccagcttcggctcggcatgagagaccgtggaaagagagggagagggagaccgtggggagagggagaccgtggggagagggagagggactgggactgatctgcccttctttggcttcattctgaccacctcctgcc

SEQ ID NO: 42295 - DNA, 201 bp, Homo sapiens
tatacacacttacctctgggcctggagaacttggtgagttgtttttgtacagcgtttgacccactgatgaagagagccaacaccagcccagaggtgctgcsgctgccctctgctggctctgaggtgcagtgatgactgggaaggcaacggttggactcctgggctcagcttacattaaccctgcctgccccctccccctca

SEQ ID NO: 42296 - DNA, 201 bp, Homo sapiens
actcggcaggctgaggcaggagaatcaggcagggaggttgcagtgagccgagatggcagcagcacagtccagcttcggctcggcatgagagaccgtggaaagagagggagagggagaccgtggggagagggagaccgtggggagagggagagggactgggactgatctgcccttctttggcttcattctgaccacctcctg

SEQ ID NO: 42297 - DNA, 201 bp, Homo sapiens
cactcggcaggctgaggcaggagaatcaggcagggaggttgcagtgagccgagatggcagcagcacagtccagcttcggctcggcatgagagaccgtggaaagagagggagagggagaccgtggggagagggagaccgtggggagagggagagggactgggactgatctgcccttctttggcttcattctgaccacctcct

SEQ ID NO: 42298 - DNA, 201 bp, Homo sapiens
attacaggcaccagccaccatgctcagccccaacagactttccacatacctctactctagcgcataccagtttgcctgcttgttttgctttgtttttaaawtttacatatattggccaggcacagtggctcgcacctgtaatctctgtactttgggaggctgaggtgagaggatcccttgaggctaggggtttaagaccaa

SEQ ID NO: 42299 - DNA, 201 bp, Homo sapiens
actgagatcctcaagtcagtggtggctcactttgatgctggagaactaatcacctaaagagagctggtctccaggcagatgagcaacgaccttacagagcragcagccacctttgggctcatcctggatgacgtgtccttgacacatctgaccttcgggaaggagttcacagaagcagtggaagccaaacaggtggctcag

SEQ ID NO: 42300 - DNA, 201 bp, Homo sapiens
atcactactgagatcctcaagtcagtggtggctcactttgatgctggagaactaatcacctaaagagagctggtctccaggcagatgagcaacgaccttayagagcaagcagccacctttgggctcatcctggatgacgtgtccttgacacatctgaccttcgggaaggagttcacagaagcagtggaagccaaacaggtg

SEQ ID NO: 42301 - DNA, 201 bp, Homo sapiens
gagaacttgtatgttgtggaggagaaggatctgtgtgcggcttgcctgagaaaatgccaaaacgcccgggacaacctgaatagaatcaagaacatggccaygacgacaccgagaaagaccatctttcccaatctgatctcacccaattccatggccaaggactcctgggaagactggaggtgacttggaacctgaccctga

SEQ ID NO: 42302 - DNA, 201 bp, Homo sapiens
taaaagaacatggttaagggtgagaaaggccccaagggcaagaagatcaccctcaaggtggccaggaattgcatcaaaatcacttttgatgggaaaaagcrccttgacttgagcaagatgggaattaccaccttccccaagtgtattctgcgccttagtgacatggacgagctggaccttagccggaatcttatcaggaag

SEQ ID NO: 42303 - DNA, 201 bp, Homo sapiens
aaccggctgaccagcaacgggctgcccgtggagctgaagcaactcaagaacatccgcgctgtgaacctaggcttgaaccacctggacagcgtgcccaccayactgggggccctgaaggagctccacgaggtagggctccatgacaacctactgaacaacatccccgtgagcatctccaagctccccaagctgaaaaagctc

SEQ ID NO: 42304 - DNA, 201 bp, Homo sapiens
acctaggcttgaaccacctggacagcgtgcccaccacactgggggccctgaaggagctccacgaggtagggctccatgacaacctactgaacaacatcccygtgagcatctccaagctccccaagctgaaaaagctcaacataaagcggaacccctttccaaagccaggtgagtcggaaatattcatagactccatcagga

SEQ ID NO: 42305 - DNA, 201 bp, Homo sapiens
gaccctgaggcagaagggaaagagagagggagggaagagggcagtgggctacctccacaggaaaccaagggctcccctgtggctgcagcagctctttcagycaagcccataaaactcctttccttactttctcggcgtgtgattgtgttgattgaagggcttttgattccttgccattccacacatttctctgtcctctgc

SEQ ID NO: 42306 - DNA, 201 bp, Homo sapiens
aacatggccacgacgacaccgagaaagaccatctttcccaatctgatctcacccaattccatggccaaggactcctgggaagactggaggtgacttggaasctgaccctgaggcagaagggaaagagagagggagggaagagggcagtgggctacctccacaggaaaccaagggctcccctgtggctgcagcagctctttc

SEQ ID NO: 42307 - DNA, 201 bp, Homo sapiens
ccagtgccctctggcatctcctaaccagatgttttcttatctttcagcagtttttcatgatttttcctcacactgatcactatccaatcagaacaataaayttctaacactcccttactaaaagaacatggttaagggtgagaaaggccccaagggcaagaagatcaccctcaaggtggccaggaattgcatcaaaatcac

SEQ ID NO: 42308 - DNA, 201 bp, Homo sapiens
acgcccgggacaacctgaatagaatcaagaacatggccacgacgacaccgagaaagaccatctttcccaatctgatctcacccaattccatggccaaggaytcctgggaagactggaggtgacttggaacctgaccctgaggcagaagggaaagagagagggagggaagagggcagtgggctacctccacaggaaaccaag

SEQ ID NO: 42309 - DNA, 201 bp, Homo sapiens
gcagtttttcatgatttttcctcacactgatcactatccaatcagaacaataaacttctaacactcccttactaaaagaacatggttaagggtgagaaagkccccaagggcaagaagatcaccctcaaggtggccaggaattgcatcaaaatcacttttgatgggaaaaagcgccttgacttgagcaagatgggaattacc

SEQ ID NO: 42310 - DNA, 201 bp, Homo sapiens
ttctgcgccttagtgacatggacgagctggaccttagccggaatcttatcaggaagatccctgactccatctccaagttccagaacctccggtggctggayctgcacagcaactacatagacaagctgcctgagtccattggccagatgaccagcctgctctacctcaacgtcagcaacaaccggctgaccagcaacgggc

SEQ ID NO: 42311 - DNA, 201 bp, Homo sapiens
accggctgaccagcaacgggctgcccgtggagctgaagcaactcaagaacatccgcgctgtgaacctaggcttgaaccacctggacagcgtgcccaccacrctgggggccctgaaggagctccacgaggtagggctccatgacaacctactgaacaacatccccgtgagcatctccaagctccccaagctgaaaaagctca

SEQ ID NO: 42312 - DNA, 201 bp, Homo sapiens
ccgtggagctgaagcaactcaagaacatccgcgctgtgaacctaggcttgaaccacctggacagcgtgcccaccacactgggggccctgaaggagctccaygaggtagggctccatgacaacctactgaacaacatccccgtgagcatctccaagctccccaagctgaaaaagctcaacataaagcggaacccctttccaa

SEQ ID NO: 42313 - DNA, 201 bp, Homo sapiens
tagagcctgagtcagcacagagccacggttagcactggggaagactctgagatctaattcaaagagaattaaaggcagaggcctctgacctgctggccacygagccacatggccctgtcgaggctagagaccccaaagacaaagggttttcttcccttccagaaagcaagctccggggcaccagattgtcctgcttttaac

SEQ ID NO: 42314 - DNA, 201 bp, Homo sapiens
gtgctgaatgcgatgttttccaagctatatgcattgttaagagaatacttacaactaactgccatgggacgatacatagtgaatgccacaaaatccatatytacaatgaacatgcttatcattagcacccaaaggagttcatatggggagaaaaatgaagactagaacttttcacaatttatacctgtcagggtttttgtc

SEQ ID NO: 42315 - DNA, 201 bp, Homo sapiens
cacaagctggtaaggcctcctggcagcaggaagggaggaggggcccctgcagcagcctggcatggcacgccaagctgctgactgttcttggcaactgccartgaggaggttaaaatgaggcatccatgcaggtcttttcttcaacaattcctccaaattagaaactcaatgatagcaacagatcagagaagtttgcttaat

SEQ ID NO: 42316 - DNA, 201 bp, Homo sapiens
ggcacacacaagctggtaaggcctcctggcagcaggaagggaggaggggcccctgcagcagcctggcatggcacgccaagctgctgactgttcttggcaaytgccaatgaggaggttaaaatgaggcatccatgcaggtcttttcttcaacaattcctccaaattagaaactcaatgatagcaacagatcagagaagtttg

SEQ ID NO: 42317 - DNA, 201 bp, Homo sapiens
agaaaagtccttgagcaggaagcagtgtccagaacaatgcacattattccttcacacctctgcacacgttgcctggctggtgcacgggcgtcatcccacasgcagatccactgcaactcacatgtgacagatggggagatgggctggggggcggacctcagggtcaacttgctggcaggcgtttccaagtgggcactcaca

SEQ ID NO: 42318 - DNA, 201 bp, Homo sapiens
cgcaaccaagcaacagtgagtcaagacatccagggtaggttcagagaatgagctgttcagcctaaacctacgtaatattctgtgggtgatcgaaaaaaaawatatatatatgtgaacactgtttaacctaactgaaataatttaaatgaacttagctctaaatccagaattcactcctataaaaagtgacattaaaagtga

SEQ ID NO: 42319 - DNA, 201 bp, Homo sapiens
tttagctattaagactaaagggacctttgttcgatgtcagccagagttggccagaccgttaaccttctgatgctgcctcctccagtcaggtttctgcttcrgactcaacccagagactcggtgtgtcaaactcaacccagagacttggtgtgtcaaactcaaccgagagacttggtgtgcttccccaagaaaagtccttga

SEQ ID NO: 42320 - DNA, 201 bp, Homo sapiens
tagctattaagactaaagggacctttgttcgatgtcagccagagttggccagaccgttaaccttctgatgctgcctcctccagtcaggtttctgcttcagwctcaacccagagactcggtgtgtcaaactcaacccagagacttggtgtgtcaaactcaaccgagagacttggtgtgcttccccaagaaaagtccttgagc

SEQ ID NO: 42321 - DNA, 201 bp, Homo sapiens
aatgaacttagctctaaatccagaattcactcctataaaaagtgacattaaaagtgactgaataagtctctgaaggacagaaatctgtcctttcaggaatkactcgagtggtcactgttttgaactggctcaaacatcactctacatgaatccgaatacatcagccactggtccacttgctagaagaactgcgagtgacca

SEQ ID NO: 42322 - DNA, 201 bp, Homo sapiens
tttctgaggtctgcaggaagagatgataaagggagtgaaagttcacttctggtccattaattgaaaaatcaatcaatggggaaatcataaaaaattgacaygtacctaacttaaacatgttattttaatttgaatcgcatgaattgaaatctcccatttgaatgatttcaagttagggcagcctttagaggtgaggcccag

SEQ ID NO: 42323 - DNA, 201 bp, Homo sapiens
tgaaagttcacttctggtccattaattgaaaaatcaatcaatggggaaatcataaaaaattgacatgtacctaacttaaacatgttattttaatttgaatygcatgaattgaaatctcccatttgaatgatttcaagttagggcagcctttagaggtgaggcccagacgttttctttgaatgtggcacccccactacagtt

SEQ ID NO: 42324 - DNA, 201 bp, Homo sapiens
ccagaaaacatccagctagacctccacctgctgtccacaggcaagtgaaaaggggacaaagtaactctcacgctccccttagcacagcgactgtggtagcyggtcactcacaagcagaccctgctggccccacccattctatccaagatcttactgtagaatcctagaagacggaaaggaggggaccgtggcatgggagcc

SEQ ID NO: 42325 - DNA, 201 bp, Homo sapiens
ctctctcttttctagtgtggagctggattttaagcagcaagaagacaaactccagccggttctaagaaaactccaccctattgaggaaactcaggtcatamcttcgccttactctcaggagacttactcctcaactcccaagcaaaaatccaaaactgaatctaaaaagcacggaagatggaaactctggttcctttaaca

SEQ ID NO: 42326 - DNA, 201 bp, Homo sapiens
ataatatagcttggctgtttctgtctttccaaaatgtcaaaatttgtctaggattaatggttctctaaatcaataggatttcatgtttataaatggtttayggttccactggttataaaatgttatgagctcatgcattatcatcaacgctgagcctttactgaaatctactgacatttagtctggcatccagaccagaca

SEQ ID NO: 42327 - DNA, 201 bp, Homo sapiens
tgcttgcacgccatggcttgagtgatggaattttacttctgtgttgtctttactgaacactccccacgcttctcccaaagaaactgtggttagtaatggcrgagtaccgttcaatggtgttgactccatgaacacactattttccccagcgttgggcactatggcccttatcagattttcagacagataagcttttacaag

SEQ ID NO: 42328 - DNA, 201 bp, Homo sapiens
cgccatggcttgagtgatggaattttacttctgtgttgtctttactgaacactccccacgcttctcccaaagaaactgtggttagtaatggcggagtaccrttcaatggtgttgactccatgaacacactattttccccagcgttgggcactatggcccttatcagattttcagacagataagcttttacaaggagaatgt

SEQ ID NO: 42329 - DNA, 201 bp, Homo sapiens
gtgcttgagtgtgtatttctgtcccactgacacctctgttgctgtttctgaatgcaggaaccatggtcagtaaggacaccggcaaatgcatactcacaacrtcggagagtgaagtggaacccgccgcctgcctggccctggagatgaaatacgccctggaccccaaccggcagattaaaaaacggaacaaagccctgcagg

SEQ ID NO: 42330 - DNA, 201 bp, Homo sapiens
tcaggaagagaagaggccacaggcctcttaggaatcgtattaggaagagaaaggaaatttcatgtgacatttggaaaagtaaatgctgacttgcttataayaaataattgaaataatattggtattcaggactgtacaaggctttacatcatagacagtgtgttttccattctgtacctggaacccaaagaagcaatgggc

SEQ ID NO: 42331 - DNA, 201 bp, Homo sapiens
agtcctgactgtatatgattaggagacagatgcccttccccacgggctgccctatgtgtccagtggggctgcagaaagaatgatactaacttcacggccartactttattgcgttgataagaccatcttgcacttcatgttttgaagtttaaactgtgcagcagcatctttaaaaacaaatgacctaaaggtggggtttta

SEQ ID NO: 42332 - DNA, 201 bp, Homo sapiens
ctcttaagcaaaaagaactgccagccaaatgtacaaaaatcttaacagtagattcataggtaatctaacaccatataacatttccaaaaggccttgttcartcttgggtttacatctccattttcatcccatttccatcagtacagatccaaaagcaacactcatcaggcgtggggtgggggagaccagtgatttactgat

SEQ ID NO: 42333 - DNA, 201 bp, Homo sapiens
tagattcataggtaatctaacaccatataacatttccaaaaggccttgttcagtcttgggtttacatctccattttcatcccatttccatcagtacagatscaaaagcaacactcatcaggcgtggggtgggggagaccagtgatttactgatcagtagtccacattcctgcaaaaaaattaaaaggtcaaacattgaccc

SEQ ID NO: 42334 - DNA, 201 bp, Homo sapiens
gcacagagccctgtaaaagcccggagccgctcagctatggagaagctgcgctccaaaactccactcggcctccatccgaagagcccgattaccagctgctygggagggccaagcaggaccgggggaggccaaactccgaggagcccgctccacctgccctcaggagggtgtttaaaacggaggttgccaccgtttacgcac

SEQ ID NO: 42335 - DNA, 201 bp, Homo sapiens
ttgtgggcgtccaatgtgatgaatgcatcccctatatgcccggcacacaggctgccacacaagactgtccctgaaactctggagctgctctatccaatacrgtggccactagctgcacgtggctattgaaattcaaactcaatgacaattgaaacttcacagtcacagcagtcacatttcaaatgctcgatagccacatac

SEQ ID NO: 42336 - DNA, 201 bp, Homo sapiens
tggcctgctcacccccgatgcagtgcctgtcccccgaatgtagtgagcagccgtcgcagactcacaccccgccggggctggggaaccagcctagtcccacrgcggttgctgcaggtgaagaatgccaacgaatcgtgcctcatacggaagtggtcgacctcaaagcacaacttcagatgatggagaacttgatcagttcaa

SEQ ID NO: 42337 - DNA, 201 bp, Homo sapiens
ccaaatgagaggagaggccctagaggctcctttctgctccaagaacatattctatagagatgtctgagaacatcacaatttcagccactgccttataataytcataaaagtttcggggcgggggggaacctcgctgcagatctccatcaataaaagtgtgcaatgatcccactgttctgttttctttttcctcttgacact

SEQ ID NO: 42338 - DNA, 201 bp, Homo sapiens
tggggcctaagaataatgagatcctggacctgaagtgtgactgtatgctcctctgtaagtggggctagcataattagaaggctcagggctctaatgcaagygaggcactgggaaacttggacactgggcaaggaaggagtgttgatgttgatgaggcttgatagacatttcccctgaggtttagggcaggaaggttctata

SEQ ID NO: 42339 - DNA, 201 bp, Homo sapiens
atgaatgcatcccctatatgcccggcacacaggctgccacacaagactgtccctgaaactctggagctgctctatccaatacagtggccactagctgcacrtggctattgaaattcaaactcaatgacaattgaaacttcacagtcacagcagtcacatttcaaatgctcgatagccacatacataagacagtgcagctac

SEQ ID NO: 42340 - DNA, 201 bp, Homo sapiens
gttggccagaccgttaaccttctgatgctgcctcctccagtcaggtttctgcttcagactcaacccagagactcggtgtgtcaaactcaacccagagactyggtgtgtcaaactcaaccgagagacttggtgtgcttccccaagaaaagtccttgagcaggaagcagtgtccagaacaatgcacattattccttcacacct

SEQ ID NO: 42341 - DNA, 201 bp, Homo sapiens
gggggctgaggcaggagaatggagtgagcccgggaggcagagcttgcagtgagccgagattgtgcccctgcactccagcctacgctacagagcgagactcygtctcagaaaataaataaataaataagaaaatgcaggcattttttaaattttttaatttttttgctaatgcaagtctggattttcccttttacttgaaaa

SEQ ID NO: 42342 - DNA, 201 bp, Homo sapiens
ttctgatgctgcctcctccagtcaggtttctgcttcagactcaacccagagactcggtgtgtcaaactcaacccagagacttggtgtgtcaaactcaaccsagagacttggtgtgcttccccaagaaaagtccttgagcaggaagcagtgtccagaacaatgcacattattccttcacacctctgcacacgttgcctggct

SEQ ID NO: 42343 - DNA, 201 bp, Homo sapiens
caatgctggtgttgcccatggcactcacataaaaccggccaagttggcgccaatgtcagttgacataaattgttgcgctttggggacatggctggtcctamccaaagctacacaataaaagccagcccacatcctggtgcacctgccctcctgggcccaggccttgttccaggagactgctgtgagaagtgggagcacatc

SEQ ID NO: 42344 - DNA, 201 bp, Homo sapiens
acagaaaatagggcggcagcactttgctgagattagaagtgaggggatttggttcagttcatcagtttattgtaattcaacaaacaaatagagcaggttcrgagccagcactgtgctaaatgcactgcagacaaaagatgaattaaacatggtccatccttcaatgagttcacagacctgggggaagacagctacgatccc

SEQ ID NO: 42345 - DNA, 201 bp, Homo sapiens
taccataaacattgattaatgcacctaccatgtaaaatagtggtaaaggaaggatacaaagtcacggtgaatcatttctatgtttaaagtgttgaaaagcyagttaactacaaaccactgatattttaaactattaggatgagatccatatatatttaatgtaggtatataatatagaaatagtatataacaaattctata

SEQ ID NO: 42346 - DNA, 201 bp, Homo sapiens
gactgacatcaacaagaatacagcagaaactcccaacaggaagaagctgtgtttggcttgcatcagtaatttaggattttaagatgtagtcaaaaccttcrgaaggatggctatccttttttcttttctttttgcaaatgtaatttttcacaaacaaaatataaaagcggtgagaaatgttatgagtaagttctttttcta

SEQ ID NO: 42347 - DNA, 201 bp, Homo sapiens
gaagtttgtttatatgactgacatcaacaagaatacagcagaaactcccaacaggaagaagctgtgtttggcttgcatcagtaatttaggattttaagatrtagtcaaaaccttcggaaggatggctatccttttttcttttctttttgcaaatgtaatttttcacaaacaaaatataaaagcggtgagaaatgttatgag

SEQ ID NO: 42348 - DNA, 201 bp, Homo sapiens
cttcggcagagaatgtttatggctgagacaggttaacctctgtgagcttcaattttgtctgaaatcaactaggggtggtagacactgaaatacagtatctrcaaagctcccacttataaccagcacacagttggcgctgaataaaggacatatcctgttacgagcatttcagtgggatgaattctgcaagtaggttagatg

SEQ ID NO: 42349 - DNA, 201 bp, Homo sapiens
ttccaagcaactgttccccagcacaggccatgcacagtgctgacacacagcaagccccagatgaactgggactggcaggcctggggaggccggctcgttaygtcggctcctttgtagcaaagtccattaaggtctatgattagaacactaagtagaaataactaggcttgttgaaaattatcctgacatgttaaatgagac

SEQ ID NO: 42350 - DNA, 201 bp, Homo sapiens
tgacagatggggagatgggctggggggcggacctcagggtcaacttgctggcaggcgtttccaagtgggcactcacagactcataagtgccctctaccaargaacctgcctctggttgcagattcccagggcagcataatggggagtgcaaacaggaatcaactcgacagataaagtcgagtcattttgttaacaagaact

SEQ ID NO: 42351 - DNA, 201 bp, Homo sapiens
tacagctgttccttgtggtttttaatttgaagtttgtttatatgactgacatcaacaagaatacagcagaaactcccaacaggaagaagctgtgtttggcytgcatcagtaatttaggattttaagatgtagtcaaaaccttcggaaggatggctatccttttttcttttctttttgcaaatgtaatttttcacaaacaaa

SEQ ID NO: 42352 - DNA, 201 bp, Homo sapiens
ttcttggggcttgccatgaggaggaaaggggtaaggactacaaaatcaccgtgtctggtgaggaacaaggggaggggataaggcacaggctgttcatcccsctctctcctgacaaagccaacgggagaacggaatggcctgctgtggggttccaaaggcacctcatgtgggaggtgatgatggaaagacgatagagacagc

SEQ ID NO: 42353 - DNA, 201 bp, Homo sapiens
tgaggatcactaaatggagacatgaagctttgtcttggtggtttccagagaaaaggacaggaccagttcatttggtgtcacgggcaggggagctgatgtascgtcaggagacctggattttgttttagttcaccctggcctagcctctgagctacattttttgatatgaaaggaacatggtccaaatgagaggagaggccc

SEQ ID NO: 42354 - DNA, 201 bp, Homo sapiens
tccactcagcacccaaccaatcccttgaagggcaagttctaggactttagaacgagggattcacagggcttactttatgtaccagatctgaactgggaagytggtattttagttgcatctcatggtttaaaaaaacaaacaaacaaaaaaagaaaacaggaaaatgcactctgtgtacactgatacatagttattatatga

SEQ ID NO: 42355 - DNA, 201 bp, Homo sapiens
tctccccacttgccaccccaataaagcatacaggggcttccaacagaatttcatctgcattcagaagagtcctagtgagggcaggcacctcggagcccatsagtttgaatgcaagtgacaaatcttgcccccacatttccacactatacttaaggtctgacctggcccaaaggggtcatgggcctgctccttgggaagcca

SEQ ID NO: 42356 - DNA, 201 bp, Homo sapiens
tgccaccccaataaagcatacaggggcttccaacagaatttcatctgcattcagaagagtcctagtgagggcaggcacctcggagcccatgagtttgaatrcaagtgacaaatcttgcccccacatttccacactatacttaaggtctgacctggcccaaaggggtcatgggcctgctccttgggaagccagtattctttg

SEQ ID NO: 42357 - DNA, 201 bp, Homo sapiens
gggtcacacaggctacctaaataagtcactaatgggagtcattgaaggctaagaacaaggcaaatgggacagtggatttaaaaaacccaatcaattattasaacagtgctaattcactgtagcagctatgggattcctgggcaggagatcctcagaccaatggggtgtaggtcttggtggctcattgggtaaactcaccag

SEQ ID NO: 42358 - DNA, 201 bp, Homo sapiens
ggaatgcacaggctgacgtttagaccggtcactggtgacaccagatgacacacacaagcagctaatggtttccgtgtgtgatgagaactatcactgctacrtttagtggagatgatgctctcaatgggtatcaggatggagtgggagctcctgaccacatctagaaaccagggttccgggctggtggcccagggaggcagg

SEQ ID NO: 42359 - DNA, 201 bp, Homo sapiens
ctctgtgtgtgtatgacacacatatacctaatatgtatgtataatgtatatgacagcatctcttggaaacatgaaaaaggtctcattctcccagcagcagraataaaaagccatcacagaacatgtttgcgtgatgtgacttgcgttaacctagaatattgatgctagatgggtagaaatgatatacttgctgtatcttat

SEQ ID NO: 42360 - DNA, 201 bp, Homo sapiens
cagtgttcacacattgtaatttgtcataccctgctttctggaaggccaaaagccctggagggaaatgaatttgaccctgcctgtcttgcatttaaacaccrcttttcactcgaaacccaattaccctctccgagcagcatagctatccaccgtgtttccagtaatgcctggcccagggagatgaaaaggatactgtgttca

SEQ ID NO: 42361 - DNA, 201 bp, Homo sapiens
gagacctgtcaggggataagaaatctctgaatttgctctaattaccaatgcccaaacagaataaatactgcatcacaattacagaggaagcataaggggaytatttaagttacagagcagaaagaacccacatggaaaattgtgcaccgctgcagcagctgtgcataaacgctgaggaatcacgaaggtgtgggcttagag

SEQ ID NO: 42362 - DNA, 201 bp, Homo sapiens
tgcacagtgctgacacacagcaagccccagatgaactgggactggcaggcctggggaggccggctcgttatgtcggctcctttgtagcaaagtccattaargtctatgattagaacactaagtagaaataactaggcttgttgaaaattatcctgacatgttaaatgagaccacatggagtttacatgtacaggtgatcct

SEQ ID NO: 42363 - DNA, 201 bp, Homo sapiens
acactcagttggaattctttaaataggtaagtgtgttattctggacttatgaaaatacaaatatggactctatgacttggctacatcaacattaactgaaygcccagaaggtaccaggtattgtatcacgcatggagttacaagcctatgtatatataatacaggctcctcaaagcaaaagggaagagtgctttacaaagg

SEQ ID NO: 42364 - DNA, 201 bp, Homo sapiens
gctcctttctgctccaagaacatattctatagagatgtctgagaacatcacaatttcagccactgccttataatactcataaaagtttcggggcggggggraacctcgctgcagatctccatcaataaaagtgtgcaatgatcccactgttctgttttctttttcctcttgacacttcatcaattccttatctctcccagt

SEQ ID NO: 42365 - DNA, 201 bp, Homo sapiens
tgttaccagacgttccctctggaccgcaaaaaggggaacctcaaaagcctcccagctgcagatccctttaaaagccaaaacaatgggtttctaacagatgygaaagagaagaacgaggctggacccatggaggaggcccggccatgtggcgcggggcgggtgcacaagaccacagccttggttttccattccaaccaacac

SEQ ID NO: 42366 - DNA, 201 bp, Homo sapiens
taaaaggcactaaagctaaaaaataaaaagtcctgccttaataatagtgttcatctctgtatttgtccctgtccaaatctgcatgtatttctgacaataakaatgtctataaaatactgatgcattccattttcttcatcatgcatgatggctctgtgaaaaaggaagcatacaagttgctgggacagggctacagagagg

SEQ ID NO: 42367 - DNA, 201 bp, Homo sapiens
tcggaagcagaagacgactgatcttttttctacttgtttgaggaaatttaaaatgggctaatatgaatactatttagacagacgcatcacaaaattgtgaragtcctattttccctttcagaagcaaaagggcatgttatcagttcacccaaaagggcactcacacagactcctcattcattcactcattcattcattcac

SEQ ID NO: 42368 - DNA, 201 bp, Homo sapiens
cattcaaccacctataagaaaaactatagtggcttcccattcaatttaaaataatgcccaaagggcctctcattttatacacatgtcctcatctctccccwctctcacctgctgcatctattccagcagcactggcctttttttctgacttgcaaacagaggaacatcattcccactgcaggatgttaacacgtgacggtc

SEQ ID NO: 42369 - DNA, 201 bp, Homo sapiens
gacgttttcagttgccacaactgaggagctgctgccggttatgcagcaggtagaggccaggaatgctgctgacatcctatgctgcctgcacagggcaaccyccacaaccaagagctatccagtcccaaatgtcaatagtgctgaggttgagaaagcctaccttactgaaaccacccccaccttagagtgttgtaagaggca

SEQ ID NO: 42370 - DNA, 201 bp, Homo sapiens
ggtgacaccagatgacacacacaagcagctaatggtttccgtgtgtgatgagaactatcactgctacatttagtggagatgatgctctcaatgggtatcasgatggagtgggagctcctgaccacatctagaaaccagggttccgggctggtggcccagggaggcagggtggctttgtagccttcacaccaacactgggag

SEQ ID NO: 42371 - DNA, 201 bp, Homo sapiens
tcggtctttgcttctaatgacagcacagtgagagacttttttttttttttctttcctgaccttttaaccaaacaattcatgttttgttatgattgcctcaragttgttagtcctgcctctcaggccccatcttcaaggtctcggagacactaagcagagcttggatatgtggccgggaagaaagcttgcagtgatctttct

SEQ ID NO: 42372 - DNA, 201 bp, Homo sapiens
atttgaagccctacagtgataccataaacattgattaatgcacctaccatgtaaaatagtggtaaaggaaggatacaaagtcacggtgaatcatttctatrtttaaagtgttgaaaagctagttaactacaaaccactgatattttaaactattaggatgagatccatatatatttaatgtaggtatataatatagaaata

SEQ ID NO: 42373 - DNA, 201 bp, Homo sapiens
attagccatttattctggtatttgaagccctacagtgataccataaacattgattaatgcacctaccatgtaaaatagtggtaaaggaaggatacaaagtyacggtgaatcatttctatgtttaaagtgttgaaaagctagttaactacaaaccactgatattttaaactattaggatgagatccatatatatttaatgta

SEQ ID NO: 42374 - DNA, 201 bp, Homo sapiens
gcaaccaacactcccaccacaggtctgccgggcagcaggaaggggaagctgaagcaagagccatgggccctccaccaggcaggcccccaggcactatctgracaagccgctgtctcaaatacagagggaggtctgtgtgcagggcagtcccagtgccctggaacatctaccggcagcttttctccaagtccactactctaa

SEQ ID NO: 42375 - DNA, 201 bp, Homo sapiens
ggagtgtgaagctgctgaagacacctccatgcatgccccttaccctgggaccccgggatgagggtaaggacagagctctggcgagagagagccctctgtayggaaggtgagagccacaggtgcaaggacgtaaaaggcaggcgaggaggaggtgaaggaagccagggtgcccgacctggcaaagcagactccaaagaaaac

SEQ ID NO: 42376 - DNA, 201 bp, Homo sapiens
acatggagtttacatgtacaggtgatccttccagggtttaaatctcgattcctggctttaggggaatgggatgtgtgtgattctgagaactttgccctacmatggaaaaaaagtaaggtaaagagaaatgggatgaagacagacccaactcaacttctgaattagctgtgctccaaacatcattgctaagtaatttgtgtt

SEQ ID NO: 42377 - DNA, 201 bp, Homo sapiens
agcaatagtggtggtatcattttatgcctctaattaatgtcactttgagactattaagtgaaaaagcccttcaagatgctgacataaatgatggcttagtyatcgagaagagacagctagtgcacaaacctgggtaagaatgcagaagaaaaaaacggttgttgcatccagtaagaaaactgaaagaacaagagagatcaa

SEQ ID NO: 42378 - DNA, 201 bp, Homo sapiens
ggccgaggtgggtggatcacgaggtcaggagatcgagaccatcctgcctaacacggtgaaaccctgtctctactaaaaataaaaaaaattagctgggcgtrgtggcaggcacctgtagtcccagctacttggggggctgaggcaggagaatggagtgagcccgggaggcagagcttgcagtgagccgagattgtgcccctg

SEQ ID NO: 42379 - DNA, 201 bp, Homo sapiens
agcaaatcaacaactgggtcacttgccctcccctgcactgagtactgaacacatcttccagggaggggcccacagcatgctgctgaactctgcaaccagamcaggcacacacaaatgccccatccagtcacccaggaatgtgagaagagaactttccattgagaatttaagatcttatgaaggaaacagtgttgtgagact

SEQ ID NO: 42380 - DNA, 201 bp, Homo sapiens
tagtcccagctacttggggggctgaggcaggagaatggagtgagcccgggaggcagagcttgcagtgagccgagattgtgcccctgcactccagcctacgstacagagcgagactccgtctcagaaaataaataaataaataagaaaatgcaggcattttttaaattttttaatttttttgctaatgcaagtctggatttt

SEQ ID NO: 42381 - DNA, 201 bp, Homo sapiens
gacttagatctccctgtggtgtcagcatgaaagagcagatgccgtccagccctcccgtgccctgctcctcggagtccctgccacccaggacgtggccatgrtgcggctctcaggctgaggccggcagccaccctcctcctttatcattcctgcagtggtgtcacaaaaactgcagcaccagctctgccatgggcctgccct

SEQ ID NO: 42382 - DNA, 201 bp, Homo sapiens
ccctgcactccagcctacgctacagagcgagactccgtctcagaaaataaataaataaataagaaaatgcaggcattttttaaattttttaatttttttgstaatgcaagtctggattttcccttttacttgaaaaggctacagaagctcctaccctcccaggcctggtagggttcatgccaattcatcttctggagaaag

SEQ ID NO: 42383 - DNA, 201 bp, Homo sapiens
gccctgctcctcggagtccctgccacccaggacgtggccatggtgcggctctcaggctgaggccggcagccaccctcctcctttatcattcctgcagtggygtcacaaaaactgcagcaccagctctgccatgggcctgcccttctttgtttcttttcaaatgtctacccgtgatgccctcttttgccaacggtccgtaaa

SEQ ID NO: 42384 - DNA, 201 bp, Homo sapiens
atttttttgctaatgcaagtctggattttcccttttacttgaaaaggctacagaagctcctaccctcccaggcctggtagggttcatgccaattcatcttytggagaaagcatctttccggtgctagagacagcagagatcccctcattgagagggtcccataaataaagtgtattgggaaggatctgtaatcattaacag

SEQ ID NO: 42385 - DNA, 201 bp, Homo sapiens
cctgaccaacatagagaaaccccgtctctactaaaaatacaaaattagccgggagtggtggcgtatgcctgtaatcccagctactcggtaggctgaggcargagaatcgcttgaacccaggaggcggaggttgtggtgagcccagattgtgcccattgcactccagcctgggcaacaagagcgaaactcggtctcaaaaaa

SEQ ID NO: 42386 - DNA, 201 bp, Homo sapiens
ctggacatgctggatttccagtgcccctcagatatgcacacggagatgtgttcagaagagaacaacaaatatttggggtcctggttcttctattgcctggmgaggtggccagggtcacatccataaaccaaggcccagaaaggacttgcctgaattcacctcccatgcaagggggagagccaggcctgggatccggatccc

SEQ ID NO: 42387 - DNA, 201 bp, Homo sapiens
catactgtaattccaattctggctgaaatatgatgaatcacagaaagtgcctggcaacactttggagcagaatatggtcacttgatcaacaaactgcacakaaccatgaggtcacgtctgagttttgcaagcccactgagacaatcacggcatgtagcagacaatccttttgtcaaatgttgatgtaacagacaatataat

SEQ ID NO: 42388 - DNA, 201 bp, Homo sapiens
gcctggagaggtggccagggtcacatccataaaccaaggcccagaaaggacttgcctgaattcacctcccatgcaagggggagagccaggcctgggatccrgatcccaacttttagtttcctctggacaatgctggtgttgcccatggcactcacataaaaccggccaagttggcgccaatgtcagttgacataaattgtt

SEQ ID NO: 42389 - DNA, 201 bp, Homo sapiens
tgcccccagagtgtttataagctaatgcagatgggagcttttctcctgccacaaatttaacattccggttatcatgtctgtgcctggacacaaaataatayccagaaaatacacatctgcatgttaaaaatgtcagagaggaaaggctggataaaataggagaaactgtgaaggcatgaaacactccccagctgttcctag

SEQ ID NO: 42390 - DNA, 201 bp, Homo sapiens
atcccaacttttagtttcctctggacaatgctggtgttgcccatggcactcacataaaaccggccaagttggcgccaatgtcagttgacataaattgttgygctttggggacatggctggtcctacccaaagctacacaataaaagccagcccacatcctggtgcacctgccctcctgggcccaggccttgttccaggaga

SEQ ID NO: 42391 - DNA, 201 bp, Homo sapiens
agaaacagccaaggcaactccagcctggtccagaaaattctcatcatcaaccctttatgtttatacaaccttcaacaatatactacagaaagaccccaagrtcattattattaattttttaattaggggggagaattagcaacctcccctacaaaggccaaaatctgcccggcctcaggggtctgacagaactgaccagag

SEQ ID NO: 42392 - DNA, 201 bp, Homo sapiens
gatcatttccatgtgtcacaaatattatatgctttcaattttttttcaagtgcttaaaaatgtaaaatccattcttagtttgctggacaaaaccaggcccyggcgggatttggcctgcaggccgcactttgccagtcccagttgtagcaggacaggtggggtagagcaaacataagccatggagtcagcatatgtgtatgt

SEQ ID NO: 42393 - DNA, 201 bp, Homo sapiens
tttgaaaagggaaagaccaaccaagaaattaaatctactctcagttgctttaatcatgcatcacagggacttgccaagagcacagcgagggcgacacagcyccagggcacagagtgtttgggtggatggttcccttatctggagggagaatggaggtgcaggcagcgagagggctacaaaggtaaatccctacagtcccca

SEQ ID NO: 42394 - DNA, 201 bp, Homo sapiens
ttagaatacataccaaacaatgcctacctgcattgccaaattgggtgctgctatagggcaaaagtcttccaagtaatgaatctaagagagaatggaatgtrtgggaaaagaaagttactggaactaataggacacgctgtggctcatctgaagaaagctgatgaggccaatgataatctcttccgtgtctgttccattctt

SEQ ID NO: 42395 - DNA, 201 bp, Homo sapiens
aatcgtgaattcaaagccacaatgtgcaacctactggcctatctaaagcacctcaaagggcaaaacgaggcagccctggaatgcttacgtaaagctgaagmgttaatccagcaagagcatgctgaccaggcagaaatcagaagtctggtcacctggggaaactatgcctgggtctactatcacatgggccgactctcagac

SEQ ID NO: 42396 - DNA, 201 bp, Homo sapiens
ctgtggctcatctgaagaaagctgatgaggccaatgataatctcttccgtgtctgttccattcttgccagcctccatgctctagcagatcagtatgaagamgcagagtattacttccaaaaggaattcagtaaagagcttactcctgtagcgaaacaactgctccatctgcggtatggcaactttcagctgtaccaaatga

SEQ ID NO: 42397 - DNA, 201 bp, Homo sapiens
ctctgaagcttcataagatgcgtgaagaaggtgaagaggaaggtgaaggagagaagttagttgaagaagccttggagaaagccccaggtgtaacagatgtwcttcgcagtgcagccaagttttatcgaagaaaagatgagccagacaaagcgattgaactgcttaaaaaggctttagaatacataccaaacaatgcctacc

SEQ ID NO: 42398 - DNA, 201 bp, Homo sapiens
aaagcgattgaactgcttaaaaaggctttagaatacataccaaacaatgcctacctgcattgccaaattgggtgctgctatagggcaaaagtcttccaagyaatgaatctaagagagaatggaatgtatgggaaaagaaagttactggaactaataggacacgctgtggctcatctgaagaaagctgatgaggccaatgat

SEQ ID NO: 42399 - DNA, 201 bp, Homo sapiens
gttcagatttatgtagacaaggtgaaacatgtctgtgagaagttttccagtccctatagaattgagagtccagagcttgactgtgaggaagggtggacacsgttaaagtgtggaggaaaccaaaatgaaagagcgaaggtgtgctttgagaaggctctggaaaagaagccaaagaacccagaattcacctctggactggca

SEQ ID NO: 42400 - DNA, 201 bp, Homo sapiens
tgtgctttgagaaggctctggaaaagaagccaaagaacccagaattcacctctggactggcaatagcaagctaccgtctggacaactggccaccatctcakaacgccattgaccctctgaggcaagccattcggctgaatcctgacaaccagtaccttaaagtcctcctggctctgaagcttcataagatgcgtgaagaag

SEQ ID NO: 42401 - DNA, 201 bp, Homo sapiens
caggcagaaatcagaagtctggtcacctggggaaactatgcctgggtctactatcacatgggccgactctcagacgttcagatttatgtagacaaggtgaracatgtctgtgagaagttttccagtccctatagaattgagagtccagagcttgactgtgaggaagggtggacacggttaaagtgtggaggaaaccaaaat

SEQ ID NO: 42402 - DNA, 201 bp, Homo sapiens
tcatctcaagctggttaaccctctgcgacatggcatcatcgtggactgggatacagtgcaggatatctgggaatatctcttccgacaagagatgaagatcsccccggaggagcatgcggtcttggtttcagacccgccactgagcccacacaccaacagagagaaatatgctgaaatgctgtttgaagccttcaacacccc

SEQ ID NO: 42403 - DNA, 201 bp, Homo sapiens
atctcaacaacggtgggcaagccctacatggagaccgccaagactggggataatcgcaaggagacattcgtggggcaggaactcaacaacacaaacgttcrtctcaagctggttaaccctctgcgacatggcatcatcgtggactgggatacagtgcaggatatctgggaatatctcttccgacaagagatgaagatcgcc

SEQ ID NO: 42404 - DNA, 201 bp, Homo sapiens
ccatcctggcctcacttcagggtttccaaccattgtgggtccaccgctttgagtacgaggaacacgggcctttcttcctctacagaaggtgcttctgaacrgcgacgaggatggacactgcactggcagtgcctaccctcgacagggtgagcgcactcctacacacagggggtggagccggcgcttattcctgtagcatta

SEQ ID NO: 42405 - DNA, 201 bp, Homo sapiens
tcctggcctcacttcagggtttccaaccattgtgggtccaccgctttgagtacgaggaacacgggcctttcttcctctacagaaggtgcttctgaacggcracgaggatggacactgcactggcagtgcctaccctcgacagggtgagcgcactcctacacacagggggtggagccggcgcttattcctgtagcattaaac

SEQ ID NO: 42406 - DNA, 201 bp, Homo sapiens
gaaggagattcagctgtgccaggaacggttcctctgctcggagatgttcttcaagccatctctcatcaagtccatgcagctgggcctccacacccaaaccrtgtcctgccttaacaagtgtgacatcgccctcaaacgggacctcatggggaacatcctgctctgcgggggcagcacgatgctcagtggcttccctaaccg

SEQ ID NO: 42407 - DNA, 201 bp, Homo sapiens
gggatacagtgcaggatatctgggaatatctcttccgacaagagatgaagatcgccccggaggagcatgcggtcttggtttcagacccgccactgagcccwcacaccaacagagagaaatatgctgaaatgctgtttgaagccttcaacacccctgcaatgcacatcgcctaccagtcgcgcctgtccatgtactcctatg

SEQ ID NO: 42408 - DNA, 201 bp, Homo sapiens
tgctgtttgaagccttcaacacccctgcaatgcacatcgcctaccagtcgcgcctgtccatgtactcctatggaaggacctccggcctggtggtggaggtrggccatggcgtgtcctacgtggtccccatctacgagggttatcctttgcccagcatcaccggaaggctggactacgcgggctctgacctgacagcctacc

SEQ ID NO: 42409 - DNA, 201 bp, Homo sapiens
tacatggagaccgccaagactggggataatcgcaaggagacattcgtggggcaggaactcaacaacacaaacgttcatctcaagctggttaaccctctgcracatggcatcatcgtggactgggatacagtgcaggatatctgggaatatctcttccgacaagagatgaagatcgccccggaggagcatgcggtcttggtt

SEQ ID NO: 42410 - DNA, 201 bp, Homo sapiens
tgcagtatttttatttggcttcaatttctgctcaaaagcccttttaggttgctcttgctgaatgtcccaggaatttctcccagagctttgcttggcttggmcatgactttgggaggtttcttgtttttcctgggtagtgtaattaggcttttgctgataatatcactgttttctctactggtcccagaggagaatgtggtg

SEQ ID NO: 42411 - DNA, 201 bp, Homo sapiens
cctgtggtctccctgatggctcctgaaagcatctctgtcagcagggagatctatattccaggtctctatcccttactcttggtactgtacccaaagtacargggtgaacatgtgttcaccaaatcctgtttcactctccttctcctgggcacacagatggcaacatttgacattctccctcacagttggtttgagttctag

SEQ ID NO: 42412 - DNA, 201 bp, Homo sapiens
ctgataatatcactgttttctctactggtcccagaggagaatgtggtggccaatggtagttatttcttgcttttattggggtgggggagaggggcaaaagrggtcaaatataaatgttttctagcttaattcatccaaaactgaaatgagaaaaacagtagctagtgtccctttcttacagaagtgaaaagagcacaagat

SEQ ID NO: 42413 - DNA, 201 bp, Homo sapiens
cctgctctcaagcaacctctgagcagctgcccagtgaggggcaatgagaccccactggccctagtacttgtgccttcttgtttggcctcagaacctgcatrtcatccccagtctgttggggtgggttcttgcttttttgcttgaccctcctcttgcatttctatggactctgatgtcaactatggatagctcacattcacc

SEQ ID NO: 42414 - DNA, 201 bp, Homo sapiens
atgagagcaacagcaggtactccacggctttgggggcaagggaaaaagaataaaactaaaacacatgcacgccggcgctggctaaaggttctcaacaagtraaagttgcgggtctttcagccagatcctctttcttcaacagtcagcaaagggcatctgcttgcagtttcgccccggtctccatctcacaagtgcctggct

SEQ ID NO: 42415 - DNA, 201 bp, Homo sapiens
tctcctgggcacacagatggcaacatttgacattctccctcacagttggtttgagttctagtcaatatagcaaaaaagggatgtgagtcacatcacagtayagatctcccatactagctactatagccatgacaataaatgcaatgacttaaaacaacagaaatttattctttcacttttatgggtacaaggaatctaaaa

SEQ ID NO: 42416 - DNA, 201 bp, Homo sapiens
cactctccttctcctgggcacacagatggcaacatttgacattctccctcacagttggtttgagttctagtcaatatagcaaaaaagggatgtgagtcacwtcacagtacagatctcccatactagctactatagccatgacaataaatgcaatgacttaaaacaacagaaatttattctttcacttttatgggtacaagg

SEQ ID NO: 42417 - DNA, 201 bp, Homo sapiens
tgcaaaggcatggaggctcaagacagatcaccatgctctggcagggacaagggggaagttccaatcatactaaagagttaagacttattcctttaggtaayggcaagtttgagcttgaaattgctatcatacagcctatggtttcaaacatgcccctgatgaaaggcaggacacaacaacacttgctgggtacccacacag

SEQ ID NO: 42418 - DNA, 201 bp, Homo sapiens
aggatgccaggtgcaaaggcatggaggctcaagacagatcaccatgctctggcagggacaagggggaagttccaatcatactaaagagttaagacttattsctttaggtaatggcaagtttgagcttgaaattgctatcatacagcctatggtttcaaacatgcccctgatgaaaggcaggacacaacaacacttgctggg

SEQ ID NO: 42419 - DNA, 201 bp, Homo sapiens
caggaaaacctagtggtttctgagagtggatcagggtcccttcttcctccaatatgcccccagatgatttctagaaccttgcgaactactggactgaatcmtctctgtgagttcttccaggacccaaattctcaagttctcgagagaaaaagcagcaatagcagcagttgtaaaaggctttctccatcattggtccacaat

SEQ ID NO: 42420 - DNA, 201 bp, Homo sapiens
gctccccactcaaggttgccatcaaaagcagagggcaccagctttccctccccggctctgcagccctcatgggcaatgccccctcctcgctccttaagcayatcagaatgagcaatatttgactgttgattctttcatctctgcagctttgaaaacctcaaacgtcatatcggatctacaacaaagagcagggacttcagg

SEQ ID NO: 42421 - DNA, 201 bp, Homo sapiens
aacaggagataggaacttttcttctctctaagacagggtaaaatgtacagcatgcaattcccttgctaatagtgtccaattgatttacttaggggaaccartctctggtaactgatacaaatatgaatcccaaaatagcactgaaaatattacagggatacagccaaacatggaatgggaaataatccccaaatttccatc

SEQ ID NO: 42422 - DNA, 201 bp, Homo sapiens
cagagaggcagagaatgttttccagaaattctcaaatatagccatcatgcccctgcaggaggacagcttcacagtcgcttctcaaaagcagcctggtgacyatgctcagtgttcggtgtggtcttacatctccaccctgggctcacctgggaactgggagagctttgctgcctccacacccgttcaaggacttccacagaa

SEQ ID NO: 42423 - DNA, 201 bp, Homo sapiens
aaagagttaagacttattcctttaggtaatggcaagtttgagcttgaaattgctatcatacagcctatggtttcaaacatgcccctgatgaaaggcaggamacaacaacacttgctgggtacccacacagtgctagcaactggagacacacagatgagcaaaactatcctgacacactcccaggaaggggagccagggaga

SEQ ID NO: 42424 - DNA, 201 bp, Homo sapiens
gtaccctgctgaggggaaggggggatccctgacacctgggcttccccgggagtcggctgtggagtcgagttgagctccctttccgggtctggggaactcamcctcaccttatgcctggggtctccggggaactagtgggctttctgcaacggggggaaggaggggacgactcccgcccctagtttacccctcaaaagttaa

SEQ ID NO: 42425 - DNA, 201 bp, Homo sapiens
attaaatagaacttgggtacttggaaggagaataatctttattacctggaaaattcatatatatgcaatagctcattttccctgaattacgtggaataagwgatgggatagtgtatctcatttgttctcttgaaattctggagtttttaaaaaataaaatttaggagtattgaatgttgaaaaaatatattttatttattt

SEQ ID NO: 42426 - DNA, 201 bp, Homo sapiens
tctgaagcacctggagtactatcaggcatgtgcttgttactgaacaaatgttccttgattactgggataaacttctcaacacttttggaaaggtgttgatyttgctgaagtaaaaaggaaataaaacaaatggagcttccagaaattaaagtcattttgtgatgccttctttagatgtggagacagaaagccatctagtgg

SEQ ID NO: 42427 - DNA, 201 bp, Homo sapiens
gagcttaagccaacaaaatagccatagaactcaagttgagtgacattgtaaccattctacatatgaccatcctactttttcctagatagaagtcccattcwtccctgtgtatgttagcctttaaacctgcacatccactaatttaacaactttaattaagttgaactagcatgactagttattgacatacatgtttttttt

SEQ ID NO: 42428 - DNA, 201 bp, Homo sapiens
taatctttattacctggaaaattcatatatatgcaatagctcattttccctgaattacgtggaataagtgatgggatagtgtatctcatttgttctcttgwaattctggagtttttaaaaaataaaatttaggagtattgaatgttgaaaaaatatattttatttatttattcattctttttttagagacatggtctctgt

SEQ ID NO: 42429 - DNA, 201 bp, Homo sapiens
taatgcctttgtcggaggaagcaatttcagtccactctccttttcagtccctgttggccgcttaaactaaaaggctacagacgggcttaaatgcgtctccrctgtgtttcttatgcctcgggccggcagggtaacgggttctagtcacagcttgtagagttcaggatgggtgacattcaggtcctattgtttttgagtcaa

SEQ ID NO: 42430 - DNA, 201 bp, Homo sapiens
tggtgcagtcatagcttattgcagccttgaactcctgggctcaagtgatcctcccaactcagcctccctagtagctgggactacagacatgtgccatcacrcctggctaattttttaaaattatttttttgtagacatagagtcttgctattttgcacagtgtagtcttgaactcctgggctcaagcagtcctcccacctt

SEQ ID NO: 42431 - DNA, 201 bp, Homo sapiens
aaacaaatggagcttccagaaattaaagtcattttgtgatgccttctttagatgtggagacagaaagccatctagtggtgtctagcatagaaatggaaggmctttatttctggtgatttattgacattaagaatgtttttcttgattcacatttttaatgttttgtgctctttatagcctatgagtgcaacacttagagaa

SEQ ID NO: 42432 - DNA, 201 bp, Homo sapiens
gctttaattcaactccagatttagagtagaaaaggcccttaaacaccaggtaaaactttttaagaatctcagctctgatttaatatgcagttaaacttttytctctagtttctagcccacagcaatattagaagtattaaatgttagatgcaagtacaatgggaacagaagtgaaagctgacagtgaattagtaaaactaa

SEQ ID NO: 42433 - DNA, 201 bp, Homo sapiens
gggtttcaccacgttggccaggctggtctcgaactcctgacctcaggtgatccaccgcctaggcctcccaaaaccattagggctcagaggaaggtatcccratgaatatcaattaagggcactttaatatataaattataaactaagttctaaaaggaaaattagtattttggatagatttgtcaaaacgacatttaagtc

SEQ ID NO: 42434 - DNA, 201 bp, Homo sapiens
aaagtcgactatagagaggtgtggttaattcgattattttataatttttcttttttagagaaaaaccaagatttcactttcaagatggaaagtccgtcagrctcagctgtggttttacctagcactcctcaggcctctgcgaatccatcatctccctatacaaatagttcccgaaaacaagtatgaaaatctttgttcttc

SEQ ID NO: 42435 - DNA, 201 bp, Homo sapiens
cattttgtgatgccttctttagatgtggagacagaaagccatctagtggtgtctagcatagaaatggaaggactttatttctggtgatttattgacattargaatgtttttcttgattcacatttttaatgttttgtgctctttatagcctatgagtgcaacacttagagaaagattaaggaaaacaagattttcatttaa

SEQ ID NO: 42436 - DNA, 201 bp, Homo sapiens
tgggctcaagtgatcctcccaactcagcctccctagtagctgggactacagacatgtgccatcacacctggctaattttttaaaattatttttttgtagayatagagtcttgctattttgcacagtgtagtcttgaactcctgggctcaagcagtcctcccaccttggcctcctaaggtgctgggatcccaggtgtgagcc

SEQ ID NO: 42437 - DNA, 201 bp, Homo sapiens
gctaaaactagtcaaaatgtatagatcaaaggtgagaagaatttcaggaccattgcataatttttatttttacataaattacaggaaagtaatttcaaaawtagaatttttttttttaccataataagcaataagccaaatattcagaaacctggcttccaacagctttaattcaactccagatttagagtagaaaaggcc

SEQ ID NO: 42438 - DNA, 201 bp, Homo sapiens
catgcgtctgggcctcccatcgtgtgggccaagccccgccccaaccacccgctggcggaggcgcgcgcgcagtcccaccgctctgagtcgctgagtgaagyggcgcctcgcgcgtcaggcaatctggccaattgcgcatcttttccgcctaccgcacggccccgcccctgccacaggatcgatttacggccgcaggtgcgc

SEQ ID NO: 42439 - DNA, 201 bp, Homo sapiens; identical to SEQ ID NO: 20050

SEQ ID NO: 42440 - DNA, 201 bp, Homo sapiens; identical to SEQ ID NO: 21269

SEQ ID NO: 42441 - DNA, 201 bp, Homo sapiens; identical to SEQ ID NO: 19790

SEQ ID NO: 42442 - DNA, 201 bp, Homo sapiens; identical to SEQ ID NO: 21994

SEQ ID NO: 42443 - DNA, 201 bp, Homo sapiens; identical to SEQ ID NO: 19795

SEQ ID NO: 42444 - DNA, 201 bp, Homo sapiens; identical to SEQ ID NO: 18668

SEQ ID NO: 42445 - DNA, 201 bp, Homo sapiens; identical to SEQ ID NO: 20493

SEQ ID NO: 42446 - DNA, 201 bp, Homo sapiens; identical to SEQ ID NO: 20494

SEQ ID NO: 42447 - DNA, 201 bp, Homo sapiens; identical to SEQ ID NO: 18242

SEQ ID NO: 42448 - DNA, 201 bp, Homo sapiens; identical to SEQ ID NO: 22098

SEQ ID NO: 42449 - DNA, 201 bp, Homo sapiens; identical to SEQ ID NO: 20495

SEQ ID NO: 42450 - DNA, 201 bp, Homo sapiens; identical to SEQ ID NO: 18806

SEQ ID NO: 42451 - DNA, 201 bp, Homo sapiens; identical to SEQ ID NO: 22890

SEQ ID NO: 42452 - DNA, 201 bp, Homo sapiens; identical to SEQ ID NO: 18807

SEQ ID NO: 42453 - DNA, 201 bp, Homo sapiens; identical to SEQ ID NO: 19273

SEQ ID NO: 42454 - DNA, 201 bp, Homo sapiens; identical to SEQ ID NO: 18808

SEQ ID NO: 42455 - DNA, 201 bp, Homo sapiens; identical to SEQ ID NO: 18809

SEQ ID NO: 42456 - DNA, 201 bp, Homo sapiens; identical to SEQ ID NO: 18810

SEQ ID NO: 42457 - DNA, 201 bp, Homo sapiens; identical to SEQ ID NO: 23091

SEQ ID NO: 42458 - DNA, 201 bp, Homo sapiens; identical to SEQ ID NO: 18811

SEQ ID NO: 42459 - DNA, 201 bp, Homo sapiens; identical to SEQ ID NO: 22106

SEQ ID NO: 42460 - DNA, 201 bp, Homo sapiens; identical to SEQ ID NO: 18812

SEQ ID NO: 42461 - DNA, 201 bp, Homo sapiens; identical to SEQ ID NO: 22109

SEQ ID NO: 42462 - DNA, 201 bp, Homo sapiens; identical to SEQ ID NO: 18816

SEQ ID NO: 42463 - DNA, 201 bp, Homo sapiens; identical to SEQ ID NO: 20125

SEQ ID NO: 42464 - DNA, 201 bp, Homo sapiens; identical to SEQ ID NO: 19643

SEQ ID NO: 42465 - DNA, 201 bp, Homo sapiens; identical to SEQ ID NO: 20512

SEQ ID NO: 42466 - DNA, 201 bp, Homo sapiens; identical to SEQ ID NO: 20127

SEQ ID NO: 42467 - DNA, 201 bp, Homo sapiens; identical to SEQ ID NO: 20128

SEQ ID NO: 42468 - DNA, 201 bp, Homo sapiens; identical to SEQ ID NO: 20129

SEQ ID NO: 42469 - DNA, 201 bp, Homo sapiens; identical to SEQ ID NO: 20071

SEQ ID NO: 42470 - DNA, 201 bp, Homo sapiens; identical to SEQ ID NO: 22018

SEQ ID NO: 42471 - DNA, 201 bp, Homo sapiens; identical to SEQ ID NO: 22020

SEQ ID NO: 42472 - DNA, 201 bp, Homo sapiens; identical to SEQ ID NO: 21007

SEQ ID NO: 42473 - DNA, 201 bp, Homo sapiens; identical to SEQ ID NO: 22333

SEQ ID NO: 42474 - DNA, 201 bp, Homo sapiens; identical to SEQ ID NO: 21009

SEQ ID NO: 42475 - DNA, 201 bp, Homo sapiens; identical to SEQ ID NO: 22334

SEQ ID NO: 42476 - DNA, 201 bp, Homo sapiens; identical to SEQ ID NO: 22562

SEQ ID NO: 42477 - DNA, 201 bp, Homo sapiens; identical to SEQ ID NO: 19383

SEQ ID NO: 42478 - DNA, 201 bp, Homo sapiens; identical to SEQ ID NO: 18691

SEQ ID NO: 42479 - DNA, 201 bp, Homo sapiens; identical to SEQ ID NO: 18695

SEQ ID NO: 42480 - DNA, 201 bp, Homo sapiens; identical to SEQ ID NO: 18700

SEQ ID NO: 42481 - DNA, 201 bp, Homo sapiens; identical to SEQ ID NO: 21462

SEQ ID NO: 42482 - DNA, 201 bp, Homo sapiens; identical to SEQ ID NO: 18701

SEQ ID NO: 42483 - DNA, 201 bp, Homo sapiens; identical to SEQ ID NO: 22915

SEQ ID NO: 42484 - DNA, 201 bp, Homo sapiens; identical to SEQ ID NO: 18409

SEQ ID NO: 42485 - DNA, 201 bp, Homo sapiens; identical to SEQ ID NO: 22916

SEQ ID NO: 42486 - DNA, 201 bp, Homo sapiens; identical to SEQ ID NO: 20145

SEQ ID NO: 42487 - DNA, 201 bp, Homo sapiens; identical to SEQ ID NO: 18856

SEQ ID NO: 42488 - DNA, 201 bp, Homo sapiens; identical to SEQ ID NO: 18857

SEQ ID NO: 42489 - DNA, 201 bp, Homo sapiens; identical to SEQ ID NO: 18858

SEQ ID NO: 42490 - DNA, 201 bp, Homo sapiens; identical to SEQ ID NO: 23212

SEQ ID NO: 42491 - DNA, 201 bp, Homo sapiens; identical to SEQ ID NO: 20556

SEQ ID NO: 42492 - DNA, 201 bp, Homo sapiens; identical to SEQ ID NO: 19985

SEQ ID NO: 42493 - DNA, 201 bp, Homo sapiens; identical to SEQ ID NO: 18505

SEQ ID NO: 42494 - DNA, 201 bp, Homo sapiens; identical to SEQ ID NO: 19986

SEQ ID NO: 42495 - DNA, 201 bp, Homo sapiens; identical to SEQ ID NO: 19987

SEQ ID NO: 42496 - DNA, 201 bp, Homo sapiens; identical to SEQ ID NO: 21850

SEQ ID NO: 42497 - DNA, 201 bp, Homo sapiens; identical to SEQ ID NO: 20078

SEQ ID NO: 42498 - DNA, 201 bp, Homo sapiens; identical to SEQ ID NO: 18722

SEQ ID NO: 42499 - DNA, 201 bp, Homo sapiens; identical to SEQ ID NO: 23459

SEQ ID NO: 42500 - DNA, 201 bp, Homo sapiens; identical to SEQ ID NO: 23461

SEQ ID NO: 42501 - DNA, 201 bp, Homo sapiens; identical to SEQ ID NO: 18725

SEQ ID NO: 42502 - DNA, 201 bp, Homo sapiens; identical to SEQ ID NO: 22827

SEQ ID NO: 42503 - DNA, 201 bp, Homo sapiens; identical to SEQ ID NO: 18727

SEQ ID NO: 42504 - DNA, 201 bp, Homo sapiens; identical to SEQ ID NO: 22830

SEQ ID NO: 42505 - DNA, 201 bp, Homo sapiens; identical to SEQ ID NO: 22833

SEQ ID NO: 42506 - DNA, 201 bp, Homo sapiens; identical to SEQ ID NO: 22943

SEQ ID NO: 42507 - DNA, 201 bp, Homo sapiens; identical to SEQ ID NO: 18892

SEQ ID NO: 42508 - DNA, 201 bp, Homo sapiens; identical to SEQ ID NO: 22945

SEQ ID NO: 42509 - DNA, 201 bp, Homo sapiens; identical to SEQ ID NO: 22947

SEQ ID NO: 42510 - DNA, 201 bp, Homo sapiens; identical to SEQ ID NO: 22373

SEQ ID NO: 42511 - DNA, 201 bp, Homo sapiens; identical to SEQ ID NO: 18898

SEQ ID NO: 42512 - DNA, 201 bp, Homo sapiens; identical to SEQ ID NO: 22949

SEQ ID NO: 42513 - DNA, 201 bp, Homo sapiens; identical to SEQ ID NO: 22374

SEQ ID NO: 42514 - DNA, 201 bp, Homo sapiens; identical to SEQ ID NO: 19435

SEQ ID NO: 42515 - DNA, 201 bp, Homo sapiens; identical to SEQ ID NO: 22375

SEQ ID NO: 42516 - DNA, 201 bp, Homo sapiens; identical to SEQ ID NO: 22954

SEQ ID NO: 42517 - DNA, 201 bp, Homo sapiens; identical to SEQ ID NO: 23470

SEQ ID NO: 42518 - DNA, 201 bp, Homo sapiens; identical to SEQ ID NO: 22957

SEQ ID NO: 42519 - DNA, 201 bp, Homo sapiens; identical to SEQ ID NO: 20017

SEQ ID NO: 42520 - DNA, 201 bp, Homo sapiens; identical to SEQ ID NO: 19723

SEQ ID NO: 42521 - DNA, 201 bp, Homo sapiens; identical to SEQ ID NO: 19585

SEQ ID NO: 42522 - DNA, 201 bp, Homo sapiens; identical to SEQ ID NO: 20019

SEQ ID NO: 42523 - DNA, 201 bp, Homo sapiens; identical to SEQ ID NO: 19589

SEQ ID NO: 42524 - DNA, 201 bp, Homo sapiens; identical to SEQ ID NO: 20020

SEQ ID NO: 42525 - DNA, 201 bp, Homo sapiens; identical to SEQ ID NO: 22521

SEQ ID NO: 42526 - DNA, 201 bp, Homo sapiens; identical to SEQ ID NO: 20021

SEQ ID NO: 42527 - DNA, 201 bp, Homo sapiens; identical to SEQ ID NO: 21973

SEQ ID NO: 42528 - DNA, 201 bp, Homo sapiens; identical to SEQ ID NO: 23182

SEQ ID NO: 42529 - DNA, 201 bp, Homo sapiens; identical to SEQ ID NO: 22741

SEQ ID NO: 42530 - DNA, 201 bp, Homo sapiens; identical to SEQ ID NO: 19453

SEQ ID NO: 42531 - DNA, 201 bp, Homo sapiens; identical to SEQ ID NO: 18220

SEQ ID NO: 42532 - DNA, 201 bp, Homo sapiens; identical to SEQ ID NO: 22857

SEQ ID NO: 42533 - DNA, 201 bp, Homo sapiens; identical to SEQ ID NO: 22609

SEQ ID NO: 42534 - DNA, 201 bp, Homo sapiens; identical to SEQ ID NO: 18538

SEQ ID NO: 42535 - DNA, 201 bp, Homo sapiens; identical to SEQ ID NO: 22858

SEQ ID NO: 42536 - DNA, 201 bp, Homo sapiens; identical to SEQ ID NO: 22859

SEQ ID NO: 42537 - DNA, 201 bp, Homo sapiens; identical to SEQ ID NO: 22861

SEQ ID NO: 42538 - DNA, 201 bp, Homo sapiens; identical to SEQ ID NO: 18774

SEQ ID NO: 42539 - DNA, 201 bp, Homo sapiens; identical to SEQ ID NO: 23229

SEQ ID NO: 42540 - DNA, 201 bp, Homo sapiens; identical to SEQ ID NO: 18775

SEQ ID NO: 42541 - DNA, 201 bp, Homo sapiens; identical to SEQ ID NO: 23230

SEQ ID NO: 42542 - DNA, 201 bp, Homo sapiens; identical to SEQ ID NO: 18778

SEQ ID NO: 42543 - DNA, 201 bp, Homo sapiens; identical to SEQ ID NO: 22865

SEQ ID NO: 42544 - DNA, 201 bp, Homo sapiens; identical to SEQ ID NO: 18780

SEQ ID NO: 42545 - DNA, 201 bp, Homo sapiens; identical to SEQ ID NO: 22993

SEQ ID NO: 42546 - DNA, 201 bp, Homo sapiens; identical to SEQ ID NO: 18781

SEQ ID NO: 42547 - DNA, 201 bp, Homo sapiens; identical to SEQ ID NO: 18782

SEQ ID NO: 42548 - DNA, 201 bp, Homo sapiens; identical to SEQ ID NO: 22996

SEQ ID NO: 42549 - DNA, 201 bp, Homo sapiens; identical to SEQ ID NO: 22998

SEQ ID NO: 42550 - DNA, 201 bp, Homo sapiens; identical to SEQ ID NO: 23001

SEQ ID NO: 42551 - DNA, 201 bp, Homo sapiens; identical to SEQ ID NO: 22384

SEQ ID NO: 42552 - DNA, 201 bp, Homo sapiens; identical to SEQ ID NO: 19153

SEQ ID NO: 42553 - DNA, 201 bp, Homo sapiens; identical to SEQ ID NO: 21911

SEQ ID NO: 42554 - DNA, 201 bp, Homo sapiens; identical to SEQ ID NO: 20049

SEQ ID NO: 42555 - DNA, 201 bp, Homo sapiens; identical to SEQ ID NO: 22728

SEQ ID NO: 42556 - DNA, 201 bp, Homo sapiens; identical to SEQ ID NO: 23501

SEQ ID NO: 42557 - DNA, 201 bp, Homo sapiens; identical to SEQ ID NO: 22763

SEQ ID NO: 42558 - DNA, 201 bp, Homo sapiens; identical to SEQ ID NO: 23503

SEQ ID NO: 42559 - DNA, 201 bp, Homo sapiens; identical to SEQ ID NO: 22765

SEQ ID NO: 42560 - DNA, 201 bp, Homo sapiens; identical to SEQ ID NO: 18664

SEQ ID NO: 42561 - DNA, 201 bp, Homo sapiens; identical to SEQ ID NO: 22767

SEQ ID NO: 42562 - DNA, 201 bp, Homo sapiens; identical to SEQ ID NO: 18665

SEQ ID NO: 42563 - DNA, 201 bp, Homo sapiens; identical to SEQ ID NO: 22768

SEQ ID NO: 42564 - DNA, 201 bp, Homo sapiens; identical to SEQ ID NO: 18666

SEQ ID NO: 42565 - DNA, 201 bp, Homo sapiens; identical to SEQ ID NO: 18670

SEQ ID NO: 42566 - DNA, 201 bp, Homo sapiens; identical to SEQ ID NO: 21561

SEQ ID NO: 42567 - DNA, 201 bp, Homo sapiens; identical to SEQ ID NO: 18671

SEQ ID NO: 42568 - DNA, 201 bp, Homo sapiens; identical to SEQ ID NO: 18672

SEQ ID NO: 42569 - DNA, 201 bp, Homo sapiens; identical to SEQ ID NO: 18673

SEQ ID NO: 42570 - DNA, 201 bp, Homo sapiens; identical to SEQ ID NO: 18674

SEQ ID NO: 42571 - DNA, 201 bp, Homo sapiens; identical to SEQ ID NO: 18675

SEQ ID NO: 42572 - DNA, 201 bp, Homo sapiens; identical to SEQ ID NO: 22777

SEQ ID NO: 42573 - DNA, 201 bp, Homo sapiens; identical to SEQ ID NO: 22779

SEQ ID NO: 42574 - DNA, 201 bp, Homo sapiens; identical to SEQ ID NO: 22781

SEQ ID NO: 42575 - DNA, 201 bp, Homo sapiens; identical to SEQ ID NO: 22783

SEQ ID NO: 42576 - DNA, 201 bp, Homo sapiens; identical to SEQ ID NO: 22785

SEQ ID NO: 42577 - DNA, 201 bp, Homo sapiens; identical to SEQ ID NO: 20904

SEQ ID NO: 42578 - DNA, 201 bp, Homo sapiens; identical to SEQ ID NO: 23517

SEQ ID NO: 42579 - DNA, 201 bp, Homo sapiens; identical to SEQ ID NO: 22786

SEQ ID NO: 42580 - DNA, 201 bp, Homo sapiens; identical to SEQ ID NO: 22788

SEQ ID NO: 42581 - DNA, 201 bp, Homo sapiens; identical to SEQ ID NO: 23287

SEQ ID NO: 42582 - DNA, 201 bp, Homo sapiens; identical to SEQ ID NO: 22789

SEQ ID NO: 42583 - DNA, 201 bp, Homo sapiens; identical to SEQ ID NO: 21781

SEQ ID NO: 42584 - DNA, 201 bp, Homo sapiens; identical to SEQ ID NO: 20508

SEQ ID NO: 42585 - DNA, 201 bp, Homo sapiens; identical to SEQ ID NO: 20510

SEQ ID NO: 42586 - DNA, 201 bp, Homo sapiens; identical to SEQ ID NO: 21577

SEQ ID NO: 42587 - DNA, 201 bp, Homo sapiens; identical to SEQ ID NO: 21782

SEQ ID NO: 42588 - DNA, 201 bp, Homo sapiens; identical to SEQ ID NO: 21579

SEQ ID NO: 42589 - DNA, 201 bp, Homo sapiens; identical to SEQ ID NO: 21783

SEQ ID NO: 42590 - DNA, 201 bp, Homo sapiens; identical to SEQ ID NO: 21784

SEQ ID NO: 42591 - DNA, 201 bp, Homo sapiens; identical to SEQ ID NO: 22794

SEQ ID NO: 42592 - DNA, 201 bp, Homo sapiens; identical to SEQ ID NO: 20513

SEQ ID NO: 42593 - DNA, 201 bp, Homo sapiens; identical to SEQ ID NO: 18690

SEQ ID NO: 42594 - DNA, 201 bp, Homo sapiens; identical to SEQ ID NO: 18693

SEQ ID NO: 42595 - DNA, 201 bp, Homo sapiens; identical to SEQ ID NO: 18697

SEQ ID NO: 42596 - DNA, 201 bp, Homo sapiens; identical to SEQ ID NO: 18698

SEQ ID NO: 42597 - DNA, 201 bp, Homo sapiens; identical to SEQ ID NO: 20543

SEQ ID NO: 42598 - DNA, 201 bp, Homo sapiens; identical to SEQ ID NO: 18699

SEQ ID NO: 42599 - DNA, 201 bp, Homo sapiens; identical to SEQ ID NO: 18702

SEQ ID NO: 42600 - DNA, 201 bp, Homo sapiens; identical to SEQ ID NO: 22803

SEQ ID NO: 42601 - DNA, 201 bp, Homo sapiens; identical to SEQ ID NO: 22805

SEQ ID NO: 42602 - DNA, 201 bp, Homo sapiens; identical to SEQ ID NO: 22811

SEQ ID NO: 42603 - DNA, 201 bp, Homo sapiens; identical to SEQ ID NO: 22193

SEQ ID NO: 42604 - DNA, 201 bp, Homo sapiens; identical to SEQ ID NO: 22813

SEQ ID NO: 42605 - DNA, 201 bp, Homo sapiens; identical to SEQ ID NO: 21797

SEQ ID NO: 42606 - DNA, 201 bp, Homo sapiens; identical to SEQ ID NO: 22816

SEQ ID NO: 42607 - DNA, 201 bp, Homo sapiens; identical to SEQ ID NO: 23299

SEQ ID NO: 42608 - DNA, 201 bp, Homo sapiens; identical to SEQ ID NO: 21798

SEQ ID NO: 42609 - DNA, 201 bp, Homo sapiens; identical to SEQ ID NO: 22818

SEQ ID NO: 42610 - DNA, 201 bp, Homo sapiens; identical to SEQ ID NO: 23300

SEQ ID NO: 42611 - DNA, 201 bp, Homo sapiens; identical to SEQ ID NO: 21800

SEQ ID NO: 42612 - DNA, 201 bp, Homo sapiens; identical to SEQ ID NO: 22819

SEQ ID NO: 42613 - DNA, 201 bp, Homo sapiens; identical to SEQ ID NO: 21801

SEQ ID NO: 42614 - DNA, 201 bp, Homo sapiens; identical to SEQ ID NO: 21803

SEQ ID NO: 42615 - DNA, 201 bp, Homo sapiens; identical to SEQ ID NO: 21804

SEQ ID NO: 42616 - DNA, 201 bp, Homo sapiens; identical to SEQ ID NO: 21805

SEQ ID NO: 42617 - DNA, 201 bp, Homo sapiens; identical to SEQ ID NO: 21807

SEQ ID NO: 42618 - DNA, 201 bp, Homo sapiens; identical to SEQ ID NO: 21892

SEQ ID NO: 42619 - DNA, 201 bp, Homo sapiens; identical to SEQ ID NO: 23556

SEQ ID NO: 42620 - DNA, 201 bp, Homo sapiens; identical to SEQ ID NO: 21628

SEQ ID NO: 42621 - DNA, 201 bp, Homo sapiens; identical to SEQ ID NO: 18718

SEQ ID NO: 42622 - DNA, 201 bp, Homo sapiens; identical to SEQ ID NO: 21630

SEQ ID NO: 42623 - DNA, 201 bp, Homo sapiens; identical to SEQ ID NO: 18719

SEQ ID NO: 42624 - DNA, 201 bp, Homo sapiens; identical to SEQ ID NO: 21894

SEQ ID NO: 42625 - DNA, 201 bp, Homo sapiens; identical to SEQ ID NO: 18720

SEQ ID NO: 42626 - DNA, 201 bp, Homo sapiens; identical to SEQ ID NO: 21633

SEQ ID NO: 42627 - DNA, 201 bp, Homo sapiens; identical to SEQ ID NO: 21636

SEQ ID NO: 42628 - DNA, 201 bp, Homo sapiens; identical to SEQ ID NO: 18724

SEQ ID NO: 42629 - DNA, 201 bp, Homo sapiens; identical to SEQ ID NO: 18728

SEQ ID NO: 42630 - DNA, 201 bp, Homo sapiens; identical to SEQ ID NO: 18729

SEQ ID NO: 42631 - DNA, 201 bp, Homo sapiens; identical to SEQ ID NO: 20947

SEQ ID NO: 42632 - DNA, 201 bp, Homo sapiens; identical to SEQ ID NO: 18730

SEQ ID NO: 42633 - DNA, 201 bp, Homo sapiens; identical to SEQ ID NO: 22835

SEQ ID NO: 42634 - DNA, 201 bp, Homo sapiens; identical to SEQ ID NO: 22837

SEQ ID NO: 42635 - DNA, 201 bp, Homo sapiens; identical to SEQ ID NO: 22839

SEQ ID NO: 42636 - DNA, 201 bp, Homo sapiens; identical to SEQ ID NO: 22842

SEQ ID NO: 42637 - DNA, 201 bp, Homo sapiens; identical to SEQ ID NO: 22844

SEQ ID NO: 42638 - DNA, 201 bp, Homo sapiens; identical to SEQ ID NO: 22850

SEQ ID NO: 42639 - DNA, 201 bp, Homo sapiens; identical to SEQ ID NO: 22852

SEQ ID NO: 42640 - DNA, 201 bp, Homo sapiens; identical to SEQ ID NO: 22853

SEQ ID NO: 42641 - DNA, 201 bp, Homo sapiens; identical to SEQ ID NO: 22855

SEQ ID NO: 42642 - DNA, 201 bp, Homo sapiens; identical to SEQ ID NO: 20636

SEQ ID NO: 42643 - DNA, 201 bp, Homo sapiens; identical to SEQ ID NO: 22207

SEQ ID NO: 42644 - DNA, 201 bp, Homo sapiens; identical to SEQ ID NO: 22208

SEQ ID NO: 42645 - DNA, 201 bp, Homo sapiens; identical to SEQ ID NO: 22210

SEQ ID NO: 42646 - DNA, 201 bp, Homo sapiens; identical to SEQ ID NO: 22211

SEQ ID NO: 42647 - DNA, 201 bp, Homo sapiens; identical to SEQ ID NO: 18767

SEQ ID NO: 42648 - DNA, 201 bp, Homo sapiens; identical to SEQ ID NO: 18768

SEQ ID NO: 42649 - DNA, 201 bp, Homo sapiens; identical to SEQ ID NO: 18769

SEQ ID NO: 42650 - DNA, 201 bp, Homo sapiens; identical to SEQ ID NO: 22213

SEQ ID NO: 42651 - DNA, 201 bp, Homo sapiens; identical to SEQ ID NO: 20974

SEQ ID NO: 42652 - DNA, 201 bp, Homo sapiens; identical to SEQ ID NO: 23593

SEQ ID NO: 42653 - DNA, 201 bp, Homo sapiens; identical to SEQ ID NO: 20976

SEQ ID NO: 42654 - DNA, 201 bp, Homo sapiens; identical to SEQ ID NO: 23594

SEQ ID NO: 42655 - DNA, 201 bp, Homo sapiens; identical to SEQ ID NO: 20978

SEQ ID NO: 42656 - DNA, 201 bp, Homo sapiens; identical to SEQ ID NO: 23595

SEQ ID NO: 42657 - DNA, 201 bp, Homo sapiens; identical to SEQ ID NO: 22870

SEQ ID NO: 42658 - DNA, 201 bp, Homo sapiens; identical to SEQ ID NO: 20980

SEQ ID NO: 42659 - DNA, 201 bp, Homo sapiens; identical to SEQ ID NO: 23596

SEQ ID NO: 42660 - DNA, 201 bp, Homo sapiens; identical to SEQ ID NO: 22872

SEQ ID NO: 42661 - DNA, 201 bp, Homo sapiens; identical to SEQ ID NO: 23598

SEQ ID NO: 42662 - DNA, 201 bp, Homo sapiens; identical to SEQ ID NO: 18549

SEQ ID NO: 42663 - DNA, 201 bp, Homo sapiens; identical to SEQ ID NO: 23599

SEQ ID NO: 42664 - DNA, 201 bp, Homo sapiens; identical to SEQ ID NO: 20199

SEQ ID NO: 42665 - DNA, 201 bp, Homo sapiens; identical to SEQ ID NO: 18551

SEQ ID NO: 42666 - DNA, 201 bp, Homo sapiens; identical to SEQ ID NO: 18553

SEQ ID NO: 42667 - DNA, 201 bp, Homo sapiens; identical to SEQ ID NO: 21388

SEQ ID NO: 42668 - DNA, 201 bp, Homo sapiens; identical to SEQ ID NO: 22884

SEQ ID NO: 42669 - DNA, 201 bp, Homo sapiens; identical to SEQ ID NO: 22223

SEQ ID NO: 42670 - DNA, 201 bp, Homo sapiens; identical to SEQ ID NO: 22886

SEQ ID NO: 42671 - DNA, 201 bp, Homo sapiens; identical to SEQ ID NO: 20102

SEQ ID NO: 42672 - DNA, 201 bp, Homo sapiens; identical to SEQ ID NO: 21394

SEQ ID NO: 42673 - DNA, 201 bp, Homo sapiens; identical to SEQ ID NO: 23370

SEQ ID NO: 42674 - DNA, 201 bp, Homo sapiens; identical to SEQ ID NO: 20103

SEQ ID NO: 42675 - DNA, 201 bp, Homo sapiens; identical to SEQ ID NO: 20713

SEQ ID NO: 42676 - DNA, 201 bp, Homo sapiens; identical to SEQ ID NO: 21401

SEQ ID NO: 42677 - DNA, 201 bp, Homo sapiens; identical to SEQ ID NO: 22228

SEQ ID NO: 42678 - DNA, 201 bp, Homo sapiens; identical to SEQ ID NO: 22230

SEQ ID NO: 42679 - DNA, 201 bp, Homo sapiens; identical to SEQ ID NO: 22231

SEQ ID NO: 42680 - DNA, 201 bp, Homo sapiens; identical to SEQ ID NO: 22232

SEQ ID NO: 42681 - DNA, 201 bp, Homo sapiens; identical to SEQ ID NO: 20998

SEQ ID NO: 42682 - DNA, 201 bp, Homo sapiens; identical to SEQ ID NO: 21001

SEQ ID NO: 42683 - DNA, 201 bp, Homo sapiens; identical to SEQ ID NO: 21002

SEQ ID NO: 42684 - DNA, 201 bp, Homo sapiens; identical to SEQ ID NO: 21003

SEQ ID NO: 42685 - DNA, 201 bp, Homo sapiens; identical to SEQ ID NO: 21004

SEQ ID NO: 42686 - DNA, 201 bp, Homo sapiens; identical to SEQ ID NO: 22327

SEQ ID NO: 42687 - DNA, 201 bp, Homo sapiens; identical to SEQ ID NO: 21005

SEQ ID NO: 42688 - DNA, 201 bp, Homo sapiens; identical to SEQ ID NO: 20126

SEQ ID NO: 42689 - DNA, 201 bp, Homo sapiens; identical to SEQ ID NO: 18569

SEQ ID NO: 42690 - DNA, 201 bp, Homo sapiens; identical to SEQ ID NO: 23402

SEQ ID NO: 42691 - DNA, 201 bp, Homo sapiens; identical to SEQ ID NO: 18570

SEQ ID NO: 42692 - DNA, 201 bp, Homo sapiens; identical to SEQ ID NO: 23403

SEQ ID NO: 42693 - DNA, 201 bp, Homo sapiens; identical to SEQ ID NO: 23404

SEQ ID NO: 42694 - DNA, 201 bp, Homo sapiens; identical to SEQ ID NO: 18572

SEQ ID NO: 42695 - DNA, 201 bp, Homo sapiens; identical to SEQ ID NO: 18574

SEQ ID NO: 42696 - DNA, 201 bp, Homo sapiens; identical to SEQ ID NO: 18577

SEQ ID NO: 42697 - DNA, 201 bp, Homo sapiens; identical to SEQ ID NO: 22907

SEQ ID NO: 42698 - DNA, 201 bp, Homo sapiens; identical to SEQ ID NO: 18578

SEQ ID NO: 42699 - DNA, 201 bp, Homo sapiens; identical to SEQ ID NO: 18579

SEQ ID NO: 42700 - DNA, 201 bp, Homo sapiens; identical to SEQ ID NO: 23409

SEQ ID NO: 42701 - DNA, 201 bp, Homo sapiens; identical to SEQ ID NO: 18580

SEQ ID NO: 42702 - DNA, 201 bp, Homo sapiens; identical to SEQ ID NO: 18582

SEQ ID NO: 42703 - DNA, 201 bp, Homo sapiens; identical to SEQ ID NO: 18583

SEQ ID NO: 42704 - DNA, 201 bp, Homo sapiens; identical to SEQ ID NO: 21709

SEQ ID NO: 42705 - DNA, 201 bp, Homo sapiens; identical to SEQ ID NO: 21712

SEQ ID NO: 42706 - DNA, 201 bp, Homo sapiens; identical to SEQ ID NO: 21714

SEQ ID NO: 42707 - DNA, 201 bp, Homo sapiens; identical to SEQ ID NO: 21468

SEQ ID NO: 42708 - DNA, 201 bp, Homo sapiens; identical to SEQ ID NO: 21716

SEQ ID NO: 42709 - DNA, 201 bp, Homo sapiens; identical to SEQ ID NO: 19426

SEQ ID NO: 42710 - DNA, 201 bp, Homo sapiens; identical to SEQ ID NO: 21718

SEQ ID NO: 42711 - DNA, 201 bp, Homo sapiens; identical to SEQ ID NO: 21720

SEQ ID NO: 42712 - DNA, 201 bp, Homo sapiens; identical to SEQ ID NO: 21021

SEQ ID NO: 42713 - DNA, 201 bp, Homo sapiens; identical to SEQ ID NO: 20146

SEQ ID NO: 42714 - DNA, 201 bp, Homo sapiens; identical to SEQ ID NO: 21022

SEQ ID NO: 42715 - DNA, 201 bp, Homo sapiens; identical to SEQ ID NO: 23443

SEQ ID NO: 42716 - DNA, 201 bp, Homo sapiens; identical to SEQ ID NO: 22575

SEQ ID NO: 42717 - DNA, 201 bp, Homo sapiens; identical to SEQ ID NO: 23444

SEQ ID NO: 42718 - DNA, 201 bp, Homo sapiens; identical to SEQ ID NO: 18600

SEQ ID NO: 42719 - DNA, 201 bp, Homo sapiens; identical to SEQ ID NO: 18601

SEQ ID NO: 42720 - DNA, 201 bp, Homo sapiens; identical to SEQ ID NO: 18602

SEQ ID NO: 42721 - DNA, 201 bp, Homo sapiens; identical to SEQ ID NO: 22932

SEQ ID NO: 42722 - DNA, 201 bp, Homo sapiens; identical to SEQ ID NO: 18604

SEQ ID NO: 42723 - DNA, 201 bp, Homo sapiens; identical to SEQ ID NO: 18605

SEQ ID NO: 42724 - DNA, 201 bp, Homo sapiens; identical to SEQ ID NO: 22933

SEQ ID NO: 42725 - DNA, 201 bp, Homo sapiens; identical to SEQ ID NO: 18606

SEQ ID NO: 42726 - DNA, 201 bp, Homo sapiens; identical to SEQ ID NO: 22934

SEQ ID NO: 42727 - DNA, 201 bp, Homo sapiens; identical to SEQ ID NO: 18607

SEQ ID NO: 42728 - DNA, 201 bp, Homo sapiens; identical to SEQ ID NO: 18608

SEQ ID NO: 42729 - DNA, 201 bp, Homo sapiens; identical to SEQ ID NO: 18611

SEQ ID NO: 42730 - DNA, 201 bp, Homo sapiens; identical to SEQ ID NO: 18612

SEQ ID NO: 42731 - DNA, 201 bp, Homo sapiens; identical to SEQ ID NO: 22257

SEQ ID NO: 42732 - DNA, 201 bp, Homo sapiens; identical to SEQ ID NO: 21505

SEQ ID NO: 42733 - DNA, 201 bp, Homo sapiens; identical to SEQ ID NO: 21739

SEQ ID NO: 42734 - DNA, 201 bp, Homo sapiens; identical to SEQ ID NO: 21511

SEQ ID NO: 42735 - DNA, 201 bp, Homo sapiens; identical to SEQ ID NO: 21030

SEQ ID NO: 42736 - DNA, 201 bp, Homo sapiens; identical to SEQ ID NO: 21740

SEQ ID NO: 42737 - DNA, 201 bp, Homo sapiens; identical to SEQ ID NO: 21741

SEQ ID NO: 42738 - DNA, 201 bp, Homo sapiens; identical to SEQ ID NO: 21513

SEQ ID NO: 42739 - DNA, 201 bp, Homo sapiens; identical to SEQ ID NO: 21744

SEQ ID NO: 42740 - DNA, 201 bp, Homo sapiens; identical to SEQ ID NO: 20249

SEQ ID NO: 42741 - DNA, 201 bp, Homo sapiens; identical to SEQ ID NO: 22264

SEQ ID NO: 42742 - DNA, 201 bp, Homo sapiens; identical to SEQ ID NO: 21746

SEQ ID NO: 42743 - DNA, 201 bp, Homo sapiens; identical to SEQ ID NO: 21748

SEQ ID NO: 42744 - DNA, 201 bp, Homo sapiens; identical to SEQ ID NO: 20429

SEQ ID NO: 42745 - DNA, 201 bp, Homo sapiens; identical to SEQ ID NO: 22736

SEQ ID NO: 42746 - DNA, 201 bp, Homo sapiens; identical to SEQ ID NO: 20430

SEQ ID NO: 42747 - DNA, 201 bp, Homo sapiens; identical to SEQ ID NO: 18635

SEQ ID NO: 42748 - DNA, 201 bp, Homo sapiens; identical to SEQ ID NO: 18636

SEQ ID NO: 42749 - DNA, 201 bp, Homo sapiens; identical to SEQ ID NO: 18637

SEQ ID NO: 42750 - DNA, 201 bp, Homo sapiens; identical to SEQ ID NO: 18639

SEQ ID NO: 42751 - DNA, 201 bp, Homo sapiens; identical to SEQ ID NO: 22975

SEQ ID NO: 42752 - DNA, 201 bp, Homo sapiens; identical to SEQ ID NO: 18641

SEQ ID NO: 42753 - DNA, 201 bp, Homo sapiens; identical to SEQ ID NO: 18643

SEQ ID NO: 42754 - DNA, 201 bp, Homo sapiens; identical to SEQ ID NO: 18644

SEQ ID NO: 42755 - DNA, 201 bp, Homo sapiens; identical to SEQ ID NO: 21534

SEQ ID NO: 42756 - DNA, 201 bp, Homo sapiens; identical to SEQ ID NO: 18646

SEQ ID NO: 42757 - DNA, 201 bp, Homo sapiens; identical to SEQ ID NO: 22743

SEQ ID NO: 42758 - DNA, 201 bp, Homo sapiens; identical to SEQ ID NO: 20160

SEQ ID NO: 42759 - DNA, 201 bp, Homo sapiens; identical to SEQ ID NO: 18647

SEQ ID NO: 42760 - DNA, 201 bp, Homo sapiens; identical to SEQ ID NO: 20161

SEQ ID NO: 42761 - DNA, 201 bp, Homo sapiens; identical to SEQ ID NO: 22268

SEQ ID NO: 42762 - DNA, 201 bp, Homo sapiens; identical to SEQ ID NO: 22269

SEQ ID NO: 42763 - DNA, 201 bp, Homo sapiens; identical to SEQ ID NO: 19344

SEQ ID NO: 42764 - DNA, 201 bp, Homo sapiens; identical to SEQ ID NO: 21768

SEQ ID NO: 42765 - DNA, 201 bp, Homo sapiens; identical to SEQ ID NO: 20463

SEQ ID NO: 42766 - DNA, 201 bp, Homo sapiens; identical to SEQ ID NO: 20465

SEQ ID NO: 42767 - DNA, 201 bp, Homo sapiens; identical to SEQ ID NO: 22759

SEQ ID NO: 42768 - DNA, 201 bp, Homo sapiens; identical to SEQ ID NO: 21769

SEQ ID NO: 42769 - DNA, 201 bp, Homo sapiens; identical to SEQ ID NO: 21771

SEQ ID NO: 42770 - DNA, 201 bp, Homo sapiens; identical to SEQ ID NO: 22761

SEQ ID NO: 42771 - DNA, 201 bp, Homo sapiens; identical to SEQ ID NO: 20470

SEQ ID NO: 42772 - DNA, 201 bp, Homo sapiens; identical to SEQ ID NO: 22762

SEQ ID NO: 42773 - DNA, 201 bp, Homo sapiens; identical to SEQ ID NO: 20471

SEQ ID NO: 42774 - DNA, 201 bp, Homo sapiens
tcagtatacccaataatacaatcttaactccattattgagagtcaaaagacttgagacgttcaacttatttgagcctacatttccttaactataaaaagayaggtatatgaacaactacctcccagggttattgcaaggattcatttcttaagaacctattatactaagggctggtcatggtggctcatgcctataatccc

SEQ ID NO: 42775 - DNA, 201 bp, Homo sapiens
cttcccaactccctaaaatgccttaggatttttccacttagatttagtttgcaggttaagttataaatgtctacaaaacaactgctttgcaggaaaatccytgaccccctaagaatgatctctctcactgttccagacagtccattttataaggaagtgacatacctcctcatcagcactcccctcagtatacccaataat

SEQ ID NO: 42776 - DNA, 201 bp, Homo sapiens
ttttccacttagatttagtttgcaggttaagttataaatgtctacaaaacaactgctttgcaggaaaatccctgaccccctaagaatgatctctctcactsttccagacagtccattttataaggaagtgacatacctcctcatcagcactcccctcagtatacccaataatacaatcttaactccattattgagagtcaa

SEQ ID NO: 42777 - DNA, 201 bp, Homo sapiens; identical to SEQ ID NO: 7969

SEQ ID NO: 42778 - DNA, 201 bp, Homo sapiens; identical to SEQ ID NO: 8405

SEQ ID NO: 42779 - DNA, 201 bp, Homo sapiens; identical to SEQ ID NO: 7970

SEQ ID NO: 42780 - DNA, 201 bp, Homo sapiens; identical to SEQ ID NO: 7972

SEQ ID NO: 42781 - DNA, 201 bp, Homo sapiens; identical to SEQ ID NO: 8379

SEQ ID NO: 42782 - DNA, 201 bp, Homo sapiens; identical to SEQ ID NO: 8054

SEQ ID NO: 42783 - DNA, 201 bp, Homo sapiens; identical to SEQ ID NO: 8351

SEQ ID NO: 42784 - DNA, 201 bp, Homo sapiens; identical to SEQ ID NO: 8206

SEQ ID NO: 42785 - DNA, 201 bp, Homo sapiens; identical to SEQ ID NO: 8056

SEQ ID NO: 42786 - DNA, 201 bp, Homo sapiens; identical to SEQ ID NO: 8382

SEQ ID NO: 42787 - DNA, 201 bp, Homo sapiens; identical to SEQ ID NO: 8057

SEQ ID NO: 42788 - DNA, 201 bp, Homo sapiens; identical to SEQ ID NO: 20551

SEQ ID NO: 42789 - DNA, 201 bp, Homo sapiens; identical to SEQ ID NO: 19005

SEQ ID NO: 42790 - DNA, 201 bp, Homo sapiens; identical to SEQ ID NO: 20618

SEQ ID NO: 42791 - DNA, 201 bp, Homo sapiens; identical to SEQ ID NO: 19380

SEQ ID NO: 42792 - DNA, 201 bp, Homo sapiens; identical to SEQ ID NO: 19501

SEQ ID NO: 42793 - DNA, 201 bp, Homo sapiens; identical to SEQ ID NO: 19503

SEQ ID NO: 42794 - DNA, 201 bp, Homo sapiens; identical to SEQ ID NO: 20511

SEQ ID NO: 42795 - DNA, 201 bp, Homo sapiens; identical to SEQ ID NO: 8203

SEQ ID NO: 42796 - DNA, 201 bp, Homo sapiens; identical to SEQ ID NO: 8194

SEQ ID NO: 42797 - DNA, 201 bp, Homo sapiens; identical to SEQ ID NO: 8185

SEQ ID NO: 42798 - DNA, 201 bp, Homo sapiens; identical to SEQ ID NO: 8188

SEQ ID NO: 42799 - DNA, 201 bp, Homo sapiens; identical to SEQ ID NO: 8190

SEQ ID NO: 42800 - DNA, 201 bp, Homo sapiens; identical to SEQ ID NO: 8209

SEQ ID NO: 42801 - DNA, 201 bp, Homo sapiens
agtttgagaacttgcggatccaacatccaaaaggggtgctggcccccagggacggagaagaccctcctggcctgggcctgtagggcacagactaaggccamcttcctaaagctgactggcccccagctggtgcagatgttcactggagatggtgccaagctagtccgggatgccttcgccctggccaaggagaaagcgccc

SEQ ID NO: 42802 - DNA, 201 bp, Homo sapiens
gtgaaaccccatctctactaaaaattcaaaaactagaaaagaagatggcaaccgtgtgggatgaggccaagcaagatggaactggggtggaggtgctcaasatgtccacggaggagatcatccagcgcacatggcttctggacagtgagatcaagatcatgaagagttaactgttgagagtcacccatgagctccaagcca

SEQ ID NO: 42803 - DNA, 201 bp, Homo sapiens
cacttctgctttctccaggaaatgagcagagacccagctccagtgattcagagtgaaacggcgctgaggactgacgatgtggggccgggtcctcttccccygagcctgaggggctgcagctggggatagggggcccatgccttctgatgtctacaggcgctgacggccacccctccaggtaggccaccttgctcttggccc

SEQ ID NO: 42804 - DNA, 201 bp, Homo sapiens
ttgctactcactcttcagtttccttgtcttctgctgaagtgcctggcaagtgttcgataattcagtatttatagtttgaaggttccgttgttccgaaattrcttcctctaatttatgcagtaaagacgtagctttttcactggcagtgtgggcttctcgatctcgatccttaccctggacatggatagttagtgctggatt

SEQ ID NO: 42805 - DNA, 201 bp, Homo sapiens
ttgcccaaccccctaaaatttccaaagaaaatagacgagcaaggccttttctaccatatgagaggaaaaaaactagctaataaaatcagagtataatatayaacaacttgcaagttcaaatataccatgcatactagatttttctccttgtttacttttagaaattttgagaagttttaattaattttaaaagaaaaaaac

SEQ ID NO: 42806 - DNA, 201 bp, Homo sapiens
ggttccgttgttccgaaattgcttcctctaatttatgcagtaaagacgtagctttttcactggcagtgtgggcttctcgatctcgatccttaccctggacrtggatagttagtgctggattgtagcagtgtggccaggaaagaaagcaatggagtgctcactcttatgatgcaggcaaaactgaaaatgtgtttttcttct

SEQ ID NO: 42807 - DNA, 201 bp, Homo sapiens
agaggccacttgcgcgtgtgacgtcatggcaccgtgcgtggcagcagcagcagcgcaggtggcaggcccgtggagcagtgctggaggaggaagtggtgagkttgttgctccctctgcgccccgctgctggctcttgaacgcagagaggggccacagtccctgcggctgcatcgcgcttccctgcagtcccctccatgttcc

SEQ ID NO: 42808 - DNA, 201 bp, Homo sapiens
tgcttaagtttttattcataatttactcaaagtcactgagctctgacttcatgctggtgattcagatttgagtcctgggaagatcatctgagatgacgttyaagccaagggtttaaatgagtcatattcagccaggtgcagactaaggcagtgcaggttccaggcagaagggaaagcacgtggacacgctgagatgcaggc

SEQ ID NO: 42809 - DNA, 201 bp, Homo sapiens
gtgctgctccccgagccttctaaagacggcacagcaagcacacaggtgacccagtggtcgcctcctagccggaaaggcctagactctcttcttaggttgcygtcgggtgggaaaaatgggaaaaccctgggaactggacagagaaaatgggcgggggctacctttctcaatgttttcgttcagatggcaattcctcttggt

SEQ ID NO: 42810 - DNA, 201 bp, Homo sapiens
ggttctttaaaaaaaataatgtccagtttctctaaaaattctgtcatgacttttatttctttgatgttaagctttgtgtcttaggtttcagcgtgctgacrttctctgggccctgaagtcactgctgctggctggtgtgctggccacttggtcgtgctggcctgtctcccaccgggtggatgcccagcgagctctggatgc

SEQ ID NO: 42811 - DNA, 201 bp, Homo sapiens
aaaaattctaagaatgcctattgttggccagaagtataaaaattggaaagattttaataaaatcatctttcaatcttacttaaataggtctatgaagtctscatctcttcctctggaaagtaacgtaagggctgtgaagaacattgtccataatgaaactgagaagggctgttctccctgggaacagaaaggtcactgtct

SEQ ID NO: 42812 - DNA, 201 bp, Homo sapiens
accaagatgcagtggccagaagtacctgcacttccactcctgtcaaggtgagatgccacttgctctccactgattctctatcagtgctgagctctgttctstagagctcacggattctatattgtgttaagctgtcacttaaaagtgcacaaattgtttcaatcaatcctaacatattcacccatgtaattaacaccctat

SEQ ID NO: 42813 - DNA, 201 bp, Homo sapiens
ctgagaccctaaattgagaattatgtttgccattacttttaaaagtgtaatctgaatcccagcactttgggaggccgaggcgggcggatcacgaggtcagragatccagaccatccagactaacacggtgaaaccccgtctctactaaaaatacaaaaaaattagccgggcgtggtggcgggcgcctgtagtcccagctac

SEQ ID NO: 42814 - DNA, 201 bp, Homo sapiens
gagtctaaaccatgtatggtaaataagtataatgtgtgaaaattgtaaagcagaaagctgtcaggatacctgaatacacacaaatacacacttcagttcaygctataaaatgttataaaatgtgtaagtacatacttagggctgaaaaagcacccagagaggaagggtgaagaagaggtgtatctgaaataataaaaagaa

SEQ ID NO: 42815 - DNA, 201 bp, Homo sapiens
ggaggctgaataacaatacatatacatgtttttgttgtttatgtgtatatattttttatgaatagagttgttcctattatgttgtatcttgtaataattaytaatgacaaggttcataaatagctagatgttaacataactggccaaactccagtgacaagggccctgttacaatcagtaggaccaacctgctaagacctg

SEQ ID NO: 42816 - DNA, 201 bp, Homo sapiens
aagaataataaatctgtcttgaggtttcaaatctgagatatctatggcaagtttataaaaagtacattgatcaaggtacaatttttaacattaatatacayattccataatctcatctatttaacattaacacaggcctttgttgttgttatttttttctccctacaatatttcctgactctgtaggacagtggtcctcag

SEQ ID NO: 42817 - DNA, 201 bp, Homo sapiens
tctgcatatgctattgggagataggaaagattttggaaaatgtgtaagaaaaaggaagatactaaaaacatactaagattgtatgtagggaaaggttacamctctaactttgataatgtgcattaaatcgacaaatccttgaaaagcacagctcgataaatccaacaaaaggagaaaaagaacatgtgaagagttgaatat

SEQ ID NO: 42818 - DNA, 201 bp, Homo sapiens
cctgagcctcagaggtcaaggctgcagtgagctgggattgagccactgtactccagcctggattacatatatttgtatattcctaaggcacataatggacytaggtcaccaaaactaaaagatattctagaccaaaattttgaatgtaatttaataaccttgtacaaaccctctacagctgcacattaccaaagctagtat

SEQ ID NO: 42819 - DNA, 201 bp, Homo sapiens
tggattgcttaatggatgactacaacacgtattcgtaaaacaacctggaaaatggtaatacagagacagatcaacttttcttcaaagtaggtctgaaagaycaagaaaaagttttataagtaactgaaaaatgaaatgatttttaaggattttaaaatcagttataatgggctatcagtaattattttaaggattttaaaa

SEQ ID NO: 42820 - DNA, 201 bp, Homo sapiens
tatccagttcctttctctaatatttctcgttccttttctcacgtttaaaactatcaagtaacttaacctaaattgttaagtacaattgttgagctgttcarattttcaactcctgtcaacaaaattccaaagaacaagcttctaagataagcacttcctgatatttgataacataggttaaaatttctgtaaatatcttaa

SEQ ID NO: 42821 - DNA, 201 bp, Homo sapiens
ttcttggtgttaaacaagacaacgctgaaggctcggtgcagcagccctgcaaaggtaagtgccatttgtgtgagtgcatgcctggagtctgtacgattgtscttcgtgctttttgtcctcagtctgtttctcgtagaaaagcctgtgattgtggcacctgggcagggcaaaggggactgctggatgcccaaacacaacgtt

SEQ ID NO: 42822 - DNA, 201 bp, Homo sapiens
ctaggcattgtacaaccctaatcctctgctttccacctagaatgatgggtgatccatgtacttaccaaaagtcacttcttgggtcaggtgtggtggctcaygcctgtaatcccagcactttgggaggctgaggcgggtggatcacctgaggtcaggagtttgagatgagcctggtcaacatggtgaaaccccatctttact

SEQ ID NO: 42823 - DNA, 201 bp, Homo sapiens
aaacaacctggaaaatggtaatacagagacagatcaacttttcttcaaagtaggtctgaaagatcaagaaaaagttttataagtaactgaaaaatgaaatkatttttaaggattttaaaatcagttataatgggctatcagtaattattttaaggattttaaaattggttataatgggctatcagtaattattttaaggat

SEQ ID NO: 42824 - DNA, 201 bp, Homo sapiens
ttggccgtcgagtgaaggaaatggtgatgctggtggcccctttccggcagtcaagttccctatcaaggacattcagttctcggaaagtggtgaaggcacaygcttccctgcatggtgcccgcctctctccactctctagaaatattagaggctaggctgctgctgtatgtcagggctagtccctcttctatgaatccagaa

SEQ ID NO: 42825 - DNA, 201 bp, Homo sapiens
ctataatgctgcaggtaggaggttaagaataaactctaggaatagatgattacatctgattaaggcaaattagaagcaacagaaagggctctagatatcartgaaatatagagaaggacatggaggccaagactgggaaaagcaggtaaaaagaaatggaagtggaaagagttaaaaaggagtaggccaagtattgtaggt

SEQ ID NO: 42826 - DNA, 201 bp, Homo sapiens
taatgtggtgtctctctgaacgggaaatcttgggtacatacatactcctcatgttttccaggtttcctttagtgacgagttaaagaatccccgccccaccrcacacacacacacacacacacacacacacacacacacacacacacacacaaaacacaccgaggtaaactgtaggtaacactctttgtacaagtttttggg

SEQ ID NO: 42827 - DNA, 201 bp, Homo sapiens
cacagccagagctggcttgtcacctggcgtgggaacacctttcctcttcagactctgtgtgttccttttaatctgcgtcagggcatgtgattgagcagcaygtgaccaaccccactgcggcatctgtcccccgtggggtgggggtggggacagagttcttttcctacagcataagtgtgtcatgtcaaccaacgccgtgtc

SEQ ID NO: 42828 - DNA, 201 bp, Homo sapiens
gacctggacttgtccccatggagcaggtggagggcaggtcccacagggacgcactgcgggtacgacctggacttgtccccagggagcaggtggagggcagktcccacagggacgcactgcgggtacgacctggacttgtccccagggagcaggtggagggcagttcccacagggacgcactgcgggtacgacctggacttg

SEQ ID NO: 42829 - DNA, 201 bp, Homo sapiens
cctcaagctcggctggattgcttaatggatgactacaacacgtattcgtaaaacaacctggaaaatggtaatacagagacagatcaacttttcttcaaagkaggtctgaaagatcaagaaaaagttttataagtaactgaaaaatgaaatgatttttaaggattttaaaatcagttataatgggctatcagtaattatttt

SEQ ID NO: 42830 - DNA, 201 bp, Homo sapiens
ctccaagcgctgcaactgacgcctgtcaacccagtcaagatttatgtcagacatagctgctggctgtgacccgacctgaaatagatgcacacaaatgcctstttatgtgaaagatattgccatctcgtttttgctatgtgttaccaaccacattaggatttagcatacaccttctctacaagtgacagcaattgtgttgaa

SEQ ID NO: 42831 - DNA, 201 bp, Homo sapiens
tgctgagctctgttctctagagctcacggattctatattgtgttaagctgtcacttaaaagtgcacaaattgtttcaatcaatcctaacatattcacccaygtaattaacaccctatcaacatagagaacacttcgaaaatcacaaggctccctgcgccccctggaagtagcttctattcttgcctacatcttaattggtt

SEQ ID NO: 42832 - DNA, 201 bp, Homo sapiens
gcctggagtctgtacgattgtccttcgtgctttttgtcctcagtctgtttctcgtagaaaagcctgtgattgtggcacctgggcagggcaaaggggactgytggatgcccaaacacaacgtttcagaatctcagcggattagaacactcgggaaactaaaaatagatctaccagatgacccagaaatcccactaccagggc

SEQ ID NO: 42833 - DNA, 201 bp, Homo sapiens
tgactttcgtgtccgacctctgctgtatcaggattcgattcttggtgttaaacaagacaacgctgaaggctcggtgcagcagccctgcaaaggtaagtgcmatttgtgtgagtgcatgcctggagtctgtacgattgtccttcgtgctttttgtcctcagtctgtttctcgtagaaaagcctgtgattgtggcacctgggc

SEQ ID NO: 42834 - DNA, 201 bp, Homo sapiens
ttcagccaggtgcagactaaggcagtgcaggttccaggcagaagggaaagcacgtggacacgctgagatgcaggcaaggcctcacagccagagctggcttstcacctggcgtgggaacacctttcctcttcagactctgtgtgttccttttaatctgcgtcagggcatgtgattgagcagcacgtgaccaaccccactgcg

SEQ ID NO: 42835 - DNA, 201 bp, Homo sapiens
cattaaaaaaaaaaaagtaattaaaacatcggccaccgtaacaaaaaaaatctaaaattagctcactgtattacagcgatatctcgaacagcagtatagtyttaggattagaacttggttaaagcattaatctcctatcaatggtatatggaaatcttaatattatatatggaaaaatgattacatcattagtttcaagtg

SEQ ID NO: 42836 - DNA, 201 bp, Homo sapiens
gacttcatgctggtgattcagatttgagtcctgggaagatcatctgagatgacgtttaagccaagggtttaaatgagtcatattcagccaggtgcagactmaggcagtgcaggttccaggcagaagggaaagcacgtggacacgctgagatgcaggcaaggcctcacagccagagctggcttgtcacctggcgtgggaaca

SEQ ID NO: 42837 - DNA, 201 bp, Homo sapiens
accagagagttcctgtcccagattcctccggtcaagtcacatgagatgctctcttcagtccggggcttggttgaacggactcaccaggaaacgtgactttygtgtccgacctctgctgtatcaggattcgattcttggtgttaaacaagacaacgctgaaggctcggtgcagcagccctgcaaaggtaagtgccatttgtg

SEQ ID NO: 42838 - DNA, 201 bp, Homo sapiens
cgtgtccgacctctgctgtatcaggattcgattcttggtgttaaacaagacaacgctgaaggctcggtgcagcagccctgcaaaggtaagtgccatttgtrtgagtgcatgcctggagtctgtacgattgtccttcgtgctttttgtcctcagtctgtttctcgtagaaaagcctgtgattgtggcacctgggcagggcaa

SEQ ID NO: 42839 - DNA, 201 bp, Homo sapiens
gaattcttgctgaaacaggatcttacgaggaagagcacggatgcctaggagaaggtgcaggagcctgacaagggcttgaccaagcaaagacgtcatccagrtgctgctccccgagccttctaaagacggcacagcaagcacacaggtgacccagtggtcgcctcctagccggaaaggcctagactctcttcttaggttgct

SEQ ID NO: 42840 - DNA, 201 bp, Homo sapiens
agggacgcactgcgggtacgacctggacgtgtccccagggagcaggtggagggcagttcccacagggacgcactgcgggtacgacctggacttgtccccakggagcaggtggagggcaggtcccacagggacgcactgcgggtacgacctggacttgtccccagggagcaggtggagggcagttcccacagggacgcactg

SEQ ID NO: 42841 - DNA, 201 bp, Homo sapiens
attatgtgtttataaaaaagacacaaaaatgaaaattaaaaaataataaaatggcttaagatggtcaaagaaaaccagagctggacaggagttaaagcagraaagtctgactttactgagaaccatttcaataggggaaagagacctccatggagaaccagcctaactgcacacaacacccaaggagcaggctggggccta

SEQ ID NO: 42842 - DNA, 201 bp, Homo sapiens
agttcccacagggacgcactgcgggtacgacctggacgtgtccccagggagcaggtggagggcagttcccacagggacgcactgcgggtacgacctggacktgtccccatggagcaggtggagggcaggtcccacagggacgcactgcgggtacgacctggacttgtccccagggagcaggtggagggcagttcccacagg

SEQ ID NO: 42843 - DNA, 201 bp, Homo sapiens
tgaaaagatcaaactaattcaatcctgctctccaaagaacactttttctgaatgggctctcagacttttcctgaatgggctctcagattctgctttcctargaaagtgtgttgaggtagttctttttctgaatgggctctcagattctgctctcctaagaaagagtgttgaggtagttctttttctgaatgggctctcaga

SEQ ID NO: 42844 - DNA, 201 bp, Homo sapiens
ctttgggaggctgaagtgggcggatcacgaggtcagaagatcgagaccaccctggctaacatggtgaaaccccgtctctactaaaaatacaaaaaaattarctgggcgtggtggcaggtgcctgtagtccaagctactcgggaggctgaggcaggagaatggcatgaacccaggaggcagagctggcagtgacctgagatt

SEQ ID NO: 42845 - DNA, 201 bp, Homo sapiens
aatttcttctggaggaacctaagacattaaaaaaaaaaaagtaattaaaacatcggccaccgtaacaaaaaaaatctaaaattagctcactgtattacagsgatatctcgaacagcagtatagttttaggattagaacttggttaaagcattaatctcctatcaatggtatatggaaatcttaatattatatatggaaaaa

SEQ ID NO: 42846 - DNA, 201 bp, Homo sapiens
gtttgactttagtagatagtggccaacagcttcatggtagcaggcatgctcagaagcagttactttatattccgtcaacacttggtgatgttggtcttttmaattcgggtttcaatttgcacctaccctgtgattaatgaggttaagcttcttttcatgtttaacacccaaattttaatagactttattctttcgaccagt

SEQ ID NO: 42847 - DNA, 201 bp, Homo sapiens
tacacagtggcataccattccaccacaaaagaagaatgaaatcgggccgggtgcggtggctcacgcctgtaatctcagcactttgggaggctgaagtgggyggatcacgaggtcagaagatcgagaccaccctggctaacatggtgaaaccccgtctctactaaaaatacaaaaaaattagctgggcgtggtggcaggtgc

SEQ ID NO: 42848 - DNA, 201 bp, Homo sapiens
atccgattgtgcagacaccaaggctgatgtaaccactgcagatgttctgcaggggcgtccctgggatagagactggacatgtagcaaagagctccgtgagygtgagcgaggcaagccctgaacccacactgtatcacctacttatagggcagtgcataaaaatctgggaaacaccttgtttctcaaagtaacaacgaatat

SEQ ID NO: 42849 - DNA, 201 bp, Homo sapiens
tcggtgcagcagccctgcaaaggtaagtgccatttgtgtgagtgcatgcctggagtctgtacgattgtccttcgtgctttttgtcctcagtctgtttctcrtagaaaagcctgtgattgtggcacctgggcagggcaaaggggactgctggatgcccaaacacaacgtttcagaatctcagcggattagaacactcgggaa

SEQ ID NO: 42850 - DNA, 201 bp, Homo sapiens
ccgcctcgacctcccaaagtgctgggattacaggcgtgagccactgcgcccggccaatgcttaagtttttattcataatttactcaaagtcactgagctcygacttcatgctggtgattcagatttgagtcctgggaagatcatctgagatgacgtttaagccaagggtttaaatgagtcatattcagccaggtgcagact

SEQ ID NO: 42851 - DNA, 201 bp, Homo sapiens
ttcctacagcataagtgtgtcatgtcaaccaacgccgtgtcagctgcctgcaggggcccacgggcatggggacccgacgtacaccgtgggagctgaccttkctttcttctctcaggagtggagccccaacccacgcagggcgtgtcttcatggcttttcctggccaatctgataccaagatgcagtggccagaagtacctg

SEQ ID NO: 42852 - DNA, 201 bp, Homo sapiens
gcctagactctcttcttaggttgctgtcgggtgggaaaaatgggaaaaccctgggaactggacagagaaaatgggcgggggctacctttctcaatgttttygttcagatggcaattcctcttggtgtcggcaccaataaccttatcattctcatccacaacaatcagcatttcctccaagcgctgcaactgacgcctgtca

SEQ ID NO: 42853 - DNA, 201 bp, Homo sapiens
actgagctttgtagtgaattcgtgttaaataattaatttcttctggaggaacctaagacattaaaaaaaaaaaagtaattaaaacatcggccaccgtaacmaaaaaaatctaaaattagctcactgtattacagcgatatctcgaacagcagtatagttttaggattagaacttggttaaagcattaatctcctatcaatg

SEQ ID NO: 42854 - DNA, 201 bp, Homo sapiens
gcactgagcaccagagagttcctgtcccagattcctccggtcaagtcacatgagatgctctcttcagtccggggcttggttgaacggactcaccaggaaaygtgactttcgtgtccgacctctgctgtatcaggattcgattcttggtgttaaacaagacaacgctgaaggctcggtgcagcagccctgcaaaggtaagtg

SEQ ID NO: 42855 - DNA, 201 bp, Homo sapiens
aacatcggccaccgtaacaaaaaaaatctaaaattagctcactgtattacagcgatatctcgaacagcagtatagttttaggattagaacttggttaaagsattaatctcctatcaatggtatatggaaatcttaatattatatatggaaaaatgattacatcattagtttcaagtgtttgcgtttttttcccgatcagat

SEQ ID NO: 42856 - DNA, 201 bp, Homo sapiens
taagacattaaaaaaaaaaaagtaattaaaacatcggccaccgtaacaaaaaaaatctaaaattagctcactgtattacagcgatatctcgaacagcagtmtagttttaggattagaacttggttaaagcattaatctcctatcaatggtatatggaaatcttaatattatatatggaaaaatgattacatcattagtttc

SEQ ID NO: 42857 - DNA, 201 bp, Homo sapiens
tttcagccatgagaagactactgctcttcctccaacactcacttctctattttctctatcgtttgatcctgtctcctgtacaactgggtggtatttaaccrtgtttaggctcaggtataacccaagctctgaaactgtaatagaaaattaagtaaatgaaaggcaaaaaatgaaagacttaataaggtttaagctgttatt

SEQ ID NO: 42858 - DNA, 201 bp, Homo sapiens
gattcgattcttggtgttaaacaagacaacgctgaaggctcggtgcagcagccctgcaaaggtaagtgccatttgtgtgagtgcatgcctggagtctgtaygattgtccttcgtgctttttgtcctcagtctgtttctcgtagaaaagcctgtgattgtggcacctgggcagggcaaaggggactgctggatgcccaaaca

SEQ ID NO: 42859 - DNA, 201 bp, Homo sapiens
aaaattctgtcatgacttttatttctttgatgttaagctttgtgtcttaggtttcagcgtgctgacgttctctgggccctgaagtcactgctgctggctgktgtgctggccacttggtcgtgctggcctgtctcccaccgggtggatgcccagcgagctctggatgctgtgtatgacaaagacatgggggttgtttggagt

SEQ ID NO: 42860 - DNA, 201 bp, Homo sapiens
tgcttactagttcttattttttcttgctgttgtattaggttgcactcattgtgtaaactcactttatgcagaatataaaattatgccattcacaggatttycctttgtgaccttggctccaagaattcagaatgataaaaagtcaaattaatgtacaaacacaatattgtacattaaaagtgtactaacctggaaaggtaa

SEQ ID NO: 42861 - DNA, 201 bp, Homo sapiens
aaaaaaagtaattaaaacatcggccaccgtaacaaaaaaaatctaaaattagctcactgtattacagcgatatctcgaacagcagtatagttttaggattmgaacttggttaaagcattaatctcctatcaatggtatatggaaatcttaatattatatatggaaaaatgattacatcattagtttcaagtgtttgcgttt

SEQ ID NO: 42862 - DNA, 201 bp, Homo sapiens
gacctggacgtgtccccagggagcaggtggagggcagttcccacagggacgcactgcgggtacgacctggacttgtccccatggagcaggtggagggcagktcccacagggacgcactgcgggtacgacctggacttgtccccagggagcaggtggagggcagttcccacagggacgcactgcgggtacgacctggacttg

SEQ ID NO: 42863 - DNA, 201 bp, Homo sapiens
taattattttaaggattttaaaattggttataatgggctatcagtaattatgttgtgaaacagactacatttgtaggtaggttccttattaatacttcttyaaccaaaaaagatcaaagtgtagataatacagattaaagataaatatgtaaattatacatattgcccaattgcttactagttcttattttttcttgctgt

SEQ ID NO: 42864 - DNA, 201 bp, Homo sapiens
gtagtcccagctactcagaggctgaggcaggagaatggcgtgaacccgggaggcggagcttgcagtgagccgagatcgcaccactggactccagcctgggygaaggagcgagactccgtctcaaaaaaaaaaaaaaaagtgtaatctgtttttttgcctcctgaaatcacttatgtataaacacattaaagtgggtcaccg

SEQ ID NO: 42865 - DNA, 201 bp, Homo sapiens
catgattgtaggtttataatttggaacttcggttatttaattaattaaaaatattcagatatatcctgcaaataaatacaaagtttttgtactcagcatckttagtgcactttcccacaaggagttgtatgtaaatgaaaaaaatagataaatgcaagcatgtaaatcaactcctattattaaccatttacttagctcaag

SEQ ID NO: 42866 - DNA, 201 bp, Homo sapiens
atcgagaccaccctggctaacatggtgaaaccccgtctctactaaaaatacaaaaaaattagctgggcgtggtggcaggtgcctgtagtccaagctactcrggaggctgaggcaggagaatggcatgaacccaggaggcagagctggcagtgacctgagattgcaccactgcactccagcctgggcaatggagcaagactc

SEQ ID NO: 42867 - DNA, 201 bp, Homo sapiens
tagcttctattcttgcctacatcttaattggtttcgcctgtttttgacctttatttcactggaatcacgtatgccttttgtatccggcttcttccactcargattgggtctgtggatttactcacactgctgtgtatagcaggactgctcccgcggcatggcagcatccgattgtgcagacaccaaggctgatgtaaccac

SEQ ID NO: 42868 - DNA, 201 bp, Homo sapiens
cagccagagctggcttgtcacctggcgtgggaacacctttcctcttcagactctgtgtgttccttttaatctgcgtcagggcatgtgattgagcagcacgygaccaaccccactgcggcatctgtcccccgtggggtgggggtggggacagagttcttttcctacagcataagtgtgtcatgtcaaccaacgccgtgtcag

SEQ ID NO: 42869 - DNA, 201 bp, Homo sapiens
aagggaaagcacgtggacacgctgagatgcaggcaaggcctcacagccagagctggcttgtcacctggcgtgggaacacctttcctcttcagactctgtgwgttccttttaatctgcgtcagggcatgtgattgagcagcacgtgaccaaccccactgcggcatctgtcccccgtggggtgggggtggggacagagttctt

SEQ ID NO: 42870 - DNA, 201 bp, Homo sapiens
gacaaaatctctaaaaacctggcagaccttaagctattttcactcacaacctggaaaaatgtatttattcaacttggtttagtaaatgagtacattattaytgttgctcttgtgttattccggtgaacagctgtcttaaaatgtttccctccagcggtggctgctttcagggggaagggaaggaaaaggaagtcttcaaaa

SEQ ID NO: 42871 - DNA, 201 bp, Homo sapiens
gtgatctcggctaaccgcaacttctgcctcctgagttcaagtgattctcctgcttcagcctcctgagtagctgggactacaagtgcccgccaccatgcccrgctgatttttgtatttttagtagagacgggacttcaccatgttggccagggtggtcttggactgctgacctcaggtgatctgcccacctcggcttcccaa

SEQ ID NO: 42872 - DNA, 201 bp, Homo sapiens
cccaaagtgaacagcctaacatagctacccaaaaagaggaggagggaaacacactcactcaagatctcctgtatacagcactttgcaaaaatggctggcayatattacataacgtaaccttcccagtaagaaaatgaggctgatatgaacaccatgttagaggacagggagtcgggacttaggaaggccttgcccaaggtc

SEQ ID NO: 42873 - DNA, 201 bp, Homo sapiens
ggcctaacacaggttacctggcttccctcgagtggagccagacagcagtagtcaccctgaatggcacagtgaagttccaggaggtggaagagtgtgcaaamctttcgagactcctcaagcatgaaaggaaaaaatatctccatctttaagcggaaacagaaagcagcgactaccttggggatcatcgtctgggcctccacc

SEQ ID NO: 42874 - DNA, 201 bp, Homo sapiens
tgtcactttacctaccatttttggtcgggctcagaatgtaaacgatgataaggtgtgcttggtcagtcaagactttggctacacgatttactccaccgcaktggcatcctaatccccatgtgcgtcatgcttttcatgtactaacagatttacaaggccgccaggaaaagcgcggcctaacacaggttacctggcttccct

SEQ ID NO: 42875 - DNA, 201 bp, Homo sapiens
cggctctgtcctgacgctcatctctctgcgatcgcgggcaactgcctggtggtatctccgtgtgcttcgtcaagaagctccgccagccctccaactacctsatcgtgtccatggcgctggccaacctctcggtggccatggcggtcatgcccttcatcagtgtcaccgacctcatcgggggcaagtggatctttggacact

SEQ ID NO: 42876 - DNA, 201 bp, Homo sapiens
caacctctcggtggccatggcggtcatgcccttcatcagtgtcaccgacctcatcgggggcaagtggatctttggacactttttctgtaacgtcttctccrtgaatgtcatgtgctgcacggcctggatcttgaccttgtacgtgatcagcatcgacaggtaccttgggatcatgaagcctctcacgtaccctatgaggca

SEQ ID NO: 42877 - DNA, 201 bp, Homo sapiens
ctctccgagcgcttaatccgaacaattgctgccatccgttccttcccacatgataatgtagaggacctcatcagaggggtgagtgtgctggtattgacagragagtccttgcgatatgaagtgggcaaaatcctcatggatcacagatttgcagctttgactcaacccaagatcacagggagtttttacattttgctaact

SEQ ID NO: 42878 - DNA, 201 bp, Homo sapiens
ctctcctttgattttgaatagaagcaccagcaaaggctagatggtaaagaatactgatactaagaggctactttgaagatgtttataaaaaaggaaaaacmgtgttaagatgatgccactattaatgatggtcatttgttgaatggacaaaagagcatgccatttctggcctcagtctgacagactcactttcctactttt

SEQ ID NO: 42879 - DNA, 201 bp, Homo sapiens
cacctttaactcattttaaaatctgcaaattttcctaaaactgaaagtacattttattattctgaattttaattttttcctagttttatataaatgactcyagggtagttatacttttgctttccttacctattttagaatactacctcaaatatttcctttttttttttttttttttttgagatagagtctcactctgtt

SEQ ID NO: 42880 - DNA, 201 bp, Homo sapiens
tatgtacataactatattgcaaggcccagtgttataaataacttaatggtggtgctgatcataaaaaccacaaaaattcaaagaaggaaaataatgttttktgacctcttcagccttttaaaaatcctattccttgcctagtcgtttgtaaaccacacagagctccacgggggtcttagtacctcttggggaaatctcgtg

SEQ ID NO: 42881 - DNA, 201 bp, Homo sapiens
ccaatgctttggatggcaacagagataccccacttcactgggcagcctttaagaacaatgctgagtgtgtgcgggctctcctagagagcggggcctctgtsaatgccctggattacaacaatgatacaccgctcagctgggctgccatgaagggaaatcttgagagtgtcagcatccttctggattatggcgcagaggtca

SEQ ID NO: 42882 - DNA, 201 bp, Homo sapiens
ttctgaattttaattttttcctagttttatataaatgactccagggtagttatacttttgctttccttacctattttagaatactacctcaaatatttcctttttttttttttttttttttgagatagagtctcactctgttgcccaggctggagtgcggtggcccgatctcggctcactgcaagctctgcctcccaggtt

SEQ ID NO: 42883 - DNA, 201 bp, Homo sapiens
aagcatgtaagagctccttttgtgatggtccatctacccaaaagagatctgctttagtgaacgatactctttcatttttctaaattagatcaagttgttaytgattttagatgacttgtatgcaaatttgaaaaacttttttttttaaagctgattgggaactacaaacaatgaatggaatctactgacacagctaattgg

SEQ ID NO: 42884 - DNA, 201 bp, Homo sapiens
ttacctttttcctcagcatctctttacatatctgctgagcttttttatttctctctgctgcatatgcttttgaaaaagcataaaaatactaatttgttagratttaattaattcgagtcttaaaaaatgaactataattcactcttgtaagtggaggtggcatgaaatattgtttatatgctcttaattgttgttagagat

SEQ ID NO: 42885 - DNA, 201 bp, Homo sapiens
aaaaggtagaatgagagttattattgagagatttggaatcaagggtcatttggtaattcatgaatcatggagaaagaatctttctattttctggctgatcrttttaaaatgccatattaattcatcttgggtgatagaaattgcagagccatctgtgatcttttcttctatggtgactagccagcaggttgtcaatatcag

SEQ ID NO: 42886 - DNA, 201 bp, Homo sapiens
tctggttatttatttgataaggaaacatgtactagaaaaaagtacaacacatatattgtgagattaattatgacaatttctagaaagtaacagtctgttcractcaaatgtttataagaaaattctttctttatttatttatctgtgcatttaggcatgccagaagaatccagggaggatacagaatttcatcataagcta

SEQ ID NO: 42887 - DNA, 201 bp, Homo sapiens
tcccatgtttcattacttaaactagtcttatgccaaaaacctgcttactttaatcttcaatatccgatggagaggaattgtgggcccattggagagggacrgagggagatttatcattcactatattctctttgttctgtctggagtttttaccattgacacatcttacccagttaaaaaaacatagaattgtcatttgat

SEQ ID NO: 42888 - DNA, 201 bp, Homo sapiens
tttttttccttttcattatgttaatatgaagaaatacatctacaggttttctaatactaagctactttgcacttcctgataaatttaacttggtcatttaytagatttttaaaaacacttctaaaaaatcttctctgtttattttcacatataccaggtgagttttggcagcctcttgttttttcttttttaccctttctt

SEQ ID NO: 42889 - DNA, 201 bp, Homo sapiens
tgatccaggcttaatatgggagactctggttgagaccttaccttgcagagagtctgaaactggtttgttgaatgcagcgccaggattcatgctttcccacragactactctggcgttcaactcacagctcttgtttcagcttctttttgaactccctctgcccctcaacacacaccttggaaatttccttgatatttttgt

SEQ ID NO: 42890 - DNA, 201 bp, Homo sapiens
agatgttgtgctaggcttcaggaatacaagttggattgcagtaatgtaaagccctttgcattctagcaagaaaacagatgggtatgtatgtttgctcagtkctacattaaatgaaatggatgggagccgggaggagaaatggtgtgtttggcctgagaggttagtagcaaggacttctctgcaagaaagtttgaagccaat

SEQ ID NO: 42891 - DNA, 201 bp, Homo sapiens
atagtgttatatgttaaaggtaatttaacttccatggatgagaattcagctaatgtttcacttaacttttaggtaattttttcaatatcctggtattaaaygaagtccatgagtttgtggtgaaagctgtgcagcagtacccagagaatgcagcattgcagatctcagcgctcagctgtttggccctcctcagtaagtaac

SEQ ID NO: 42892 - DNA, 201 bp, Homo sapiens
ctttttaatatatattttttattattaaagtaagatatccctgtttttaaaggaaatataaaattataaaaaagaaaataaaaataacttattttatctcttataagtaattaatatggatatttttcctaactttttatatgcttacatgtacctatgcattcaaatgtatgtaaaagcatacacacatatttatttggc

SEQ ID NO: 42893 - DNA, 201 bp, Homo sapiens
attttatcaaatatacttaaaatgtagtaagtcttttttttccttttcattatgttaatatgaagaaatacatctacaggttttctaatactaagctactktgcacttcctgataaatttaacttggtcatttattagatttttaaaaacacttctaaaaaatcttctctgtttattttcacatataccaggtgagttttg

SEQ ID NO: 42894 - DNA, 201 bp, Homo sapiens
tttttaatatatattttttattattaaagtaagatatccctgtttttaaaggaaatataaaattataaaaaagaaaataaaaataacttattttatctcttataagtaattaatatggatatttttcctaactttttatatgcttacatgtacctatgcattcaaatgtatgtaaaagcatacacacatatttatttggca

SEQ ID NO: 42895 - DNA, 201 bp, Homo sapiens
gaatatgtttttcattatactttttccttggctatatttattcatttatttatttattttgggctggaggtttttggaatccattgttttccacccacatyggacataactccagtaaaaatgtgttgattcataatgcaaaagtcaagaaagtagcagctaaaaattaagaaatcaaaagtttttaaaacactgattcta

SEQ ID NO: 42896 - DNA, 201 bp, Homo sapiens
acaaacaaacaaacaaacaaacaagaaaaccatgggtctacaaaccattcacagtcttcatgtaaaaattaattcatgtaaaaattaacacattaaatgtkaaagcagctctttactcagagcatattattctctttaaaataggtaaaatcaccttgctgatattggatgaagaaagtgatattttcatgttaatttttg

SEQ ID NO: 42897 - DNA, 201 bp, Homo sapiens
tgattctgtattttaactattgtgaacagggctgcaataaacatgggagttcagatatatctttgatatactgatgttctttttttggatatatacccagygatgagattactggatcatatgaaaattctctttttagttttttaagatacctccatactgtgtttcatcatggctgtgctactttatattcccatcagc

SEQ ID NO: 42898 - DNA, 201 bp, Homo sapiens
tccctaatgattagtgaagtttaggatttttttttcatgtacctgttagccatttgtctgtcttcttttgagaaatgtctatttggatcttttgtccattwaaaaataagacttttttttttttttttttttttgctaattgagtttttttagttccttatgtattctggttgttaatcttttgttgaatggatattttgc

SEQ ID NO: 42899 - DNA, 201 bp, Homo sapiens
tgggaatattgttaaatcattacgcaatgtaaacgggatgaagagccccagtatgtgttccctgagtgtctttaagaagtaactttataaaaccaacagtrtggatggtggtagaaggaggataaaaatgggttcggttttagtctcgttattggcaagatgaattcattagtgtttagacttgactattccaagtatctt

SEQ ID NO: 42900 - DNA, 201 bp, Homo sapiens
aagtttgtttcatattttattaatgtttcttcataaatgacagtctttagaaaattgacggttaagctaggtgctttatatttttcttttcctgcctatcwtttcactgtgctcctaaattttacatctctttattctcaagggttcaacctttgaagaaggggagcaaaataaatgaaagtggctaaaattttttcttta

SEQ ID NO: 42901 - DNA, 201 bp, Homo sapiens
agagctcagttgcctgaatctttttgcaaagcgtttactgatactgttgcttcaccaaccaaaacaaacaggttttttccttgagtcagctttgtaggtayagagatgagtttggcatcctatgtaacttttttttttttttttttttttttttttaccaccagaagctgttcagaatgttattttcttaaatagttcgga

SEQ ID NO: 42902 - DNA, 201 bp, Homo sapiens
ataatttcttctatacatgtcttgcacatcttagtttttgctacgtatcttattttttattattattgtaaatggtatttctttttaaatcatatttttgractgtgttttcataaagaaatgcaaatgattttttgtatattgaactaacctacctttctaaactcttcgttaattctgacaatttgtttctaaatgcac

SEQ ID NO: 42903 - DNA, 201 bp, Homo sapiens
agtattttttacagctacttaaagaacatgatgtttaaatttggaaatgcagtcattatgctgccatctatttacagtctatataagacgtctttgtatgyatatttgaaaggagaacatggttaccttattgataattatgatctctttaaattcaggcaataatgtggaagtcctcatgagtggcaatgtcaggtgtta

SEQ ID NO: 42904 - DNA, 201 bp, Homo sapiens
gcaaagcgtttactgatactgttgcttcaccaaccaaaacaaacaggttttttccttgagtcagctttgtaggtatagagatgagtttggcatcctatgtracttttttttttttttttttttttttttttaccaccagaagctgttcagaatgttattttcttaaatagttcggaaaaaagtcttgatgtattctatgaa

SEQ ID NO: 42905 - DNA, 201 bp, Homo sapiens
aagcgtttactgatactgttgcttcaccaaccaaaacaaacaggttttttccttgagtcagctttgtaggtatagagatgagtttggcatcctatgtaacttttttttttttttttttttttttttttaccaccagaagctgttcagaatgttattttcttaaatagttcggaaaaaagtcttgatgtattctatgaaagc

SEQ ID NO: 42906 - DNA, 201 bp, Homo sapiens
ttttaatatatcattaatttctcttttaaaaacagtagcaatcaataatttaaatattcaaatgaattcttaatttatatacacaaactaacatctttatkatatctctatattttaatatatcaacatgtctaagataatttataaatttacatcatatataaaaatgggtttgctctcgatgtatataaggcttcatga

SEQ ID NO: 42907 - DNA, 201 bp, Homo sapiens
tagagtcactcctgcttgatactgctcaggacagtcagatcctgggtaggcgttttggtctgcagggtctagataaggcagtgctatacttgacaacccargggagcctggaacatacttcctaattcttaattttagaaattgcccaagcctgagcatacttgtccggagtagttatgagtgtcacttagtatttctgcc

SEQ ID NO: 42908 - DNA, 201 bp, Homo sapiens
atgttctactgtctttaaatagtacatttatatatatattcctatatatacagtaagtttaaactatggctttcagaaagagttaagaaagaggaaattamctttcagcacatctgtagccaaatcttgatagtaattttaccagctatgtttttgcagtttgcagcataatggcttcttagatgagactacttccttagc

SEQ ID NO: 42909 - DNA, 201 bp, Homo sapiens
tcaggaaagccatgagactgtttaaatttcttcttatgtatatggcccttaatttgtctctaagcagaaggccagagtgatcatagggctcacataatttktttcccttctttcgggtattacatagtcctatgctgtctgttgcccagtgtctgtatccagtcatttaatatatttatccagttttcttgttgtttatgt

SEQ ID NO: 42910 - DNA, 201 bp, Homo sapiens
ctttgttttcttgtaaatttattattttgaaagtactgccttttccttattttataaaacaattattgccagccaaatttattgtgtttattttaataccrttccataaaagaaaccatgaaacatgaaattcaaatagaaatttattaaaaattgctgactgttaaataatttgtgtgattacaacatttaaagcaagat

SEQ ID NO: 42911 - DNA, 201 bp, Homo sapiens
accatgaaacatgaaattcaaatagaaatttattaaaaattgctgactgttaaataatttgtgtgattacaacatttaaagcaagatttgaaaaatttatragaaaaattcagggagttaatccactctctttcctatgctgctagaccctattccagcggtctccataaaaaaaattcagagaaacagaaagcagtaaca

SEQ ID NO: 42912 - DNA, 201 bp, Homo sapiens
aaatatttatgggtgaagaaaaatgttgttgaatttttaaagtgaaaaaccaacatggcttatcatctctattttaaagattttacaaagggaatggactrtgaaatttccattaataaaaataggtctaatcttccatgattgaactatgatagaaggatcttatgattgagtaagctttttgtattcaccttcatgtta

SEQ ID NO: 42913 - DNA, 201 bp, Homo sapiens
gtgagtcgagagactgataagtaaacagattattataatacagtctcagaatgcagtggcagtagtgtgtaaaagacgcaatggtaagagtagagtggacycagctggggttacccaaggaggggaggctccaatggagggatgtgtttaaactgggactttaagttggaaaagaaggaatgtatctcagtgtccacagaa

SEQ ID NO: 42914 - DNA, 201 bp, Homo sapiens
gtagtattttgatctcatcaccttcaggagttagaaaaggtagaatgagagttattattgagagatttggaatcaagggtcatttggtaattcatgaatcrtggagaaagaatctttctattttctggctgatcgttttaaaatgccatattaattcatcttgggtgatagaaattgcagagccatctgtgatcttttctt

SEQ ID NO: 42915 - DNA, 201 bp, Homo sapiens
tttgccatattgcccaggctggtctcgaattcctgggctcaagcaatccatctgccttggcctcccaagtgctgggattacaggcatgaaccactgtgccyggcccaaattataatttttaatagctttgtagtttttcagtgcttgcctgtattctgttttatgaaccaatttcttactgatgaagttttagtttgtgtc

SEQ ID NO: 42916 - DNA, 201 bp, Homo sapiens
tttcttactgatgaagttttagtttgtgtccagtgggatgtttctggaacccatagtaaacaccagtgatcactttcctcctctgttttcctttatacatkgttcctattattttcttgggaaaatttcatagaaatgcaactgggtagagagctattcaccattttaaaatctggtaaaattgtctattataaatttcca

SEQ ID NO: 42917 - DNA, 201 bp, Homo sapiens
attcacaaactggtcctagcagctttgaacagggtatgttgaatataagttttctgtatttatactattaactaaaatattaaatttggagaactaggggsgctttttcagtctaagttttctgttctccgtttgctatgataggaggaagtcatgtggttagagacataagatgacagtggggatgtgggaagtgaaaag

SEQ ID NO: 42918 - DNA, 201 bp, Homo sapiens
atctatatgtttcctagactttggcattactttgtgaaaataactgtaattacttatgttctatgtaaatgctttccattcatttgtatatgatggcatayatagaaattataatgtttgtaaagtccactgggataaatggacaaagcagctgaaggctgaaagcaaccaagccttttacagccccttcattccccacac

SEQ ID NO: 42919 - DNA, 201 bp, Homo sapiens
ccgtagcttgttttctcattataacattcttaggaagggctgcttcacagaaatatattttttatttaaggagattacacttgatgtatctcacacaactrtaatgaatattgtaatttttgaataattaaactttcatatcatctttaagcttattcagtattttgtctttcatttttaagtctcagaggagcaactgac

SEQ ID NO: 42920 - DNA, 201 bp, Homo sapiens
actaagggccaggtgcagaggctcacgcctgtaatcccagcactttgagaggccaagtcaggaggattgcttgagcccaggagcttgagaccagcctgggmaacagagcgagacccctgtcttcacaaaaaaaaaaaaaaaaaaaaaattagctgggtgtggtggcacatacctgtagtcccagctacttgggaggctgaa

SEQ ID NO: 42921 - DNA, 201 bp, Homo sapiens
tcactcccagcaaaaattgattgtaaaacagatttctcttttttcaaggccttttccctccaaagacttaccagtactgaagaaaaatttcttccgtggtrataaagtcaggaattgtgggaatggtatagggagaggtaggggcagggtgattaggaggaaggctggcagagaatcgaagactggcttcattcaggtcct

SEQ ID NO: 42922 - DNA, 201 bp, Homo sapiens
atctttaaagtggtgtgggtctatctttatcttgatgtttatctctgtatctagctgtatctagtctgggtgaaccatctagcttctttgatatgaggacwtttacatctggaagaaatattttaatttgttttcaactgtgaaatattttccatctgactattatagattttcacgctgctatcaaaccaaaccaagaaa

SEQ ID NO: 42923 - DNA, 201 bp, Homo sapiens
tacttgatagagtcactcctgcttgatactgctcaggacagtcagatcctgggtaggcgttttggtctgcagggtctagataaggcagtgctatacttgasaacccaagggagcctggaacatacttcctaattcttaattttagaaattgcccaagcctgagcatacttgtccggagtagttatgagtgtcacttagtat

SEQ ID NO: 42924 - DNA, 201 bp, Homo sapiens
ataatgccagtgtaaacttgtcagtgattggactgaagaccttagatctcctcctaacttcaggtaatatgtgtatatgttttttgtgttgattcaaattwaaaaaaaagttgataccattaagtaaatgtgtgtgtgtgtgttttttttttttttttttttgaagatcaggattagggtagcttgatttaaatgtcctaa

SEQ ID NO: 42925 - DNA, 201 bp, Homo sapiens
agatgtgtaggagatattcttaaaggacttggtaatgaattgatttgttgcttggatagagaatgagaagagaaaggagggtggaagaaggaagatgactyaggagtttctcttgggtagctagtggattatggtatcattgatgaagacagggaacaggagtaggccaggtttggggtaactgtggaatattcagatgtt

SEQ ID NO: 42926 - DNA, 201 bp, Homo sapiens
agccataatataatctaaatatcagttatttccaaaattctttctgtttccatctcttctccttatctcttttctctatactttgcctctcaaaaatctcwttcaatacattggttttaaacattaccttatatattatccccaaatctctgttggtagtccgatgtttgctcccaaaatctggacctacatctcatattc

SEQ ID NO: 42927 - DNA, 201 bp, Homo sapiens
attgatactagacatccttgtcttgctctttttcctgattttaaacagaatatttttaatattctcccatccaaaataatgcatcttacaagggtttaaayttttaaaaaaaattttgttaagaaattttattttatttcttctttgcttttgttttttcaatgtgggcttttaaatgtttgcttttatttttacaatgtg

SEQ ID NO: 42928 - DNA, 201 bp, Homo sapiens
ggtaaaggcattgttttcacttcaactcattctcccttctgtttggaaggagacgttttactggcaatgttaatatagccgagagttcttggttattcccraaatttggcttgaggaacctctgactgtgattttaagatgggaatattgttaaatcattacgcaatgtaaacgggatgaagagccccagtatgtgttccc

SEQ ID NO: 42929 - DNA, 201 bp, Homo sapiens
ttggtagggatttccctgatgtatgaaaactataattttgagatttttatatatgtaatagatatgaaaacatattagatgtaaattatgctcaattcacrtttgtagtcttttgagtatgcagggtatgaattttttggggcacatatatatatatatatatacttacagtacacttcaagatggttttcttctttcttt

SEQ ID NO: 42930 - DNA, 201 bp, Homo sapiens
ttttccttgagtcagctttgtaggtatagagatgagtttggcatcctatgtaacttttttttttttttttttttttttttttaccaccagaagctgttcaraatgttattttcttaaatagttcggaaaaaagtcttgatgtattctatgaaagcacaaaaatagtcagtttctatgacagctggattgtcaacgtctgtt

SEQ ID NO: 42931 - DNA, 201 bp, Homo sapiens
gcagagccatctgtgatcttttcttctatggtgactagccagcaggttgtcaatatcagaaattagatttggttagagagcttcctatgatgagttcccawctgatgtgacagagttgacctgtcttctttcgagagggttatttgaagctgtcatctctggataactctttcaataggagtgccattcaaacatcataag

SEQ ID NO: 42932 - DNA, 201 bp, Homo sapiens
aaaaatagtcagtttctatgacagctggattgtcaacgtctgttcagcttacgtggaggaggatgtcctacttgagtagtataggtagaaatagctatcaraaattgccgcctttgaaagcaatttgaaattatgtaaaaggaagtaatgacaaaataaagcaatttatgtttaatctggaaaagatccaaaagtaatatt

SEQ ID NO: 42933 - DNA, 201 bp, Homo sapiens
ataaaaaatgaagcaaggaaggagaatatgatatgttagacatcagaggagatgaagttgtgaataggcagccaggaaagaaggtgactattgagtaagayctgcagggcgtcgcatattgttttttgcctctgaaagcagttaatttcctgttaaaatggagtggatgagatcaagagtattacgtagatagctggtaaa

SEQ ID NO: 42934 - DNA, 201 bp, Homo sapiens
agcttaatgggaccccaggatgttggaaatgattgggaagtccttggtgttcaccagtaagtatgatagatatgtaaaacaaatggccttgagtatttatytgtacacatgacaaccttcccttgatacactgtgtttgcaatccaaggctactcttgtggaattctttaaaatacagatatttttccttgagtcaatgat

SEQ ID NO: 42935 - DNA, 201 bp, Homo sapiens
caccttaatactgaaactcaaatcttattttttgctacgattattccagctactcttttttgtctatatttcatttctgcctttttatgttgtggtccaartaactctgagcttttctcatgttgtccattgttgcataaaaatcttccagcatcttaaagcacagcctactcacacaaaaaagtgattgtttgctacaga

SEQ ID NO: 42936 - DNA, 201 bp, Homo sapiens
aaaaattcattttaaattgaactttatactgtcactcactgcctataatatgtttgagtcatttatactcaaactttaatacaatccttgagtatggcaakaatttatgttgtaatgggttaaatttatcttgagaaatatttgttgaaaataagtatatggaaggaaggggttaggcatttagaagataaataaatatgc

SEQ ID NO: 42937 - DNA, 201 bp, Homo sapiens
taagtatctgaaatctccacccaggggtgtgtgttttactattataatgagcaaagggtcagtctgaggacaaggaaaatcaaaatgtgcatgctccccaygctacctgacttcaaactatactacaaagctacagtaaccaaaacagcatggtactggtaccaaaaaagagatataggccaatggaacagaacagagccc

SEQ ID NO: 42938 - DNA, 201 bp, Homo sapiens
tcgcttggaactggagggtaggagttgaagtgagctgagattgtgccactgcactccagcctgggcaacaagaatgaaactccatctcaaaaaaaataatytatttgtgttttaagttctggtgtacacgtgcaggatgtgcaggtttttcacataggtagacgtgtgccatggtggtttgctatacctattaacccatca

SEQ ID NO: 42939 - DNA, 201 bp, Homo sapiens
ctgctcgggaggccgaggcaggagaatcgcttggaactggagggtaggagttgaagtgagctgagattgtgccactgcactccagcctgggcaacaagaaygaaactccatctcaaaaaaaataatttatttgtgttttaagttctggtgtacacgtgcaggatgtgcaggtttttcacataggtagacgtgtgccatggt

SEQ ID NO: 42940 - DNA, 201 bp, Homo sapiens
accccatctctactaaaaatataaaaattagtctggcatggtggcgggcacctataatcccagctgctcgggaggccgaggcaggagaatcgcttggaactggagggtaggagttgaagtgagctgagattgtgccactgcactccagcctgggcaacaagaatgaaactccatctcaaaaaaaataatttatttgtgttt

SEQ ID NO: 42941 - DNA, 201 bp, Homo sapiens
tcctgagtagctgggactacaggtgcatgcacgggtaattttaaaatattttttataggcacaagattttgccatattgtgcaggctggtcttgaattccygggctcaagcaatcccacagtgctgagattacaggtgtgagccatggtgtctagccaattttattaatatgtaatattagaggtaataaaacattaaaaa

SEQ ID NO: 42942 - DNA, 201 bp, Homo sapiens
ctcggttcactgcaacctctgcctcctgggcccatcctcctgggtgggctcaagtgatccacctcagcctcctgagtagctgggactacaggtgcatgcaygggtaattttaaaatattttttataggcacaagattttgccatattgtgcaggctggtcttgaattcctgggctcaagcaatcccacagtgctgagatta

SEQ ID NO: 42943 - DNA, 201 bp, Homo sapiens
cagtgtacagtgttcatctttgtatcattcagaatatcgagctcattgctttacatatggtgtgtattcaataaatactaggttcattgcttatatttcakatttgtattatttgtataagtgttagagtttatactagcattcaggtagcactatgtctattttctagaaatttaatatttctaacaaagcaattatgta

SEQ ID NO: 42944 - DNA, 201 bp, Homo sapiens
gtagatactcagcatcataagagttcgaagtaataattttaatatttagatgacgtaagttaatttaaaatttttttgagatggggtctcactctatggcycaggctagagtgcagtggcacaatctcggttcactgcaacctctgcctcctgggcccatcctcctgggtgggctcaagtgatccacctcagcctcctgag

SEQ ID NO: 42945 - DNA, 201 bp, Homo sapiens
tctaaagttattagagaagcctaagtgaggtgtaacctcagcagtcgggagccaagagagcaagtaagtgctgtgatgtggagaaaatcactttgttccawctgagaagaaatggttgagcactgcttttcccccatgccagtactgacgcacagcctttcacttagcactgattatcgataggggtggggagttaaggta

SEQ ID NO: 42946 - DNA, 201 bp, Homo sapiens
acctttctgtttttcagtttccttatatttaaaacaaaggagaaagagtagatgctttctaaggtcatttgagcactgaactggagttttcttttatcctyataattgggttcttagtttttacttgcctattttttcccataattataaataccattaaccctattaaaatttcatggttccttccttataaaaatgtcc

SEQ ID NO: 42947 - DNA, 201 bp, Homo sapiens
atggcatttctatgacttgaacacaggcctgtctggcttcaaagcctaggccttttcctgaataaagttagttccatagagattcagttttgctgtctacrtgaaagcattgtgtacatggttatgtttttttaaaaaatatatgatctgccacctgttaattattcaggatcactagtgtaaggtgactttgaaaggaaa

SEQ ID NO: 42948 - DNA, 201 bp, Homo sapiens
catggttatgtttttttaaaaaatatatgatctgccacctgttaattattcaggatcactagtgtaaggtgactttgaaaggaaaaatagaaatattctcyagaagcatagcaatacgtaagaactttggtcctatgtatgtttatttttgcataattgttgatttctaagttgctggtgtatctcttattttcagatata

SEQ ID NO: 42949 - DNA, 201 bp, Homo sapiens
tttttatatatgtaatagatatgaaaacatattagatgtaaattatgctcaattcacgtttgtagtcttttgagtatgcagggtatgaattttttggggcacatatatatatatatatatacttacagtacacttcaagatggttttcttctttcttttcagaactccatgtctgaaaagagcccaggctagacctctacc

SEQ ID NO: 42950 - DNA, 201 bp, Homo sapiens
ttttatatatgtaatagatatgaaaacatattagatgtaaattatgctcaattcacgtttgtagtcttttgagtatgcagggtatgaattttttggggcayatatatatatatatatatacttacagtacacttcaagatggttttcttctttcttttcagaactccatgtctgaaaagagcccaggctagacctctacct

SEQ ID NO: 42951 - DNA, 201 bp, Homo sapiens
tgaaggacactgaacaagatggagtagcataatataattcattgttcatctatctatctatcatctatctatctatctatctatctatctatctatcatcwatctatcaatcatctatctattttggtgtattgaaagtcatttaattttttagatacctttattattatttcaacctcttgtctgttttggaactatgga

SEQ ID NO: 42952 - DNA, 201 bp, Homo sapiens
actgaacaagatggagtagcataatataattcattgttcatctatctatctatcatctatctatctatctatctatctatctatctatcatctatctatcwatcatctatctattttggtgtattgaaagtcatttaattttttagatacctttattattatttcaacctcttgtctgttttggaactatggaaggactat

SEQ ID NO: 42953 - DNA, 201 bp, Homo sapiens
aacaagatggagtagcataatataattcattgttcatctatctatctatcatctatctatctatctatctatctatctatctatcatctatctatcaatchtctatctattttggtgtattgaaagtcatttaattttttagatacctttattattatttcaacctcttgtctgttttggaactatggaaggactatggca

SEQ ID NO: 42954 - DNA, 201 bp, Homo sapiens
catctatctatcaatcatctatctattttggtgtattgaaagtcatttaattttttagatacctttattattatttcaacctcttgtctgttttggaactrtggaaggactatggcatatttgcatgaggagtctgataattctagttgaggaaattgggagccaccttattctcaggttcactttgaaagacctgttcta

SEQ ID NO: 42955 - DNA, 201 bp, Homo sapiens
aaaattaattcatgtaaaaattaacacattaaatgtgaaagcagctctttactcagagcatattattctctttaaaataggtaaaatcaccttgctgataytggatgaagaaagtgatattttcatgttaatttttgatgccatgcactcatttccagccaatgatgaagtccagaaacttggatgcaaagctttacatgt

SEQ ID NO: 42956 - DNA, 201 bp, Homo sapiens
agtaagtatgatagatatgtaaaacaaatggccttgagtatttatctgtacacatgacaaccttcccttgatacactgtgtttgcaatccaaggctactcytgtggaattctttaaaatacagatatttttccttgagtcaatgatttacatttatagagagctttaaactcagaagtttgatttagaaagcaaacattta

SEQ ID NO: 42957 - DNA, 201 bp, Homo sapiens
gctactcttgtggaattctttaaaatacagatatttttccttgagtcaatgatttacatttatagagagctttaaactcagaagtttgatttagaaagcawacatttaaggtaacatgtcagaagttattattttaataatataatcatataattataaaactggttaagttgtagatttttgatgagtacttttgaattc

SEQ ID NO: 42958 - DNA, 201 bp, Homo sapiens
ttgtcggtgccattcacagtgacatgagttgctgttggccaaagttgtgtaacactggtctttctttccttctctcttccctcctgaaccatgtaaacatrtatctatctgattgttctgctctcccttcaaaatataattcaaattatctttctttaaagccctccccatacctccaaacctccaaacaaaattaagatt

SEQ ID NO: 42959 - DNA, 201 bp, Homo sapiens
taaatatcagtggttacaaagttccttaagataaaagtaaacctattattcaggagaagcaattggtctcatgggagatctgagaaacatcttcccatggkttttcctggatgagacaataaaggacatacattttgcaaggaatacaaagtgtattgcagcgagagtgactctgtcaaaagtcagaatagcatgggcctg

SEQ ID NO: 42960 - DNA, 201 bp, Homo sapiens
cttgagcctaggaggtcaaggctgcaggagctaagattgtgccactgtacagcagccttggtgacagagggagactctgtctcaaaaccaaccggtcgggygcggtggctcacgcctgtaatcccagcactttgggaggccgaggtgggtggatcatgaggtcaggagatcgagaccatcctggctaacccggtgaaacct

SEQ ID NO: 42961 - DNA, 201 bp, Homo sapiens
actttctcatatatgtctctcttcatggcaccatatgcctaaagtcagcttggatagtttggatcctccaaggaaaattccttccacaaacatgtgcagcrcacagtgctagataattaatagagaatataaaatgggtttcctgtttcaagatggtttgtaggtctgtatgtgtagggcattgacaagagagtaaaacat

SEQ ID NO: 42962 - DNA, 201 bp, Homo sapiens
cttgcctgccaaacaggaatgctggtactgttaatcaaacagaaagttcagaatgacaatctgacttttttttgtagaagatactaaacttttggccttgaatatctgaatttaagatactggtatcaagccaaaagaaatttgggcttagaacttgaaagatttaaacttgtgctttgacttgtgtgctcacagctctct

SEQ ID NO: 42963 - DNA, 201 bp, Homo sapiens
attctgtagattctgggcaaggcatttaatgtttctcgctgcatgctcttacgtaaaatgtgtacagttgcagccctggagattccgcattggctctgacrgtgtgtctgcccctacagaactcatgtgagtcgagagactgataagtaaacagattattataatacagtctcagaatgcagtggcagtagtgtgtaaaag

SEQ ID NO: 42964 - DNA, 201 bp, Homo sapiens
tagggaaagggaaggattttgtgccggtatggaactctcagttactctggattaattcatctaggcataaattttagaatctctatagtagagtttatgarctaaatctggcctgccaacatattttatttgtccagttcagggttttgctttgttttttgagacagagtctcactctgttgcccaggctgtagtgcagtg

SEQ ID NO: 42965 - DNA, 201 bp, Homo sapiens
tttactaaagataattaaatttttccatcaataatttaatacatttttactgtgcatcttttgcatgcagattattgcattaattttaattgaaaataccraagaactaaaaagaaacttccccttctaagtccacattaaggaaacaacatacctaaaagcacctgatacaactgtactacattccccacaggaaatcat

SEQ ID NO: 42966 - DNA, 201 bp, Homo sapiens
tacagttaatacaacgcaaactagtatcattacttttgctcaatcacttccattgtctaagtaagataattaaaggacagcataaaataaaatttcaaaaytttactcaatcatattaagctattttaattaaagtaaatgttttaatgccattgaatattcatcaccattcaaaattattgatgtaaatagtgttatatg

SEQ ID NO: 42967 - DNA, 201 bp, Homo sapiens
cccattttcatgcattacgtttatgaattaaaatcacataaacaatctaattatttaaatttagtcaaatttcttttaagcaagcaacaattaaaatagtwgctccgctttactaaagataattaaatttttccatcaataatttaatacatttttactgtgcatcttttgcatgcagattattgcattaattttaattga

SEQ ID NO: 42968 - DNA, 201 bp, Homo sapiens
tgaacatagtttaagtacgtagaggagggaacagttaagtttattcatggtgagtgttggtgaaaagtggaagaggtaccaaaacagccgtatagataacyggttccagttagccaacattctctaaagttattagagaagcctaagtgaggtgtaacctcagcagtcgggagccaagagagcaagtaagtgctgtgatgt

SEQ ID NO: 42969 - DNA, 201 bp, Homo sapiens
ttatgttctatgtaaatgctttccattcatttgtatatgatggcatatatagaaattataatgtttgtaaagtccactgggataaatggacaaagcagctraaggctgaaagcaaccaagccttttacagccccttcattccccacactcccaaaaagctgagtgaatggtcgatacctccacatgcttataactcattcc

SEQ ID NO: 42970 - DNA, 201 bp, Homo sapiens
aaaaaacaatgaggtgagattcctaatgtgctgctatggaaaaatcttcaattttctatgtgtacgaatgtatttcccaggtattcgttttttccttcctktatgttgacacattatgcacacttttggatgaaattaatatatttccaccgctttatgtcctctccctcacttttatcacccaattgtagcaaagtatat

SEQ ID NO: 42971 - DNA, 201 bp, Homo sapiens
aagaaacaccaacaaaaaaagaggaaaattattccttaatcattattgctggaatatagttactttccacaaatagtgaagtgccagttgtaaagcatatytatatgtttcctagactttggcattactttgtgaaaataactgtaattacttatgttctatgtaaatgctttccattcatttgtatatgatggcatatat

SEQ ID NO: 42972 - DNA, 201 bp, Homo sapiens
tgggaatgcgagtctgttttcctttctttggctaatctacttacctagtagctaggaaagaggccagcatgagtatttttccattgagctggctagctcastcattggagaaaccatttcaatatttatggattctctgaaaaaaacttggagagtaaaaaagcataggtggtaggatgctgccatccttctgttggcatc

SEQ ID NO: 42973 - DNA, 201 bp, Homo sapiens
gaggtagtgggagttgacttttctgctaataagtttagaaataaaggaaaaatggtagcttgaggaaagagaggagcgattaagggaaagtctctcgttawctcttgtttttcatctctgaggacagcgcttagcccaaggcctgacctgtgatcattactctctcaaggtttattccatggacagagctatctcatttca

SEQ ID NO: 42974 - DNA, 201 bp, Homo sapiens
atagctggtaaatgcgatagtgtgtaaaatgttctataaagtctaacgtgactttatgatgaaatttcttcttctaggtttattgcttgcaattttcaaaycacacattgggttactgtctaggatagtgattcttaaagtgtggttcctggaccagcagcatttgctgggggaacttgataaacagtgtaaattcaagga

SEQ ID NO: 42975 - DNA, 201 bp, Homo sapiens
tacttaatgtcttggttttgttatgtataaaatggagataataactgatttttcacttagagttgttgaatattttataagataattcatgaaaaagtgtsagtataatgcttggcacatagtatgcgctcaataaatgttaatgttattactattagatttaaaagtatcttttgacccctggctatagaagatgaggaa

SEQ ID NO: 42976 - DNA, 201 bp, Homo sapiens
gcattgtttgaagtattttaagtatattatctcttctgattctaacagcactccatgaggcagatattattattattattattttggtattgtatggactrcaaaactgaggcatagaattgtagagatttttaaggtcaggcctgatataacagcaccagattttcagcttatgcaggctgactccagagtaggcatttt

SEQ ID NO: 42977 - DNA, 201 bp, Homo sapiens
cttttagtggttattcatgccagtttgagggaccttaagccaaagatattgcaaaggtttggattttttttttttttggctatgaaatacttcaaaatgayatttaagttctttatgagatagcaaatagttatttataaaaatagagcaaaatagtggaagctttttgaaggggtactttttaatatatattttttatta

SEQ ID NO: 42978 - DNA, 201 bp, Homo sapiens
atttatttatacaaagtaactacaatgtaaaatgtggagcttttatttttaaggagggtgttcatctctgataattcttttctatttttgttgccatgacytgagttcaagctttttttctcttgtttgaattgtactattagctaattttcatacctgttctcttccttcatttctatccttttcttactctatgattga

SEQ ID NO: 42979 - DNA, 201 bp, Homo sapiens
cttctagttgatagctccttgctagcgtctagctcctttccatagctcttcctgagtagggccagcatgcagtgccacagcttgctaaggcttctcctggmttgctgagttgttctagtttttgtggcacctcacatgctaacccaccctgaacacatgctctgaaaacataacatttagaggaaggttgaagactgagag

SEQ ID NO: 42980 - DNA, 201 bp, Homo sapiens
ttaatatgtgatattctgaatgtgtttaaaaggtatgagtttttcaggctctggcagtattttagaatgtgtatgtgatttctatttatttccatgttttstcctatcttcttaagatagactacttattttaaaagcagtacttaagttaaaactttttatgtttctttttctgccactttcaaagtgttgaatcacagt

SEQ ID NO: 42981 - DNA, 201 bp, Homo sapiens
aacatggagtacctaacataggccgaaacaaaattatttgaatctccgtagcttgttttctcattataacattcttaggaagggctgcttcacagaaatayattttttatttaaggagattacacttgatgtatctcacacaactataatgaatattgtaatttttgaataattaaactttcatatcatctttaagcttat

SEQ ID NO: 42982 - DNA, 201 bp, Homo sapiens; identical to SEQ ID NO: 19567

SEQ ID NO: 42983 - DNA, 201 bp, Homo sapiens; identical to SEQ ID NO: 19537

SEQ ID NO: 42984 - DNA, 201 bp, Homo sapiens
ttgatgatgaggaaactgaagaaaaagcaccattgaagaaatctacatactccagccaaaaatgcacaaaagtcaaatcagaatagaaaacactcaaaccyatcatcaacaccaagattaaaaggacaagaatccttcaaaaaacaggaaaaaactcgtaaaacaccaaaagggcctagttctgtagaagacattaaatca

SEQ ID NO: 42985 - DNA, 201 bp, Homo sapiens
cccacctaagtgtgtgccgccacctgatggaagattcgatggacatggacgtgagccccctgaggcccagaactatcttttcagttgtgaactaaaggccracaaagatgatcactttaaggtggataatgatgaaaatgagcaccagttatccttaagaacggtcagtttaggggctggtgcaaaggatgaactgcacat

SEQ ID NO: 42986 - DNA, 201 bp, Homo sapiens
gaggaggatgtgaaactcttaaggatatctggaaagtgatctgtccctggaggtggtagcaagattccagagaataaaagtaaaacttgctgctgatgaadatgatgatgatgatgatgatgatgatgatgatgattttgatgatgaggaaactgaagaaaaagcaccattgaagaaatctacatactccagccaaaaatg

SEQ ID NO: 42987 - DNA, 201 bp, Homo sapiens
catgtcgctttcaagtgtaccaaaggacattttgttctgttgaaagccacaggaccaaaaggaaaatattgcaactatttgcaaacatacttccctacctrtacaagcagccatatactaaaaagcactaaacaagcacaaatgaacactaaatagccttataccaaaaagcattcttgtaactgtcagggcatggtatga

SEQ ID NO: 42988 - DNA, 201 bp, Homo sapiens
gactgctgttgtagctcacattttgactgcaacctcatgagggactttgagccagaatcatccccaattcctaacctacaaaaactgagagataaaaacatttatcactgcttaggcaaccaagttttgcattattttattatgcagcaatagataactaatacaaaatcatgattattgctatattggcctaccattgat

SEQ ID NO: 42989 - DNA, 201 bp, Homo sapiens
ttgataatgttacacattaatgcatgtcaatgcatttaaatggtttattctttcaatttaaatagatttattttaagaggaaaagttttatgttgtaaatraaaaataagcatcactagccacaaaataaaaataactcagaatttaatttccttttcctgtgactcattttttatttttatgttttaaaataaattttat

SEQ ID NO: 42990 - DNA, 201 bp, Homo sapiens
tttattttaagaggaaaagttttatgttgtaaataaaaaataagcatcactagccacaaaataaaaataactcagaatttaatttccttttcctgtgactsattttttatttttatgttttaaaataaattttattgcatgtatttaaggtatacaacatggtgttatggaatacatatagatagcaaaaaggttactaca

SEQ ID NO: 42991 - DNA, 201 bp, Homo sapiens
ttttgttctctaactctgtatatttgattgtttttaaaagattccacatataaatgagatcatgcaataattttctttatttttctgtctatgtctggctyatttcactaagcttaatgtcctccagacacattcatgttgtggtaaatggtaagatcttgttctttattgggctgaataatattcccttgtatacatata

SEQ ID NO: 42992 - DNA, 201 bp, Homo sapiens
tactgtggcaagcatttgagctcaggtcatgggtctccaaagccattttacacaatgatatgtgtgatggttttctgggatggcccagctagcaggtgggkgagggatcactgaggtaggggacagtgtaattgacaggcttcatagaagctaagcaagggacacatttagttcaagttcagtggcaaggggaaaaaaact

SEQ ID NO: 42993 - DNA, 201 bp, Homo sapiens
tttccctcttgaaacaccattcctttctttgttcaggatctactgtggcaagcatttgagctcaggtcatgggtctccaaagccattttacacaatgataygtgtgatggttttctgggatggcccagctagcaggtgggggagggatcactgaggtaggggacagtgtaattgacaggcttcatagaagctaagcaaggg

SEQ ID NO: 42994 - DNA, 201 bp, Homo sapiens
aaagatttttatttctggtggttctagactgagtgacagcattggacaaagatgtgtggagcaggatggtagctggaggagtgccagagagagacccgggmtctcaccaaggttacagtgtctgtggctttgcgaagattcctcctaaaattctgctcatggaaggatttcaaagaaagactgagtgaacttgttcctgag

SEQ ID NO: 42995 - DNA, 201 bp, Homo sapiens
gttctagactgagtgacagcattggacaaagatgtgtggagcaggatggtagctggaggagtgccagagagagacccgggatctcaccaaggttacagtgyctgtggctttgcgaagattcctcctaaaattctgctcatggaaggatttcaaagaaagactgagtgaacttgttcctgagaatgcttgaagggacgggga

SEQ ID NO: 42996 - DNA, 201 bp, Homo sapiens
tttctgctgagagcagcaattctgtctttatcctctttcccatgactacagagcctccaacatctgactgagttgacagaagagtgagggggacactggaraaagtcccaggctggaggccaggggacctggaggccgatattgtcattgcctctgactagtcctatgctcttgagcaagctgctccagtgtctgagtctc

SEQ ID NO: 42997 - DNA, 201 bp, Homo sapiens
ctgatcatagctctcctgcttaccttaaaggactactgggggaattcagtgagagcctttacttactgaacatctactgtaaagtagacattggctttaaracaagtgggaacacattgtcatttataagatttatgtaaagtaaataaaagaaatttttattgttgtagttattctattggagaaaattaaagttgggta

SEQ ID NO: 42998 - DNA, 201 bp, Homo sapiens
acaagtgggaacacattgtcatttataagatttatgtaaagtaaataaaagaaatttttattgttgtagttattctattggagaaaattaaagttgggtayacaatcacggactgtacctgattaattcttgcatctgattcttatgcctctgtcttcagaatatttgtaataatctacaattgtccattttggactgtga

SEQ ID NO: 42999 - DNA, 201 bp, Homo sapiens
ttgtcatttataagatttatgtaaagtaaataaaagaaatttttattgttgtagttattctattggagaaaattaaagttgggtatacaatcacggactgyacctgattaattcttgcatctgattcttatgcctctgtcttcagaatatttgtaataatctacaattgtccattttggactgtgaatcttttgaagttga

SEQ ID NO: 43000 - DNA, 201 bp, Homo sapiens
ctgaaatacctgaatccttaatgaggtcccagcaccttggacctttgcatagttttggctagaacatctttgttcctgtgacttcccacttaggttcaacyccaaaatatctctcagatttcaacttgaaagtcccttcacttcctctggggaatcttgcatgatattccttttttttctttttccttcctagctcattat

SEQ ID NO: 43001 - DNA, 201 bp, Homo sapiens
ttacagaagcagtcttccctgcatcccagaggctgccacagctgagagtttaaatttgcagcttcagaaaggaaagcagacacacaaatgtgcacacgaacacacacacacacacacacacacacactcactctctctctctctctaatgcccatgtgatatcaaatgtagccttgacaatgctccagcccccacagagat

SEQ ID NO: 43002 - DNA, 201 bp, Homo sapiens
tgaattctttcctttcttccataaatagtacgtgattttccactttgggccaggcacagtattcttaacgtgctcatatcttcatgcctaatatggtgccyggtacaaagcaagcaataaacatgaatgatggaatgagtcaaccagtgaatcaaaggtttagttcaaacaagttaagccctccctatggtctaggagctt

SEQ ID NO: 43003 - DNA, 201 bp, Homo sapiens
atcccagaggctgccacagctgagagtttaaatttgcagcttcagaaaggaaagcagacacacaaatgtgcacacgaacacacacacacacacacacacacacactcactctctctctctctctaatgcccatgtgatatcaaatgtagccttgacaatgctccagcccccacagagatgctagtctctcccacttctcag

SEQ ID NO: 43004 - DNA, 201 bp, Homo sapiens
tgcagtggtgtgatctcagctcattgcaacctctgcctccctggttgaagcgattttcctgcctcagcctcctgagtaaactgggattacaggcatgttcyaccacacccagctaatttttgtatttttagtggagacggggtttcaccatgttggccaggctggtcttgaactcctgacctcaaatgatccacccacctc

SEQ ID NO: 43005 - DNA, 201 bp, Homo sapiens
tcccagaggctgccacagctgagagtttaaatttgcagcttcagaaaggaaagcagacacacaaatgtgcacacgaacacacacacacacacacacacacacactcactctctctctctctctaatgcccatgtgatatcaaatgtagccttgacaatgctccagcccccacagagatgctagtctctcccacttctcagt

SEQ ID NO: 43006 - DNA, 201 bp, Homo sapiens
ccacccacctcagctgcccaaagtgctgggattataggcgtgagccactgcgcctggcctggctcattgtttttatatataaaacttacatattttctttyctatgggagtgttgtgattactaaatgagagaatgaatgcgtagtcattcttcaagggattgtcacacagggaagcttcaatatgtttgggtaacagtaa

SEQ ID NO: 43007 - DNA, 201 bp, Homo sapiens
taatcccagttacttgggaggctgaggcaggagaattgcttgaacccaggaggtagaggttgcagtgagccgagatcgcgccactacactccagcctgggwgacaagagcagaactctatctcaaaacaaaacaaaacaaacagaaaagaactgaagcacagctaagccggataagaatttatctctatctctaagtgtat

SEQ ID NO: 43008 - DNA, 201 bp, Homo sapiens
gcataggtcctgggggcaatgacagagtccagatgtccccatgggcatgacttgcaaattatgtactttgacagaatatggtgaggacaagaaccagaccrtgcagcactattttcacgccagctgcagagtctaaatgtgtttcctgacacctcagaaccttcttgggggagggcattctgggctgggtgatgggacatg

SEQ ID NO: 43009 - DNA, 201 bp, Homo sapiens
gcattcttgaagtgacttttatgaaatgattagagaccttaattgttatcatcaatttactcattcatttgcccagctggtctgtgaggactccttgaggscaaggactgtgcttttcacctgtacagacccaaagcacttggaggttgattaatgttcctatgaaatgattgactgatcaactaattggctgcataatgg

SEQ ID NO: 43010 - DNA, 201 bp, Homo sapiens
ctgaagcacagctaagccggataagaatttatctctatctctaagtgtatctctctgtcttatgtgtatttcctgtatctcagtttctacatctgtgtattatctatctatctatctatctatctatctatctatctatctatctatctatcatctgtctatctttctatctctctattatctatcagctactatgtgcca

SEQ ID NO: 43011 - DNA, 201 bp, Homo sapiens
tctccaaccaaaccttatctaatgaagatgacattttaattcccttgtttaaatatgactctaatttcaaagtaggaagttggttctgactttgtgggtgrgaagaggatatggtgtctaaacatgtgccccttaaaaccaccataatagccaattacttattctttatggccatatgtcaggtatattttaaagttggaa

SEQ ID NO: 43012 - DNA, 201 bp, Homo sapiens
actaaccatgcctaggaaggaaaggagttgttgttttataagggattgaggtttgggagattaattggcacaatcagcagggagagcacgtgtgtttttakgagaattatgccgagataggtaacagatgaggatgaaatttgggcttgactgaagtaatgggggctgtctgtgaagccttgtggcagtacagcctaggta

SEQ ID NO: 43013 - DNA, 201 bp, Homo sapiens
tgaagcacagctaagccggataagaatttatctctatctctaagtgtatctctctgtcttatgtgtatttcctgtatctcagtttctacatctgtgtattatctatctatctatctatctatctatctatctatctatctatctatctatcatctgtctatctttctatctctctattatctatcagctactatgtgccag

SEQ ID NO: 43014 - DNA, 201 bp, Homo sapiens
taccctgtgttggtaattgtgctgggcacaaagaacataatagtaaatcacataaaattccatcctcaaggatcccatgttctatcatactagagaactgwgtacagctgctcctcgacttatggtgggattacatcccaataaacccatcataagttaaacctatcataagtcaaaaatgcatttaatacacctaaccca

SEQ ID NO: 43015 - DNA, 201 bp, Homo sapiens
gatcttgcaggatggaaaaattgaaagtgccgttttctggctatttggaactactgtgagtttgtattggggtcaagcagcattgcagaagaaaataagaygcttagattttaggtcaggtgagagctgaataggttttaagttcttaagaacacaggctaagggagaaggaggaggaatggagggtggaagtttgcctat

SEQ ID NO: 43016 - DNA, 201 bp, Homo sapiens
gaagcacagctaagccggataagaatttatctctatctctaagtgtatctctctgtcttatgtgtatttcctgtatctcagtttctacatctgtgtattatctatctatctatctatctatctatctatctatctatctatctatctatcatctgtctatctttctatctctctattatctatcagctactatgtgccagg

SEQ ID NO: 43017 - DNA, 201 bp, Homo sapiens
tgttcattcatgccatcatttgaaaaatactaattaagtatttaccctgtgttggtaattgtgctgggcacaaagaacataatagtaaatcacataaaatwccatcctcaaggatcccatgttctatcatactagagaactgagtacagctgctcctcgacttatggtgggattacatcccaataaacccatcataagtta

SEQ ID NO: 43018 - DNA, 201 bp, Homo sapiens
acatgatggctaggctaaaacagtaaggtcaagttgtttggacagaaaggctacagggtgcggtcctggctcttgtgtaagaattctgaccgcactaaccwtgcctaggaaggaaaggagttgttgttttataagggattgaggtttgggagattaattggcacaatcagcagggagagcacgtgtgtttttatgagaatt

SEQ ID NO: 43019 - DNA, 201 bp, Homo sapiens
aagcacagctaagccggataagaatttatctctatctctaagtgtatctctctgtcttatgtgtatttcctgtatctcagtttctacatctgtgtattatctatctatctatctatctatctatctatctatctatctatctatctatcatctgtctatctttctatctctctattatctatcagctactatgtgccagga

SEQ ID NO: 43020 - DNA, 201 bp, Homo sapiens
acagctaagccggataagaatttatctctatctctaagtgtatctctctgtcttatgtgtatttcctgtatctcagtttctacatctgtgtattatctatctatctatctatctatctatctatctatctatctatctatctatcatctgtctatctttctatctctctattatctatcagctactatgtgccaggaattg

SEQ ID NO: 43021 - DNA, 201 bp, Homo sapiens
agtttcctcatctgtaagaaggaggacaataataattcctatcttgtatgttattgtcagaatttaatgagttaacaaatatatgtaatatatatgttttwtatatatatacacattttggtttagtgtttggcatatagttaagtacaaaataaatattagctattgatattaattttggggttggaggtcaagaaataa

SEQ ID NO: 43022 - DNA, 201 bp, Homo sapiens
ttgaatttaatttatacctcataacaaactgtaaagaatgtactaccgttttcttcttctagaggggaagaaactgaggctcaacaagtttaagaaagttkctgggagacatatagcacacaaacataaaaccagaatttgaatacacatctatttcatgatggactacttttgtggaactgttaaaggaaacaagtaatg

SEQ ID NO: 43023 - DNA, 201 bp, Homo sapiens
attttcaagggaatgtttctaatgttccatcattatagaggccacatagcacactggttaaaaatgcaagatcaaggaggtttgaatttaggctctgtcasttaaaagttgtgtgatttgggccagataacttaacccctctgtgttcgtgtttttccattagtgaaatgaaaataaacaaaagcaacaacaacaataata

SEQ ID NO: 43024 - DNA, 201 bp, Homo sapiens
gcacactggttaaaaatgcaagatcaaggaggtttgaatttaggctctgtcagttaaaagttgtgtgatttgggccagataacttaacccctctgtgttcrtgtttttccattagtgaaatgaaaataaacaaaagcaacaacaacaataatatttatatcagaagaatgttgtgaggattaaacatatatgtgtgtatat

SEQ ID NO: 43025 - DNA, 201 bp, Homo sapiens
taccttttttcctcccaccaccttcttgctttgccttgccttcaccccagctcagcaatctgctcagaaaagagagcatcagaactgaccaaaaaaggaakgaatatcctaagaaatgatgcagctacatattgcttggcttgtgtttcctagataaggcattgattcctaggcactagaattatatactataattaaaga

SEQ ID NO: 43026 - DNA, 201 bp, Homo sapiens
gggcaatgacagagtccagatgtccccatgggcatgacttgcaaattatgtactttgacagaatatggtgaggacaagaaccagaccatgcagcactattytcacgccagctgcagagtctaaatgtgtttcctgacacctcagaaccttcttgggggagggcattctgggctgggtgatgggacatgctgggattttgtt

SEQ ID NO: 43027 - DNA, 201 bp, Homo sapiens
acttctgtccattcactgctttgtcagcagcagtttacttgactgttaccttgggtaattccttgagcttatttatttactatttttgagatggagtctgrctctgttgcccaggctggggtgcaatggtgcaatcttggttcactgcaacctccacctcccgggttcaagcgattcttctgcctcagcctcctgagtatc

SEQ ID NO: 43028 - DNA, 201 bp, Homo sapiens
tgcagagtctaaatgtgtttcctgacacctcagaaccttcttgggggagggcattctgggctgggtgatgggacatgctgggattttgttgctctccttcycttgtgggtcttaatggaaaagctaagtcaccagcaacagagaaatagcggtgtcaggcattgttgaaactttccatgtattctcatgacacatcatttc

SEQ ID NO: 43029 - DNA, 201 bp, Homo sapiens
aacaaatatttatagagcccctggtatttgccgagtgccatggagatgagagctaccatggacaaaaggatggtcacccaatcctcggtggtacaggactwctgtaaatgccccaggaggtcttccctttttcccaggttgatgccttctgaatcacttctgtccattcactgctttgtcagcagcagtttacttgactgt

SEQ ID NO: 43030 - DNA, 201 bp, Homo sapiens
aatggaaaagctaagtcaccagcaacagagaaatagcggtgtcaggcattgttgaaactttccatgtattctcatgacacatcatttccagttataaaaargagtggaggtgttgggctctgttgcctaatcgtggtaagaagtcccttttactagaatgcattttttcatcacagcatcatggtcaatgatcaaccatgt

SEQ ID NO: 43031 - DNA, 201 bp, Homo sapiens
atagcggtgtcaggcattgttgaaactttccatgtattctcatgacacatcatttccagttataaaaaagagtggaggtgttgggctctgttgcctaatcrtggtaagaagtcccttttactagaatgcattttttcatcacagcatcatggtcaatgatcaaccatgtgaacttgtgtaagttgcataaacttttcagta

SEQ ID NO: 43032 - DNA, 201 bp, Homo sapiens
caaggtaccatatcttataacaggaacccagcctattatatgcatttatattgttgaatcttgtgatgttttttccttatatattaaataagtcagtcttktcataagacctgtcagttaattttgataaacacactagggaattcatcgtctttgcagtctaggtggcaaagcaattttacttactgttttttattacct

SEQ ID NO: 43033 - DNA, 201 bp, Homo sapiens
tattgacaggcttgcagcgaggaatgagcatctaccttgctggttagattgcttttatccagagtggtgatccctggggagatgttttgcacttggcctcrtggcagatgggtaacaagtgctggatcccagaggaatgatgcattcaacaagtcctgagttttatctatagtgccatgcagtgagttcctcctgctccta

SEQ ID NO: 43034 - DNA, 201 bp, Homo sapiens
acttgagtccctggacttttatttcctcatatgtgaaataaagataatgtctaacttataataacttagttagataattagtgtatggaaaatgcaaggtrccatatcttataacaggaacccagcctattatatgcatttatattgttgaatcttgtgatgttttttccttatatattaaataagtcagtcttttcataa

SEQ ID NO: 43035 - DNA, 201 bp, Homo sapiens
cttaaaagtgtctttataagaggaaggcagagagagatttgactacagaggaggagaaggcagtgtgaccaaggaacagagattggagtgatgtggccacragccaaggaatgccagcagacaccagaaactgaaagaggcaaagaatggattctcccttggagcccccagaaagaccaggcctgttgacaactggatttt

SEQ ID NO: 43036 - DNA, 201 bp, Homo sapiens
ggctgtcagaaatttagacttcagtgtggttccagaactagtgtgcagaaatataaggcaaagctcataaccatcctccagtgttcaggctcagcataagycctctaggaaaacctttgtacctttctttgggcctcccccaccatagccctcatcatgctatgattaattgctcaattatctttctctctacattgtcgg

SEQ ID NO: 43037 - DNA, 201 bp, Homo sapiens
tccaacgccaagcccatgcacttcactccaagtcctcataagggagcctcatgagatatgagccaccacattcagagacagtttcactaatttattagaarcatgcttattaaaacgcattctttctattcagcctgttatttactttatactcctttaacatctaccacccatataggggttaattatatactatctcat

SEQ ID NO: 43038 - DNA, 201 bp, Homo sapiens
tcgtaaatgaagagtctgaggcttgagacttggtttgcccaagtccagtagcattaatacaggcagccaggtcttcagatagctgcccaattcccttttcrcatctcaaatatgtgaggtcttcagacaccttggagataatatttgctctcacctctttcctcaaagaattaaatgtgacttgccatcttgagttttgtt

SEQ ID NO: 43039 - DNA, 201 bp, Homo sapiens
aggaaagaggtttaattgactcacagtttcacatggctggggaggcctcacaatcatgatgggaggcgaaggaggagcaaaatagtctcatcttacatggyggcagacaagagagagcatgtgcaggagaactcccccccatccttttttttttttctttttttgagagggagttttgctctgtctcccaggctggagtgc

SEQ ID NO: 43040 - DNA, 201 bp, Homo sapiens
gcctcacaatcatgatgggaggcgaaggaggagcaaaatagtctcatcttacatggtggcagacaagagagagcatgtgcaggagaactcccccccatccttttttttttttctttttttgagagggagttttgctctgtctcccaggctggagtgcagtggcatgatctcggctcactgcaacctctgtctcccaggttc

SEQ ID NO: 43041 - DNA, 201 bp, Homo sapiens
ttttacaaatacttgttagattcagacatgtatcacaccttggctgcaagtaatgggaccatgtcatagggattgaaagtgatccatccatggtggcgggygcctgtaatcccagctactgaggaggctgaggcaggagaatggcatgaacccgggaggcggagcttgcagtgagctgagattgcaccactgcactccagc

SEQ ID NO: 43042 - DNA, 201 bp, Homo sapiens
cctttagcagactccgtgtctctttcctttgatggaacagctaatgaaacacatcctttccttgagtcaatccctgatttcagaaaaatttttagacatcktgtgtgtgtgtgtgtgtgtgtgtgtgtatgtgtgtgtgtgtgtgtgtgtgtatgttggggggatggagggaagagtgaggaaatagtttccattcagtag

SEQ ID NO: 43043 - DNA, 201 bp, Homo sapiens
tcctttgatggaacagctaatgaaacacatcctttccttgagtcaatccctgatttcagaaaaatttttagacatcgtgtgtgtgtgtgtgtgtgtgtgtrtgtatgtgtgtgtgtgtgtgtgtgtgtatgttggggggatggagggaagagtgaggaaatagtttccattcagtagtctggagcctgatctattggaaaa

SEQ ID NO: 43044 - DNA, 201 bp, Homo sapiens
tgatggaacagctaatgaaacacatcctttccttgagtcaatccctgatttcagaaaaatttttagacatcgtgtgtgtgtgtgtgtgtgtgtgtgtgtakgtgtgtgtgtgtgtgtgtgtgtatgttggggggatggagggaagagtgaggaaatagtttccattcagtagtctggagcctgatctattggaaaatcccc

SEQ ID NO: 43045 - DNA, 201 bp, Homo sapiens
gatttaggaactaatagtggctcagggtgtggggaaggaaggcttgctagagaggattacacttgaacagaatcttgaatatgatttagagcttgggaggaaaagggaagaaaggaggcagtgggagagaggcagagatgtctatccataccagagtgtgaagaggagaaacagcatgctgcatttggggaaagtccatgg

SEQ ID NO: 43046 - DNA, 201 bp, Homo sapiens
atatcctaagaaatgatgcagctacatattgcttggcttgtgtttcctagataaggcattgattcctaggcactagaattatatactataattaaagagatttttttttaaatctatcaacaaagacctagagtttgaaaatctttcagttttctaatccaaattagggaaccagttacacagggtagcataggtcaaagg

SEQ ID NO: 43047 - DNA, 201 bp, Homo sapiens
cctcccttctcccctcccctccccttctccttttcctccccttccctccccttctcttcccttccctttcctctacccccttccccctttcccttcacttmcccttatttcttttctttctttttctttgtttctccctccctctctcctcttttttcttttctcctttctttccttcctttctcctttttttcccttctt

SEQ ID NO: 43048 - DNA, 201 bp, Homo sapiens
ttggtttaatttataatgatttaaaaaattctctactatagccctaattgtggtcccactttgttactatagtttaatttgtgatctctttttttttttgkttttgtttaataatctcttttgcttctttgttttcttgtacattaatatcagttgtttacctgtttctgtcagaggcatttgaaccagaacgactccatc

SEQ ID NO: 43049 - DNA, 201 bp, Homo sapiens
ttgttcttcagcaatctaggttgacttcatgaacgagctggcgttcaaatgaatccttgaattgtggaaacagaatgttaaatctggaatgaacttcagayatcatctagtatggagaggacaattaaatgttgacttttacatcaatttggattaaatatttgtgattgcttacaattctgtgtcaagaagtagtcagag

SEQ ID NO: 43050 - DNA, 201 bp, Homo sapiens
ggcaccaaatttcacttgcatccatggaagagaccaccaaacaggctttgtgtgagcaataaagctgtttatttcacctgggtgcagctgggctgagtccraaaagagggtcagccaagggagataagggtggggacgttttataggatttgggtaaataaaggaaaattacagtcaaagcggggttgttctctggtggcc

SEQ ID NO: 43051 - DNA, 201 bp, Homo sapiens
aggagcagcctggggaggaggggagaggtcagatgggtctgtagaaaaggaagattagaaagactcagcgacgcttggggttgggacagaggggacaggcrggagggaaagaaggaagatttgggatgagttgcactgggcacagagactaggaagggactgatgtgtaaaagaatgcctggacgtcaggcacctcagacc

SEQ ID NO: 43052 - DNA, 201 bp, Homo sapiens
aatatttatatcagaagaatgttgtgaggattaaacatatatgtgtgtatatatacacatacatatattaatatatgtatgtatgtatgcatatatatttktgtacttagaacagtgcctagtacaaatttaatgctcaataagtatttaataatgataaaaagtgatatttactgaatactttttgtaaagattccttat

SEQ ID NO: 43053 - DNA, 201 bp, Homo sapiens
tgcccaaaatgatgggctacagcttggttttatacattttagggtgacaggagacatcaattaatacatgtgaggtgtacgctggtttggtccagaaaggyccagacaaccggaagtggaggcttccaagtcctaggcagattcaaagatattctgattggcaattgactgaaagggttattatcaataggaaggaaagtc

SEQ ID NO: 43054 - DNA, 201 bp, Homo sapiens
gacgaatgaaactagaattattgaaactctctcaccatataaaaatcaactcaaaaagaatgaaagacttaaatgtaagacctgaaactataaaatgactmgaagaaaacactggagaaatactcgggacatttgtctgggcatagaattttttgagtaagacctcaaaagcacaggcaattattttactcattttggttc

SEQ ID NO: 43055 - DNA, 201 bp, Homo sapiens
tagcagtgcaagagctgatctgaactcaggggccctggagaagcaaagtcactcctccccattctgaagcagctgtggttccttacatttggacacaggcytgagaccttggctacagtgagctagtgctggggaatctacttattgatcaccggagcagctgctaagcctggctttcaagaacatccctcagagggtgct

SEQ ID NO: 43056 - DNA, 201 bp, Homo sapiens
tcaactcaaaaagaatgaaagacttaaatgtaagacctgaaactataaaatgactagaagaaaacactggagaaatactcgggacatttgtctgggcatakaattttttgagtaagacctcaaaagcacaggcaattattttactcattttggttcacaatttcctgttttttatgatctctgaaaattgcagccctacct

SEQ ID NO: 43057 - DNA, 201 bp, Homo sapiens
gatttttatgattgtgatctattttttatgtttattggattttggttttgctgtttggatgttgggctttcattttcaggatagctctatcacatatttcrtaattttgttttgtagaattatcttatattgaaggaatgttgttttgtgctaatacattttctctttctttagagcatatgtgatgttttcgtccaatgg

SEQ ID NO: 43058 - DNA, 201 bp, Homo sapiens
ttaaaatggaaatgtatttttccatgcaccagctaaaattatttctcaaaccatcagtgctaagcaaaccacatatatgcaaatgtcggggaaatgacaaraacacagactgagagattcaaacctagacttgagtgtatcacttgagtccctggacttttatttcctcatatgtgaaataaagataatgtctaacttata

SEQ ID NO: 43059 - DNA, 201 bp, Homo sapiens
atagacacccagtaaatattacagaataaataaattaatgaagaggcaatttactccttcatcttagttcttccttgctgtccagacatagtcctgacttrcatgtgacatgggggaacaaactgttctatctgtaccaccagttaactaaggagtccttcaggctcagctatgaattccatcaggaaaattctgagcttt

SEQ ID NO: 43060 - DNA, 201 bp, Homo sapiens
acattgactaaggctttctgagaaatcttgcttcctgtagcctgcagccattcgttataaaacacagagagcagtctggcccagaacagagtttcccacayttcactcattcttaacaactttttccaaacctgtctttttaatgtttcaatttctgaatatttttctttaaatagactccagtaaaagtagcttcatcct

SEQ ID NO: 43061 - DNA, 201 bp, Homo sapiens
aaattgctgggcaggtaggggagggctactcacggaattaaactgtaaactggaccgggtgtgaggagaggaggtgataaaaagattacagggtggaggastggaggctggggaagaattgggacctagcttggcctggcgaggagcagcctggggaggaggggagaggtcagatgggtctgtagaaaaggaagattagaa

SEQ ID NO: 43062 - DNA, 201 bp, Homo sapiens
gtcaacaaggaggaataaagatagatttgtgcttgaaaaatatcatcttggctataattgtgaagcagaattgcaagcagattggagttggagagaccagyaaggggctgctgtagtcatttaagcaagaaaggatggtggctcaaaccagggtgggagttgcagggatggagggaattgggcagagtctagtgatattaa

SEQ ID NO: 43063 - DNA, 201 bp, Homo sapiens
caagagctgatctgaactcaggggccctggagaagcaaagtcactcctccccattctgaagcagctgtggttccttacatttggacacaggcctgagaccwtggctacagtgagctagtgctggggaatctacttattgatcaccggagcagctgctaagcctggctttcaagaacatccctcagagggtgctttcactgt

SEQ ID NO: 43064 - DNA, 201 bp, Homo sapiens
ttgcattcctctggttttggggaagccgtacctttctcagcttctagaggttctccatattccctggctggtggccaagcatattccgaattctgcttccrttgccacatcttcgtgtctgcctgactctactgtgtctctctcacaagaacttttgtcccagatagtccaggacaatctccccatctcaagatccttaat

SEQ ID NO: 43065 - DNA, 201 bp, Homo sapiens
ttcccctattataattattgaagtgaattcactctgataaaatacagtccttagtagttcgctttaatgctctctaaaatattcttggaaaaatatgaacstttttaagttgacaagtgcttttattataaaagtttaaatagttgtgagggatataatgtaaagtatattgaatatatagtcatttaaaataaaactaac

SEQ ID NO: 43066 - DNA, 201 bp, Homo sapiens
tctttcctcaaagaattaaatgtgacttgccatcttgagttttgttacaaaagattgtaatgctattcaatagtggtatcatatgttatttaccatggaamaagatggcaaaaactccccctgaggaactgcactaaaagtaaaagatcaagaccaagggaagagaaaatacaaatattcgaaccctatgtatctaacatg

SEQ ID NO: 43067 - DNA, 201 bp, Homo sapiens
ttgaatgcgctgaaatctatgatgtttggggattgttaacaatcttcttccaggatttgatcggttttgtacttgtattttctcaatctactattctttayttgctctccttcctttagaatggacaaatttttgtaaacttttaagttttctctttccttgaggtagtaaattggagttgagctacacaggttcctcttt

SEQ ID NO: 43068 - DNA, 201 bp, Homo sapiens
gatggctaggctaaaacagtaaggtcaagttgtttggacagaaaggctacagggtgcggtcctggctcttgtgtaagaattctgaccgcactaaccatgcytaggaaggaaaggagttgttgttttataagggattgaggtttgggagattaattggcacaatcagcagggagagcacgtgtgtttttatgagaattatgc

SEQ ID NO: 43069 - DNA, 201 bp, Homo sapiens
gaagcagtgccttccaccataattgtaagtttcctgagacctccccagacatgtggaactgtgagtcaattaaacctcttttctttataaattacccagtytccggtatttcttcatagcactgtgagaacagactaatacagtcagtaatggaaaagagtaagatgatgggagagaatttgaaaggatttggtttagcta

SEQ ID NO: 43070 - DNA, 201 bp, Homo sapiens
aaacagtaggagtttgtttttcatgtaaaagtctggcgttacatggtcgaggattaatatgatggctgtttaggaattcaatattttttcaaccatccccrtatgtgaccttcagactcacattctaaacctataatcagggcaacaaggtggaaacaatggtaaataagaagagagttacacagaggtaccagtgttctt

SEQ ID NO: 43071 - DNA, 201 bp, Homo sapiens
cagtgccttccaccataattgtaagtttcctgagacctccccagacatgtggaactgtgagtcaattaaacctcttttctttataaattacccagtttccrgtatttcttcatagcactgtgagaacagactaatacagtcagtaatggaaaagagtaagatgatgggagagaatttgaaaggatttggtttagctagaag

SEQ ID NO: 43072 - DNA, 201 bp, Homo sapiens
tttaggattggatttgattgttagtaatgtgaaactctaaattaatactggcctaaaaacagtaggagtttgtttttcatgtaaaagtctggcgttacatrgtcgaggattaatatgatggctgtttaggaattcaatattttttcaaccatccccatatgtgaccttcagactcacattctaaacctataatcagggcaa

SEQ ID NO: 43073 - DNA, 201 bp, Homo sapiens
taaggacagtgtgttagtgtgaatttcagaggccaaggaggagaatagtctgggatgagccctgagagtagcaggagcccagtccccttccctgcagagcyttgctaatgttggtgagatgtggtctggagagagacattaaaactactgaaggatttcaagagagaaagtggctgtcagatttgcatttaagactattgc

SEQ ID NO: 43074 - DNA, 201 bp, Homo sapiens
aacgcatgatggacgtattgtttaggattggatttgattgttagtaatgtgaaactctaaattaatactggcctaaaaacagtaggagtttgtttttcatstaaaagtctggcgttacatggtcgaggattaatatgatggctgtttaggaattcaatattttttcaaccatccccatatgtgaccttcagactcacattc

SEQ ID NO: 43075 - DNA, 201 bp, Homo sapiens
tgttggtgagatgtggtctggagagagacattaaaactactgaaggatttcaagagagaaagtggctgtcagatttgcatttaagactattgctctggctrttggaaatgatagcaagaaaagtgggtgaaaacaagagtgcaagtctggaaactagaaggaggttatggaagaggcacctttgccagagattagggtgat

SEQ ID NO: 43076 - DNA, 201 bp, Homo sapiens
ttctatgtacttaattgcattaatagccctaacgtaccatgaagtaggtcttctattttaaagaagaagaagctgatactcagaaatggaaagagggttgmctaaggacacagcttttagatggcacagcctgaattcacatcaagacaagttccaaagacatagtttaaagaatcaacgaagttatactgaggcatctga

SEQ ID NO: 43077 - DNA, 201 bp, Homo sapiens
actgtgccccatttccataggcaatttatctgtatccatagagacaccagagatctgcttcttacttcaaatgtttcatatctaggttattcttcctgacrtgtgagtccagggcacaagtctaaagctcccacttacacagcccagagggactgagccctgctttccacagtcaggtcaggagcacactgactcctgact

SEQ ID NO: 43078 - DNA, 201 bp, Homo sapiens
tggcagtgggacctgggtccaataatttcaagaccagtgctccttcacctatgcatgttgtctactggagtgaagcaaaaatatgggtctatagggcagtrttatgcagaatgagtagtttctttccattattagcataagccatactctgaagctatttctgagacagtcatccttttctatgtgggtcaatgttcctgc

SEQ ID NO: 43079 - DNA, 201 bp, Homo sapiens
cagtgctggtgacaaagtggcttcttgcctgcttttttgtagttgctccagtgggcacatctgtgcccggaatttgtcatgagacaatgagggtttgttcyctgtatccgaaatgatgacttcatgattcttttatggcagagtaagagttggagcagaggagatagaggattaatggagttaaaggagcatattacaaag

SEQ ID NO: 43080 - DNA, 201 bp, Homo sapiens
atactttgaatattttcaaaaaatttctttcaatgttgttccttctttaggtatttctcttatcacttgggctcagcttgatgcttctctggaatttttctttttttttttcctcccatttataaaataccaaacatgtgtccccagtctggatccatgtaactgaaaatcatggggaaattctttatgtaaaaagcccta

SEQ ID NO: 43081 - DNA, 201 bp, Homo sapiens
ttgttccctgtatccgaaatgatgacttcatgattcttttatggcagagtaagagttggagcagaggagatagaggattaatggagttaaaggagcatatyacaaagattgagtttcatattggttaagatctggaatgctttctatctggcaaactgtaaaatccaaagcattaattacattgacaataaggacccaagt

SEQ ID NO: 43082 - DNA, 201 bp, Homo sapiens
gtatctcagtttctacatctgtgtattatctatctatctatctatctatctatctatctatctatctatctatctatcatctgtctatctttctatctctstattatctatcagctactatgtgccaggaattgtaggctgaggagatgtgacaataaacacaattgccagagttcctactctcatggatttttaataagt

SEQ ID NO: 43083 - DNA, 201 bp, Homo sapiens
gttgacagccagcatttcactgctggctgtgtatccatatacgtatgtatggatgcttagaaaagtggaatgctagtgatatatatatatatgcatatatmtatacatatatctatatatatagacatatttctgctttactaggtgagaagagttgcttgattttaagggctctcaatcaacaggcaccaaatgaactta

SEQ ID NO: 43084 - DNA, 201 bp, Homo sapiens
tttggttatctgagcccataaattgcccgttagccctgcgttatactatgatcatgcacaggggtctggaaaatgccttgatgttatactttccttcttcttttttttttttttttttttttttttttttgacagagtctcgcactgtcacctgggctggagtgcagtgacgcgatcttggctcactataacctccgcctc

SEQ ID NO: 43085 - DNA, 201 bp, Homo sapiens
tgaggcaggagaattgcttcaacccgggaagcagaggttgcaatgagctgagattgcgccactgtgctccagcctagaggacagggtgagattccttctcaaaaaaaaaaaaaaaaaaaaaacatgaaatttagttttatttctggctctgaagctttcttggaccatcaggcactcattaacttctctgagtctcatttt

SEQ ID NO: 43086 - DNA, 201 bp, Homo sapiens
tgttcctgtgacttcccacttaggttcaactccaaaatatctctcagatttcaacttgaaagtcccttcacttcctctggggaatcttgcatgatattccttttttttctttttccttcctagctcattatcaaacctgacatctagtaattgtagttgctattaggcagtgtctgtttcatttttaggtggttactagac

SEQ ID NO: 43087 - DNA, 201 bp, Homo sapiens
gtgacttcccacttaggttcaactccaaaatatctctcagatttcaacttgaaagtcccttcacttcctctggggaatcttgcatgatattcctttttttyctttttccttcctagctcattatcaaacctgacatctagtaattgtagttgctattaggcagtgtctgtttcatttttaggtggttactagactttgagc

SEQ ID NO: 43088 - DNA, 201 bp, Homo sapiens
aaatttagacttcagtgtggttccagaactagtgtgcagaaatataaggcaaagctcataaccatcctccagtgttcaggctcagcataagccctctaggaaaacctttgtacctttctttgggcctcccccaccatagccctcatcatgctatgattaattgctcaattatctttctctctacattgtcggttattttta

SEQ ID NO: 43089 - DNA, 201 bp, Homo sapiens
gtgagggtctctgagactgatatgattgagcagctttatgaataagacccaagaggaaaggctggagaaaatgagtaaaacaaagggaaattttacgtacrtttttttgcccatgagctagtcatgaaagggagaatcaaatgtgatctcatcaaagatgttcccccttgagatcataactatatatatatatatatatat

SEQ ID NO: 43090 - DNA, 201 bp, Homo sapiens
aattttacgtacgtttttttgcccatgagctagtcatgaaagggagaatcaaatgtgatctcatcaaagatgttcccccttgagatcataactatatatakatatatatatattttttgagacagcctctctgtcacccaggttggagtgcagtggcatgatgtcggctccctgcaacctttgcctcctgggttcaagcga

SEQ ID NO: 43091 - DNA, 201 bp, Homo sapiens
atcaaagatgttcccccttgagatcataactatatatatatatatatatattttttgagacagcctctctgtcacccaggttggagtgcagtggcatgatstcggctccctgcaacctttgcctcctgggttcaagcgattcttgtgctttagcactgagtagctgggattacaggtatgagccaccacacccagcccata

SEQ ID NO: 43092 - DNA, 201 bp, Homo sapiens
tagctctaccatttattagtgtttgaccttttttcaatttccttcacttatgtgaccccatcttgtatctgagtctgtaaaagaggagtgagaatacttaytttacagggataaaggaagggccatgggaaactgagtaaggattcccaagatgtgtgtttgaatccatggaatctgtgaatattatcttgtatggcaaag

SEQ ID NO: 43093 - DNA, 201 bp, Homo sapiens
gcacaacagggtgactatagtcagtaataatttaaatgtacatttaaaaataactaaaagagtgtaatcggattatttgtaacacaaaggataaatgcttmaggggatgaataccgcattttacatgacatgattattaaacaaaacctctcatgtaccctgtaaatatatacacctactatgtacctacaaaaagtaatg

SEQ ID NO: 43094 - DNA, 201 bp, Homo sapiens
tgctggataccatttttagaactttacatacattaacttcatttaatcttcataacatttctatggatagatactattattagtcccaaatgaaggcatgygcaagaggaagttacttgatcaataataaatagctggtgtcagatatgggattaggacccaaaactctttacatgttgcacaggatcctcttcactatgt

SEQ ID NO: 43095 - DNA, 201 bp, Homo sapiens
tggcaggaataatactgtgcagtggatagggagctctgaattcttaccttgggtgtgctaaaaacctagcctggacttggttacatcccctcctttctccrgtgttctcttggtgggtttataattttagattaaatcagtatttctcaaacttcaatgattggtgtattacagtgtggtagccagtctctgagatgatcc

SEQ ID NO: 43096 - DNA, 201 bp, Homo sapiens
cataggagcctgaagtttttcttgctattgtaaaagtatcttcaatttccattacactttataattggtatggctgaattctagaatgaaaataaatttgygttgatctaataacttgctgaattctgttatcttttgtaatattttatccgtatttttttaagagtttctaatcatattgtttgcaagtgaatgtcattg

SEQ ID NO: 43097 - DNA, 201 bp, Homo sapiens
cattcatgttgtggtaaatggtaagatcttgttctttattgggctgaataatattcccttgtatacatataccacatttttgtatccattcattcatcaayggacacttaggttgtttccatatcttggctattgtgaataatgctgcaatgaacatggaagtgcggatatctttatgaggtgttgatttcatttcctttg

SEQ ID NO: 43098 - DNA, 201 bp, Homo sapiens
catttagataatgttgcctgcagaagactctgagcctaaggcatctcatgtctttggaacaaaactgggactttatccttgaattaaacaaagtgactgayacgcaattgagcagggaataactttctcacagtgaaatttgatgttaaaatgccccctctctctacacccccaaactgtcttacagtcttccaaaaaatg

SEQ ID NO: 43099 - DNA, 201 bp, Homo sapiens
ataaaattccatcctcaaggatcccatgttctatcatactagagaactgagtacagctgctcctcgacttatggtgggattacatcccaataaacccatcrtaagttaaacctatcataagtcaaaaatgcatttaatacacctaacccactgaacatcacagcacagacaatgtcaggcactttattacatgtagtaaag

SEQ ID NO: 43100 - DNA, 201 bp, Homo sapiens
agtaattagtagggctggggttagaacctgggtcctctgggtcctccatcactctgtgtggcctgcacagaatccagtccatggactcttcacatgtgagkactctagctgcacatgtggggactcccaagcaggtatagtatatcagagcttgaaggaaggctggcatggcagggtctggggtggtttgggggcctgatg

SEQ ID NO: 43101 - DNA, 201 bp, Homo sapiens
aggcacaagaggagaccaagcatggctccagggacgctagtgagtcacctgcagatgagattattcaactgtataaatgaaatcatgtttcacctgcaacraaagaaagcacaaatcaccagtttttacttctttctcttcttttactagttttaaatggctaaatggatcacctcccttccattcccccactccatctcc

SEQ ID NO: 43102 - DNA, 201 bp, Homo sapiens
tagagatctggtgataaaggactcgtttcaggtttcacacttgaatacatttttacagcttgcttataaaattctgaaagctggtctcctagtagaagggmagatgctgtcaaatgctaaatggtgcagttagagggacattcagacctcctctctagcccttcctctttttctggcacccaaaggcacgggcctttcctg

SEQ ID NO: 43103 - DNA, 201 bp, Homo sapiens
agaaagaggttttccaggaagagggaattgtacaagcctgggcagaggcacaaaggggtggaagagcaagattcactcagggaattgcagtaaattggcaygactggagtccagactacatgtttggtcaggcagtggggtaggtatagaaaaggaaagaatggccaagagtgagagactcagagtatttgggatagagtt

SEQ ID NO: 43104 - DNA, 201 bp, Homo sapiens
agaaaagcaggatgtgatcctaggactaaaggcagacaaagtctatgccttttctctcctattgcagtttccacatatcagcaggtacttcctgtgaaagrggaagcacatttgttctcctggctccagagaagagaaagcagactggcagctctcccatgagggaaagaggagaactttgacaggaatttacgaccacca

SEQ ID NO: 43105 - DNA, 201 bp, Homo sapiens
caggcccataacaaggcaaaggtctacagactaatattgggttgaagatttatttttacaagggtggccagggaaggcctcttcaaggggaagtcttttgrtcaaagaactaaagcaagtgacagggaagaaccttgcaaatatctgcttcccaggcagagtaaaaaccaggaccaatgtcttaagtcaggaaccagcttg

SEQ ID NO: 43106 - DNA, 201 bp, Homo sapiens
agcattaattacattgacaataaggacccaagtgtcctcccatttagctgttttcaaaaggtattatgagtatccaagctgtcagggtgatgtgtgtagaytttttttcctttcctgtgtcaaaagcatgatgttgagcagtggcttttaacatttttgacaataacccatagtcagaagtaccttttttttttattgtga

SEQ ID NO: 43107 - DNA, 201 bp, Homo sapiens
caggtgtctgtaatcccagttacttgggaggctgaggcaggagaattgcttgaacccaggaggtagaggttgcagtgagccgagatcgcgccactacactscagcctgggtgacaagagcagaactctatctcaaaacaaaacaaaacaaacagaaaagaactgaagcacagctaagccggataagaatttatctctatct

SEQ ID NO: 43108 - DNA, 201 bp, Homo sapiens
gtgaagatgtgaagattgttccagggcaagctccgaggtgggcaaagtgactggtgatggtggggagagggacaggagggaggttgatgaggttagcaggkgctaggttatgtaaagccatgtgggttgctgtggggaattgagatgagaaaacagagacattgaaaggcattaagtctcgtttccaaggccacactgcta

SEQ ID NO: 43109 - DNA, 201 bp, Homo sapiens
ccagtaggagttgtatattctataatgtccttatcacaattcctttaagggcctccagcactttggaagcatagaaaaaagaaacaacattcctgcatcgyggggccattgatgaataagaatgtttataagaaggcaagcatctttgcactctatacatttccaaatcttttagaaacatatctaagaacttcttagttc

SEQ ID NO: 43110 - DNA, 201 bp, Homo sapiens
agtagtaccgctacagaaaacttttacttaatcaagttagacttctcaccttgaaaagctgtacttccttatgttgccctccctactcccttctgtttatytaaattttgttcattattcagggctctactctaacacctcctcagggtcctcttccatgactgtccaagctgttttcagaacccctaccccattaattgt

SEQ ID NO: 43111 - DNA, 201 bp, Homo sapiens
aaaatatttctgaatctttgtgcatcttgaatttgtccaggactaaagaaagaaaagtatattttgatgtacaggaatgcatggagctttgtggttctctrctcaagtggagtagtatttttatgtatattgggtgacaaaacattcagattacatggaaaccaaacatgtcaaagcattttggagaaataatttggtagc

SEQ ID NO: 43112 - DNA, 201 bp, Homo sapiens
aggagaaagaggcagtgagtattttgacaaggacacaatcttctacagtgggggcagagcttcatgtggaattccactcacataatgctctttgtctgtckgcatacccacactcgttctgaccagggaagaaggagggggccatctacttggtgattccaggagctggatgtgcagggcgttgcatctgtctctcctctt

SEQ ID NO: 43113 - DNA, 201 bp, Homo sapiens
atgtttattggattttggttttgctgtttggatgttgggctttcattttcaggatagctctatcacatatttcgtaattttgttttgtagaattatcttawattgaaggaatgttgttttgtgctaatacattttctctttctttagagcatatgtgatgttttcgtccaatggcccctggatctgctatccacaattgtg

SEQ ID NO: 43114 - DNA, 201 bp, Homo sapiens
tatctccataacagactttgcagaaatatcaggtcaggtcctgttactgatgtgttcattctcatgggcaggaagagacacttcagtgttgctgctgccasgattgtttcacttaaaggaactctctagctgtcagagaaagagtgatactctgaaaatagtctctaacatgctgcttcctgctctaggatcatcttatag

SEQ ID NO: 43115 - DNA, 201 bp, Homo sapiens
taaatcttattcatctggggacaagcagtagggtgaatttatatgcatgtagcaccgattttgagctaagtaacaaggggattctgaaagacccttatgckgacaatgagtgaatgtaggcaagggcactaatatttaacaaagttatgctgtgtgctaggaaccatgctttaaatttatgattccacttaatcattataa

SEQ ID NO: 43116 - DNA, 201 bp, Homo sapiens
tcttatattcttcatctatccaatggggataatgataaagatgatgttctcccccgagggttttgatgactgctagttagaccagcactgaccactgttcrgtccaatgaaagtacttgtctcatgccctgctattcattcttcctcaatctcccgtagagaaagagacttcagctttaaactcagagtctttataatagg

SEQ ID NO: 43117 - DNA, 201 bp, Homo sapiens
tcaacatccgcaaataattaatgcatagaggaagtttacggttggccacccaaatgcatctcaaacattaaatttaaaaaactaaaaggatgaacccagaraactgctataaacttcaaagaatctattaaggacttagacatatggtgttaaaagatatgtccaagatttatggcactgggcctacaaaaaagaattctg

SEQ ID NO: 43118 - DNA, 201 bp, Homo sapiens
catcagttcctagaatacctccttatacattggaggtgcttgatacctatttattgaatggatgaatgaatttcatgagcacctgtgttggacaatttaaygtacatgatgatatttaatattttaactctgtggggtatatatattatctttatttatagctaacgaaattgggtctcagagattaagtaatgcttccag

SEQ ID NO: 43119 - DNA, 201 bp, Homo sapiens
ctaagatgtgacatctcttctacactgttgccacccagcatccatctgtcatattccaaactgccaatgtgtgtcacccaaaacattagatgacctagttrttctccctgcctagagccttgcctcctctaattcacttcatttaaaaagaaagacatttatcttataaaagaatacaagcatacggaaaagtacctaata

SEQ ID NO: 43120 - DNA, 201 bp, Homo sapiens
agaataatcatggacaatgcccctcaaacctccacatccccaaaatcaggacatatagaaggttggagcaaaaatataaccttggctaaaataattaatartgttcttcttgattcaatttgcaggagacattcagagaaaatatccacactcaaaactgaaatatgagtgccacacagtcattgcagctcacatctggga

SEQ ID NO: 43121 - DNA, 201 bp, Homo sapiens
tggctaaaataattaatagtgttcttcttgattcaatttgcaggagacattcagagaaaatatccacactcaaaactgaaatatgagtgccacacagtcaytgcagctcacatctgggaattttcaccaagcaactgaaaaaaaggctattttcagttctttcatatgctctttttgtcataagttgggttcggggggtgg

SEQ ID NO: 43122 - DNA, 201 bp, Homo sapiens
tgcatcttacaaccagttggacttttaagatagtctaggccaggtgtcagttgtgatacagcagtcatatctcaagtaatgcccagtttttgagtgcttctttttttttttttttttttttgagatgaagtcttgttctgttgcccaggctggagtgcagtggcatgatctcggctcactgcaacctctgcctcccgggtt

SEQ ID NO: 43123 - DNA, 201 bp, Homo sapiens
ctgaaaaaaaggctattttcagttctttcatatgctctttttgtcataagttgggttcggggggtggggttcagaacccacagttgctgtggtgagagaarcaaatttgacagcttctggcagagcaaagcacaagtatttcctgcagagtttttcaaagtaaatgggtctccctccctgggcagatactggcaatccttg

SEQ ID NO: 43124 - DNA, 201 bp, Homo sapiens
gggtgatgtgtgtagactttttttcctttcctgtgtcaaaagcatgatgttgagcagtggcttttaacatttttgacaataacccatagtcagaagtaccttttttttttattgtgactctcaacacacacatgtagtggaaaaagtttaataaaaaataccactgcaataagtaacacacacagtttctatgatatttta

SEQ ID NO: 43125 - DNA, 201 bp, Homo sapiens
atccccacctcccccactgtacttcttaatgcttctttttattttttttttaaattttgagacagagtttccctcttgtcactcaggctggagtgcaatgrtgcgatctcagctcactgcagcttctgcttcctgggttcaagtgattcccctgcctccacctcctgagtggctgggattacaagtgcataccaccacgcc

SEQ ID NO: 43126 - DNA, 201 bp, Homo sapiens
gactccatatgatgcagagatccaggctgcaggagccttcacatcaaccctactttctcctcatctgctgcaagagcaattttacttctagctctgactcttttttttttttttgctgtatggagctgggcaagtcatagaaccagggctgactttatgtgcatgtgacttaggcagttgtatagggcctggtgctcagaa

SEQ ID NO: 43127 - DNA, 201 bp, Homo sapiens
agatagtagggatgacaagttttttggggcacagtccaagttggtctggtgtctggaatgagactggggcctaataaaaatgagcgtctatacaggagctyaaatgggatgtaccttgtagcattctgaggacaggcctgaattctgagaagggaaagtggtaaaagtattatctagtcctttttaagttggtggctgagc

SEQ ID NO: 43128 - DNA, 201 bp, Homo sapiens
tggaaacttactgtattctatttttttctggaattttttcccttgcttttaatagaaagggagtctgatttgttccactttttcggtgccagtggttctcrttctcgacggggggcaattttgtcccccattgtttggaaatgactggagacattttgggctgtcacaactaggctgggtggagatgctattgacaactag

SEQ ID NO: 43129 - DNA, 201 bp, Homo sapiens
gggatgacaagttttttggggcacagtccaagttggtctggtgtctggaatgagactggggcctaataaaaatgagcgtctatacaggagcttaaatgggmtgtaccttgtagcattctgaggacaggcctgaattctgagaagggaaagtggtaaaagtattatctagtcctttttaagttggtggctgagcttggtgag

SEQ ID NO: 43130 - DNA, 201 bp, Homo sapiens
ctctaactaccatcacattggggattatatttcaacataattttagggggatacaaatattcagcctatagcaatgtaaaagagtcaaaatggctattaayttttgagcagttataataacataagtactgtgttatgtgtttaacaagtattgcctcatgtaattctaaaacgatgatgtgtagattagcttctccactt

SEQ ID NO: 43131 - DNA, 201 bp, Homo sapiens
caagttttttggggcacagtccaagttggtctggtgtctggaatgagactggggcctaataaaaatgagcgtctatacaggagcttaaatgggatgtaccytgtagcattctgaggacaggcctgaattctgagaagggaaagtggtaaaagtattatctagtcctttttaagttggtggctgagcttggtgaggtgtgtt

SEQ ID NO: 43132 - DNA, 201 bp, Homo sapiens
tgctacacattctagtctctcatggctatgatgcatgccggagtgggcactgattctctacctacttaggtacgattctgttttgccaaggattctcctayacaatgatgtccttcctccctccatgctcagggaactagatagctgtttcctttcttcagagaggaagatagactcactgtatagttactatgaagagat

SEQ ID NO: 43133 - DNA, 201 bp, Homo sapiens
tcacttctaggggtgcagacccaaaactgaggatatctgccatggccagagaggaatggggcatgcaactggttcctaaatgttctaggccatgtaagacytctagattattgaataaactagtggacaagagaagcaacactcaacacagctgagactgaattttctaccgtcacaaaggagtatggcatggttgaaaga

SEQ ID NO: 43134 - DNA, 201 bp, Homo sapiens
ttttcatatttgatgaaacagcctaaatgctcactgatttgggagaggtctgataaagaaaaaggagcattaactttgactatgcctttagctttagccacctttttaagaggaaattgctgggcaggtaggggagggctactcacggaattaaactgtaaactggaccgggtgtgaggagaggaggtgataaaaagatta

SEQ ID NO: 43135 - DNA, 201 bp, Homo sapiens
atagcaagaccctgtctctgaaaaaaaaaataacaaaaatgagtaaaatggaggttctgagattttaaactcctggagggcttaaaatttatgcctttatytagctctgtatgctccaccaacgtgacataacagttctctgaatatggtaagaacaaagtgagttttattgaaattcttggactatttcttttccctact

SEQ ID NO: 43136 - DNA, 201 bp, Homo sapiens
tcaacaaggaggaataaagatagatttgtgcttgaaaaatatcatcttggctataattgtgaagcagaattgcaagcagattggagttggagagaccagcraggggctgctgtagtcatttaagcaagaaaggatggtggctcaaaccagggtgggagttgcagggatggagggaattgggcagagtctagtgatattaaa

SEQ ID NO: 43137 - DNA, 201 bp, Homo sapiens
ttggactatttcttttccctactgaagtaaggcaatctccatccaaggttcatcttatattaaaaaaaaatatgctaggaaatctcaacagtgttgtatcmaaggagtcagagcattaaatattttgggctcctgccacaggcatttactgtgaagtaaaggacatgtattgttctgtgcttcatcgtgatagaaagaacg

SEQ ID NO: 43138 - DNA, 201 bp, Homo sapiens
ttcagcaatctaggttgacttcatgaacgagctggcgttcaaatgaatccttgaattgtggaaacagaatgttaaatctggaatgaacttcagatatcatstagtatggagaggacaattaaatgttgacttttacatcaatttggattaaatatttgtgattgcttacaattctgtgtcaagaagtagtcagaggaatca

SEQ ID NO: 43139 - DNA, 201 bp, Homo sapiens
ttctctcttgacctttagcagactccgtgtctctttcctttgatggaacagctaatgaaacacatcctttccttgagtcaatccctgatttcagaaaaatytttagacatcgtgtgtgtgtgtgtgtgtgtgtgtgtgtatgtgtgtgtgtgtgtgtgtgtgtatgttggggggatggagggaagagtgaggaaatagttt

SEQ ID NO: 43140 - DNA, 201 bp, Homo sapiens
tgccctcattcaggcctgggctttgacttgaatagcttctgaatctctatgctctgcctgtattggatagctggcaggctatgggcatgggctgctaggtmccagacaactcacactctcatctgataagtgggttttaatgtgacccttgttgtacctccttatttctatttcagtctcacttactgcttcctctttatc

SEQ ID NO: 43141 - DNA, 201 bp, Homo sapiens
tctcttgacctttagcagactccgtgtctctttcctttgatggaacagctaatgaaacacatcctttccttgagtcaatccctgatttcagaaaaattttyagacatcgtgtgtgtgtgtgtgtgtgtgtgtgtgtatgtgtgtgtgtgtgtgtgtgtgtatgttggggggatggagggaagagtgaggaaatagtttcca

SEQ ID NO: 43142 - DNA, 201 bp, Homo sapiens
acctgtaccttcttggccttggtagcccccaatcctaacccagaacgtggcgcagagtaagtgtttaggaaaactttactgaatgaatcagtggataagcmgattcaagttaaaactgaaacaacagtaggtagatgacataccttttttcctcccaccaccttcttgctttgccttgccttcaccccagctcagcaatct

SEQ ID NO: 43143 - DNA, 201 bp, Homo sapiens
ggtagcccccaatcctaacccagaacgtggcgcagagtaagtgtttaggaaaactttactgaatgaatcagtggataagcagattcaagttaaaactgaarcaacagtaggtagatgacataccttttttcctcccaccaccttcttgctttgccttgccttcaccccagctcagcaatctgctcagaaaagagagcatca

SEQ ID NO: 43144 - DNA, 201 bp, Homo sapiens
ttttctgtaaggctgtggccacctacccctgaagatgagatgctgatgtagaaaatggacagccatctcttagaggatctgcaaaataatttctattctgrttagaaaaattaaatacattcactttatctttatgatcttgagatattccttggatagtaacaacagctcctgacatctggagactatttcattttagac

SEQ ID NO: 43145 - DNA, 201 bp, Homo sapiens
gacattctttttgggacaaggtagctgttgctcagagaagcagcaggaattgtccaaggacacacagggtgaatgaaagacttggcagtgggacctgggtycaataatttcaagaccagtgctccttcacctatgcatgttgtctactggagtgaagcaaaaatatgggtctatagggcagtattatgcagaatgagtagt

SEQ ID NO: 43146 - DNA, 201 bp, Homo sapiens
caagcatattccgaattctgcttccgttgccacatcttcgtgtctgcctgactctactgtgtctctctcacaagaacttttgtcccagatagtccaggacwatctccccatctcaagatccttaatttaattacattggcaaagtcccttttgccatgtaaagtaacaaatttgcaagttctggggattagaatttgggct

SEQ ID NO: 43147 - DNA, 201 bp, Homo sapiens
gtatattctataatgtccttatcacaattcctttaagggcctccagcactttggaagcatagaaaaaagaaacaacattcctgcatcgcggggccattgaygaataagaatgtttataagaaggcaagcatctttgcactctatacatttccaaatcttttagaaacatatctaagaacttcttagttcccctccatggtt

SEQ ID NO: 43148 - DNA, 201 bp, Homo sapiens
gtacttagaacagtgcctagtacaaatttaatgctcaataagtatttaataatgataaaaagtgatatttactgaatactttttgtaaagattccttataygtttgaggaaatttcttcatattcctacttttcctaaagttgtctttatagttgagagttaaattgtatcaaatgcttcttcttcacctaataagataaa

SEQ ID NO: 43149 - DNA, 201 bp, Homo sapiens
cactttggaagcatagaaaaaagaaacaacattcctgcatcgcggggccattgatgaataagaatgtttataagaaggcaagcatctttgcactctatacrtttccaaatcttttagaaacatatctaagaacttcttagttcccctccatggttactggatctacaaacttggaatttccccattggccctctgattgta

SEQ ID NO: 43150 - DNA, 201 bp, Homo sapiens
tccacatggtaaggaacagctagcaccaactcacaggtgaatgaaccaccttggaagcagatcctccagccccagtcaagccttcagatgactgctgttgyagctcacattttgactgcaacctcatgagggactttgagccagaatcatccccaattcctaacctacaaaaactgagagataaaaacatttatcactgct

SEQ ID NO: 43151 - DNA, 201 bp, Homo sapiens
agatctactgaggaaaggtaatagaggctggcaaggttcctacttttacatctatctgtaatatccactcattcttagcatcttgcacatccacagggccrtacaggagtcttcttgccttgtattattgaatcttgggataggggtaggaacagacagaggtattagcagagatccaacaggatgtaaaacatacatgtt

SEQ ID NO: 43152 - DNA, 201 bp, Homo sapiens
gtactaattttgacacaaaacttgcaaataacttcttcaagtctgtggtttattgtttacatctttttggagatatatttatcatttacaagatttttagytttaccatagtcaaatttataaaattttgaatgtttttatggtttgagctttgatgtctgactcaataaatccttgcttctgacagtcaagaagttattt

SEQ ID NO: 43153 - DNA, 201 bp, Homo sapiens
ttagagctggaagggagcaaattcttaattgagcaatacacgctgtcctttctttcaggctccttcacatttgatctctgtgcaatttgataagaggaggraatgggccgtcaattatgaagagactgaaaacctgaaaatactgagtatggtcttagttccctctccaaagggagctcaggaaaaatgccaagccataca

SEQ ID NO: 43154 - DNA, 201 bp, Homo sapiens
tgattatttcaagggaaccccagatctggatttttatgtgaaatattctaatttcacatataattagcaactcattaagaaaaaaactaaaaatgtcctgyttagggcaaaggagacatatctgtgggctcatcactgcctgtggacaatctgtttgcaaccttgggaatagatgacctctgacaccagattaatcatctg

SEQ ID NO: 43155 - DNA, 201 bp, Homo sapiens
tgtttacatctttttggagatatatttatcatttacaagatttttagctttaccatagtcaaatttataaaattttgaatgtttttatggtttgagctttsatgtctgactcaataaatccttgcttctgacagtcaagaagttatttttcatttatttatcatttatttcatctatttatcattttataagttttaaagt

SEQ ID NO: 43156 - DNA, 201 bp, Homo sapiens
caggaagcttgaccaaaactccacagtgaattattgccaggatgggtagaattacatatgttttattcaacatttggtggtcattgtaaatttggtaacayttgcaactggaaaatttggggatgttttagagctggaagggagcaaattcttaattgagcaatacacgctgtcctttctttcaggctccttcacatttga

SEQ ID NO: 43157 - DNA, 201 bp, Homo sapiens
tttccccattggccctctgattgtatttggagtctgttcttcatcttgtggatcctctgggctctgtcttgaactgttggaacattttgctcccacagctrttggaagtgacccattaaggtagccagagtcagtcactcagcatcttaatggcaagaccaaaaggggtgaaagaaatagaagtcacggttagtaagcgac

SEQ ID NO: 43158 - DNA, 201 bp, Homo sapiens
tcactgatcatgttgttatattattctgaaacaaaacatgtatataaattcatattaaaatttctttaatgttctgtaaatataagatgctaacaaaaccsaatttcttctggattaaattatcataacaattattagatgtatacaactgatcaatctaccatacacttattaaaattttgctaaatgtgatgtgaaaca

SEQ ID NO: 43159 - DNA, 201 bp, Homo sapiens
caatttacctaaaagagtcccatagaaaccttagcctcttcatccttctgccatgcccctcatggcattttcttcttacgctggagtatacatttctctgyttttcttttatccctttctttcttctttattcccatgtttttgatcacatactgtgtgtcagcctctgttaagctcatctgtgcagagtctatactcact

SEQ ID NO: 43160 - DNA, 201 bp, Homo sapiens
tcagttacatagacttctgagaagatagccttcccattctatctaaaatgccattacatcttctaatatgcaacaaaatgccacctgatccataaatcatycctccatatttagcccagaataccgctttatattttagttttatctctattccttgattaccctactttgccaggatcctaagtaattgctttcttatgt

SEQ ID NO: 43161 - DNA, 201 bp, Homo sapiens
tcttatattgaaggaatgttgttttgtgctaatacattttctctttctttagagcatatgtgatgttttcgtccaatggcccctggatctgctatccacarttgtgttttatgtcaactgtttgagattccttctccatggacataatgaggctgttttgataccattactcaagggagcatatagcttggttcagcttga

SEQ ID NO: 43162 - DNA, 201 bp, Homo sapiens
tacatgctagatgtaggttgtctaacccaggctatagggaggattagctgatttatctctgagttttgaaacatcctcaaagcaaagtagtttgggaaggrtaatctggtagaatatacagcatatgcaaaagcaaagaggcatagaagagacttcaggagcagtgagtagtttgggagagatgggcacatgatccatagg

SEQ ID NO: 43163 - DNA, 201 bp, Homo sapiens
gcatgactaatccaagatcttccagcaactgaggagtgatggaagcatttctgattcctcttgttgttgctctttagcaaatgggtgaaacaggtaaaatragttaccaaagcctctcatctctcacctgggcatgaattctatgcctttccaatatacacatgctgcctcctgcctcaaattccaggtgttcccttttac

SEQ ID NO: 43164 - DNA, 201 bp, Homo sapiens
cttactgtattctatttttttctggaattttttcccttgcttttaatagaaagggagtctgatttgttccactttttcggtgccagtggttctcgttctcracggggggcaattttgtcccccattgtttggaaatgactggagacattttgggctgtcacaactaggctgggtggagatgctattgacaactagtgaatg

SEQ ID NO: 43165 - DNA, 201 bp, Homo sapiens
agcagtggaattgttggattatgtggtagttctatttttaagtttttgaggaacctctaaactgtttttttttaccctaatttacatttccaccatcggcktttgagcattcctatttctctacatccttgccagcatctgttattttctgtctttttgatagtagccattttaactgaggtaagatgatctcattgtggt

SEQ ID NO: 43166 - DNA, 201 bp, Homo sapiens
agatttaaaataaattatttttagtaataataaatgacaaattgggagatttaagacaaagattcctggtagttgaatgcgctgaaatctatgatgtttgrggattgttaacaatcttcttccaggatttgatcggttttgtacttgtattttctcaatctactattctttatttgctctccttcctttagaatggacaaa

SEQ ID NO: 43167 - DNA, 201 bp, Homo sapiens
ggctctcacctgaaccatcaaagctagctgctcaacttttaattcatttctaaaactacataaggagttggaaacttactgtattctatttttttctggawttttttcccttgcttttaatagaaagggagtctgatttgttccactttttcggtgccagtggttctcgttctcgacggggggcaattttgtcccccattg

SEQ ID NO: 43168 - DNA, 201 bp, Homo sapiens
tctttattggaaggctctcacctgaaccatcaaagctagctgctcaacttttaattcatttctaaaactacataaggagttggaaacttactgtattctakttttttctggaattttttcccttgcttttaatagaaagggagtctgatttgttccactttttcggtgccagtggttctcgttctcgacggggggcaattt

SEQ ID NO: 43169 - DNA, 201 bp, Homo sapiens
gggagttcttaccttccagaaaagcagaaaaggggtcaaggcacagaaataaggggttggggcacggagataagaggtcggggtgtggaaataagggatgrgggcacagagataagaggtcggggtacttgcccctcctttagaaaagcgggacttgccgctaagggtgaaagagaaggggttgaggggttcttgcctctc

SEQ ID NO: 43170 - DNA, 201 bp, Homo sapiens
cagaaaaggggtcaaggcacagaaataaggggttggggcacggagataagaggtcggggtgtggaaataagggatgggggcacagagataagaggtcgggstacttgcccctcctttagaaaagcgggacttgccgctaagggtgaaagagaaggggttgaggggttcttgcctctccttcagaaaagcagagaaggggta

SEQ ID NO: 43171 - DNA, 201 bp, Homo sapiens
cccctcctttagaaaagcgggacttgccgctaagggtgaaagagaaggggttgaggggttcttgcctctccttcagaaaagcagagaaggggtagagacayggagagaaggggttggggtacttgcccctccccaagaaaagcaggacttgctgctaagggtgaaggaccaaggcaggcatccttgcatggtatgacacct

SEQ ID NO: 43172 - DNA, 201 bp, Homo sapiens
tgtgggacagagggtagagaaggaagaggtaaaattgagagggaataacgtgattaatttccactcagcctggcccgatgagagactgtgagggtgctatmtaaagcttaaggaatcatgtttatgaaaaaactgtaagattttgggaagcagcagcgctctttggagattggcaacaaatatgacaatttactcaaaaga

SEQ ID NO: 43173 - DNA, 201 bp, Homo sapiens
atagcatgaaagttggtttaatttataatgatttaaaaaattctctactatagccctaattgtggtcccactttgttactatagtttaatttgtgatctctttttttttttgtttttgtttaataatctcttttgcttctttgttttcttgtacattaatatcagttgtttacctgtttctgtcagaggcatttgaaccag

SEQ ID NO: 43174 - DNA, 201 bp, Homo sapiens
cagtaaagaagccggccaaaattaccaaaaccaagatggtgagagtgacctctggttgttgttatggctcattgtaagctaattgtaatgcactagcatgstagaaggcactctcaggagcagcatgacagttttcaaatgccatggcaatgtcaggaagctaccctataaggtctgaaaagggaaggagccctcagctcc

SEQ ID NO: 43175 - DNA, 201 bp, Homo sapiens
tattgcaacccaaacatttctttctattaatcccaggtcttaagacaaactcaaccaattgtcaactgtcagccagaaaatgtttaaatttacctatagcytggaacctacccccctccccaacagccccctgctttgagttaaccaaaccaaatatttcttaaatgtgcttgattgatgtctcatgactccctaaaatgt

SEQ ID NO: 43176 - DNA, 201 bp, Homo sapiens
ccaccttcttgctttgccttgccttcaccccagctcagcaatctgctcagaaaagagagcatcagaactgaccaaaaaaggaatgaatatcctaagaaatkatgcagctacatattgcttggcttgtgtttcctagataaggcattgattcctaggcactagaattatatactataattaaagagatttttttttaaatct

SEQ ID NO: 43177 - DNA, 201 bp, Homo sapiens
agacaaactcaaccaattgtcaactgtcagccagaaaatgtttaaatttacctatagcctggaacctacccccctccccaacagccccctgctttgagttraccaaaccaaatatttcttaaatgtgcttgattgatgtctcatgactccctaaaatgtataaaaccaagctgcaccccaaccaccttgggcacatgttgt

SEQ ID NO: 43178 - DNA, 201 bp, Homo sapiens
gccttcaccccagctcagcaatctgctcagaaaagagagcatcagaactgaccaaaaaaggaatgaatatcctaagaaatgatgcagctacatattgcttkgcttgtgtttcctagataaggcattgattcctaggcactagaattatatactataattaaagagatttttttttaaatctatcaacaaagacctagagtt

SEQ ID NO: 43179 - DNA, 201 bp, Homo sapiens
aatgtgcttgattgatgtctcatgactccctaaaatgtataaaaccaagctgcaccccaaccaccttgggcacatgttgtcaggacttcctgaggctgtgtcacaggtgtgcattgcatccttaaccttggcaaaataaactttctaaataaactgggacctgtcttacatgttctgggtctagagatttttatttttggt

SEQ ID NO: 43180 - DNA, 201 bp, Homo sapiens
tttctggaagtaagcacactatgtggcctgcttacaaatgaagaaacagaatataaacagccctctcatgcttcttccagtgataactccaccatcacctrgggtaacctctaccttgagttatagcaacacatatgcactcttcctgttattgaactagatgctcttttgtgtctgtcttctttggctcatcattatgtt

SEQ ID NO: 43181 - DNA, 201 bp, Homo sapiens
tgaatatgtgtatgcgtttttggggggttgtatacatctataagtggaattgctgggtcatgggatatgcatatgtatgtttaattttagtagatatgtgyaaaaagtattccaaagtggttaaattgatacaatttattgaaagttctggttgttctgtgtctttgtcaacactttgtattttctgtcttcagttttatt

SEQ ID NO: 43182 - DNA, 201 bp, Homo sapiens
gatgacattttaattcccttgtttaaatatgactctaatttcaaagtaggaagttggttctgactttgtgggtgagaagaggatatggtgtctaaacatgkgccccttaaaaccaccataatagccaattacttattctttatggccatatgtcaggtatattttaaagttggaaggagctttggagtggtctagctgact

SEQ ID NO: 43183 - DNA, 201 bp, Homo sapiens
acctttagcagactccgtgtctctttcctttgatggaacagctaatgaaacacatcctttccttgagtcaatccctgatttcagaaaaatttttagacatygtgtgtgtgtgtgtgtgtgtgtgtgtgtatgtgtgtgtgtgtgtgtgtgtgtatgttggggggatggagggaagagtgaggaaatagtttccattcagta

SEQ ID NO: 43184 - DNA, 201 bp, Homo sapiens
tgcctcccgggttcaagccgttcttttgcctcagcttcccaagtagctgggacttcaggcacctgccaccacgactggctaatttttttttttttttttgkatttttagtggagacgggggtttcaccatgttggccaggctggtatcgaacacttgaccttgtgatctgccagcctcaacctcccaaagtgctgggatta

SEQ ID NO: 43185 - DNA, 201 bp, Homo sapiens
agctatatgcttctaggcaagactttcacacctctgggcctcagagtccttacctatgacagggagatcagacgcctaccttcagtgttcttttgaggggycaatgagttaaagcgcttagcaccatgcctaggacacagaaagcactaagtagatggtacttattatcacttctaggttttcctctttattggaaggctc

SEQ ID NO: 43186 - DNA, 201 bp, Homo sapiens
acttatctattatatttgttaataaagtcttaggttagtggatatttctatactctttctgaaaatgacatgcatcttacaaccagttggacttttaagayagtctaggccaggtgtcagttgtgatacagcagtcatatctcaagtaatgcccagtttttgagtgcttctttttttttttttttttttttgagatgaagt

SEQ ID NO: 43187 - DNA, 201 bp, Homo sapiens
tgcacttcactccaagtcctcataagggagcctcatgagatatgagccaccacattcagagacagtttcactaatttattagaagcatgcttattaaaacscattctttctattcagcctgttatttactttatactcctttaacatctaccacccatataggggttaattatatactatctcatgttgatttataaatgt

SEQ ID NO: 43188 - DNA, 201 bp, Homo sapiens
ttattgactatagttatcctattgtgttattaaaaaatgtcttatacattcttctattttatttttgcacacattaaccatccccacctcccccactgtayttcttaatgcttctttttattttttttttaaattttgagacagagtttccctcttgtcactcaggctggagtgcaatggtgcgatctcagctcactgcag

SEQ ID NO: 43189 - DNA, 201 bp, Homo sapiens
cactttccttttgagcttaccttctagggcaatgtttctcaaccagggatggtttactctctagaggatatttgctaatgtctgcaggcattttggctgtyggagtttggaggtttgctatgggcatcaagtgggcagaggccagagattctactaaaagtctgcaatgcagaggatggtctcccacaacaaataattctt

SEQ ID NO: 43190 - DNA, 201 bp, Homo sapiens
agcagttgcttgtcttgcccactctgagctaaaatccaggtctgctcatttgtgaaactatgttccacatggaggaagaagcttgcctagattggtgtagraccagccaaaatcaaaggaatttattgcttaaaaaaaatcctttacacggattgggcttcttcacttagaaaggacataaaaaggggaccgagaggagta

SEQ ID NO: 43191 - DNA, 201 bp, Homo sapiens
attggcattatctcagtcctcacgccaggccattcccctaatacaagtgagaaagctgaggtgaggagggatcaagagacttgctgaaagtcacacagctkgtatgtggtctcacagaaggtccgcatatgaaaattactgagctactgggctcttcaggtttccattacagaaccatctataaagagtattattttatca

SEQ ID NO: 43192 - DNA, 201 bp, Homo sapiens
ccaatgcaatcatactgggaggtggggctgatggcaggtgtttaggtcgtgaaggcaccactctcatgaatggattaatgctgattgctaaagagcttgargctacaagttcgatctcttgttctgtcttgcccttccacctttatcgtggaataatacagcaagaaggctcttgctaggtgctgacttttcaatcttgga

SEQ ID NO: 43193 - DNA, 201 bp, Homo sapiens
ccctgtgtgctctaatattcttcataaatttcccctccatcctgctatacacatgcagtacacatgcacgcacgcacacacacacacacacacacacacasagagagagagctcattgaaatgagtattttactgaagggatgtttagtattgctctgagagagaaatagtttgaacttcctttgaaaagtagaactacat

SEQ ID NO: 43194 - DNA, 201 bp, Homo sapiens
ttcccattttgcagatggggggtgtgagacatggagaggttagggaaatgtccagggtgcatgggtaataaatagtagcaagaggattcaaacccaccaaraggactccagctcccagttgtctattattatgggtgctttcttatgtatttaatgtaacaattgcccaaaggcaaagatggcattctttgattcatgaac

SEQ ID NO: 43195 - DNA, 201 bp, Homo sapiens
ttgttttccttctctcttaggtttcttaagatttcttttgtggaccacaaagaataacagtggctaacactgattgagtattttctgtgatctaggcactyttgaagcagtttggatgtattaaattatttaatctttacaatgagcctttgggttagtcctatcattgttcccattttgcagatggggggtgtgagacat

SEQ ID NO: 43196 - DNA, 201 bp, Homo sapiens
agcttggttttatacattttagggtgacaggagacatcaattaatacatgtgaggtgtacgctggtttggtccagaaaggcccagacaaccggaagtggargcttccaagtcctaggcagattcaaagatattctgattggcaattgactgaaagggttattatcaataggaaggaaagtctgtgttgtggtaataagggg

SEQ ID NO: 43197 - DNA, 201 bp, Homo sapiens
gactccataattaccagaaatcttttccaaagccgggatggatctctgatcccacacagtgggccagtcatttaattaaatgcattttgttagagtcaagktttcccaacttgcttgcagatcattgttgagtggtcttttccaactcttcttgcttttccttcgacaacaaaggacaaaatcaagttcaaagaccatatg

SEQ ID NO: 43198 - DNA, 201 bp, Homo sapiens
gcatagctatattgtgtttatgaaagcacggaacccagcttctatctgaagcacttctgggctttgcaggggctggcagcagggagaggggagttgaagcyacctggtgctgtcttgttaaaatattcaaaaggctgcctcttcggaggttgaagggaaagaggaaaagtttaaaaaactagcattgcccaagctaaatta

SEQ ID NO: 43199 - DNA, 201 bp, Homo sapiens
agagaatatagcaaccacacattggctcttagaagcatcttcctagaagtgacacacatcacttctgcttatgcttccttggccaaaacaagtcttgtgamtctaccagaattgaacaggatgaaggtatataatcctccatgtgaggggcacaggatagaggcacaggataggtgagcagtaatatcatctcctacaaac

SEQ ID NO: 43200 - DNA, 201 bp, Homo sapiens
tggatatgtgggtttcccccactaaacggaacttggtcttatggcaattataaagccacattgaccatacttgaaagagagaggctgggggtggccctaaygagttaatggcaatgttcaagttcacttaacttttgtaatcatccagtttgcaaatgcatagcatctactaggagaatgtataatattcattaggagtta

SEQ ID NO: 43201 - DNA, 201 bp, Homo sapiens
acaggatttaggaactaatagtggctcagggtgtggggaaggaaggcttgctagagaggattacacttgaacagaatcttgaatatgatttagagcttggraggaaaagggaagaaaggaggcagtgggagagaggcagagatgtctatccataccagagtgtgaagaggagaaacagcatgctgcatttggggaaagtcc

SEQ ID NO: 43202 - DNA, 201 bp, Homo sapiens
tgctagagaggattacacttgaacagaatcttgaatatgatttagagcttgggaggaaaagggaagaaaggaggcagtgggagagaggcagagatgtctayccataccagagtgtgaagaggagaaacagcatgctgcatttggggaaagtccatggagtgagggtcaggaatggagggagggtttggatgagacagatga

SEQ ID NO: 43203 - DNA, 201 bp, Homo sapiens
ttccaaagtggttaaattgatacaatttattgaaagttctggttgttctgtgtctttgtcaacactttgtattttctgtcttcagttttattctgtacttyagtaggtatgcagtgatattgcattggtatttgatattggaagttacctaatgactgatgaggttgagcattctttcctgtgctattgatcatttgtgac

SEQ ID NO: 43204 - DNA, 201 bp, Homo sapiens
ctgttgtttgggcctggtagttccagcttaggaatagaggcaatcgaaacaaaaaaattctgttgtagacctggcctcagcaggaaaccgtgcctgtgctytccttatctccagacttggcctgccagcacatacatatatcaccctctcacttaagatggagctaacagcaggcaaagttcatctcttagaggcccttac

SEQ ID NO: 43205 - DNA, 201 bp, Homo sapiens
ctgtgtctttgtcaacactttgtattttctgtcttcagttttattctgtacttcagtaggtatgcagtgatattgcattggtatttgatattggaagttayctaatgactgatgaggttgagcattctttcctgtgctattgatcatttgtgactcagtgttttgaagaaatttttagtcttttcttcatttttctattgt

SEQ ID NO: 43206 - DNA, 201 bp, Homo sapiens
ttggttcattttctcttctcagtatataatactggatgcactttgtcttggggattcagagccctgctttctttaagggagaaagggaagttgaaaggtcrattaaagttttttggagaatctgtatcctgtgctgcattaggcatttttctcatgtcctctaacctcggattatcattctaaagtctttatctcatcatg

SEQ ID NO: 43207 - DNA, 201 bp, Homo sapiens
acttgtggggaaagaaaggcagatttattaaagaaaatacaaagatatattgcaaggtgcaatgggcagcacagcagagaaggggctgtctgcaaagatgyaggcactgcagggaagttttatagggccatagtggagggggctatgtgtggaacgagataattgggaagaggatgttgtgccaaggagttgtctgtgatt

SEQ ID NO: 43208 - DNA, 201 bp, Homo sapiens
gagttaatggtactgttttctatcaagtgtccagttgcataagttgttatacaaagacggtgctttagcttttaactggaggaagagggggacatactgayatgtgggacagagggtagagaaggaagaggtaaaattgagagggaataacgtgattaatttccactcagcctggcccgatgagagactgtgagggtgcta

SEQ ID NO: 43209 - DNA, 201 bp, Homo sapiens
taaaagtaatgacaaaaactgcaattacatttgcaccaacctaatacctccatgagatcaattttttttagcttccatatgtgagtgagaacatgccatakttgtctttctgtgcctggcttacttattttacttaacataatatcctccagttccatccatgttgctgcaaatggcaggattttattctttttatggctg

SEQ ID NO: 43210 - DNA, 201 bp, Homo sapiens
tcttgtcactcaggctggagtgcaatggtgcgatctcagctcactgcagcttctgcttcctgggttcaagtgattcccctgcctccacctcctgagtggcygggattacaagtgcataccaccacgcccggctaatttttttttttaagtaaagatggggttttgccatgttggccaggctggtcttgaactccagacctc

SEQ ID NO: 43211 - DNA, 201 bp, Homo sapiens
caagtgtccagttgcataagttgttatacaaagacggtgctttagcttttaactggaggaagagggggacatactgacatgtgggacagagggtagagaargaagaggtaaaattgagagggaataacgtgattaatttccactcagcctggcccgatgagagactgtgagggtgctatctaaagcttaaggaatcatgtt

SEQ ID NO: 43212 - DNA, 201 bp, Homo sapiens
ctggctattaatccatcagagagatagtttgcaaatattttctcccattccataggttgtctctttactttgttgattgttttctttgctgtgcagaagctttcacttgctacaatcgcatttgttaattttttcttttcaaacccacagctaatacaatactaaattaaaaagaaaaattgaaggcttttctcataagat

SEQ ID NO: 43213 - DNA, 201 bp, Homo sapiens
ttgagagggaataacgtgattaatttccactcagcctggcccgatgagagactgtgagggtgctatctaaagcttaaggaatcatgtttatgaaaaaactrtaagattttgggaagcagcagcgctctttggagattggcaacaaatatgacaatttactcaaaagatttttatttctggtggttctagactgagtgacag

SEQ ID NO: 43214 - DNA, 201 bp, Homo sapiens
catttacaaaataaattgaagaggacacaaagaaaatggaaaagtatttcatgtttatgaataagaagaattaatattgttaaaatgttcacacttttaartgataaacagattcaatgcagcctctatcaaaatatcaatgacagaaatagaaaaaacaatcttaaatctcatttggagccagaagaccctggatagtca

SEQ ID NO: 43215 - DNA, 201 bp, Homo sapiens
ccctttccagtaacatttcccattcttttaatttttattgttttattacctttactttcttgagttgaatgctgaacttattttcaatcttgctttttttwaaaaaaaaaactaataaatgttttttaaggaatacattttctcctgttgacaaaaagcatcaaactccgtaaaatatttgaagagatttattctgaacca

SEQ ID NO: 43216 - DNA, 201 bp, Homo sapiens
atgaaactagaattattgaaactctctcaccatataaaaatcaactcaaaaagaatgaaagacttaaatgtaagacctgaaactataaaatgactagaagraaacactggagaaatactcgggacatttgtctgggcatagaattttttgagtaagacctcaaaagcacaggcaattattttactcattttggttcacaat

SEQ ID NO: 43217 - DNA, 201 bp, Homo sapiens
ttcacaatttcctgttttttatgatctctgaaaattgcagccctacctactaaaaatcttttattagattagaaatttgtttttgtttgtagttgatttattgttgattattagttgattatagttgattattgtttttatcttgatttttatgattgtgatctattttttatgtttattggattttggttttgctgtttg

SEQ ID NO: 43218 - DNA, 201 bp, Homo sapiens
tcacaatttcctgttttttatgatctctgaaaattgcagccctacctactaaaaatcttttattagattagaaatttgtttttgtttgtagttgatttattgttgattattagttgattatagttgattattgtttttatcttgatttttatgattgtgatctattttttatgtttattggattttggttttgctgtttgg

SEQ ID NO: 43219 - DNA, 201 bp, Homo sapiens
tctgatatctaattttgtgtaggatttttgtttgtattgatgtcaatattgattgtttctatggtttccataaagtattttatttatgctacattttcaartttgcatatttggaaaagctatgaaatctacaaattgaaaaatctacaaaaaatagcatgaaagttggtttaatttataatgatttaaaaaattctctac

SEQ ID NO: 43220 - DNA, 201 bp, Homo sapiens
tttgaaattattattttgctttccatttataagtgagattgggcttttttttatttttgtactgcctttttacattttgaacaagaaaaggattgtttgtyctttggtgattagtaaaatgtgactgtatgaatttatctgggtattgtttctttttggtatgaaaactgcttatcaattaaaattatctgatatctaatt

SEQ ID NO: 43221 - DNA, 201 bp, Homo sapiens
gtgagggaggctgtctactccagtgttggagtcagctggaggtgcagcagcgcttgagctatccaaactgctaggatgttgttaataaaagaaccttctcrttctcgagtcaacatggctaaaacagccagccatgagatgtatgggaaagaagtgcagagcaagttgttatttattgaatgtgtagttaggaattactat

SEQ ID NO: 43222 - DNA, 201 bp, Homo sapiens
catggtacagatgagaatgggctcagagaagggaagggccttgctcagactcacacaaaggctagggccagaatagatggtgcctgactctcagttcaggrtgcttattctgacaaggcccgtcacttcacatggatatttaatgtattttgctagttggttaaaaataatgtaatgtatggcagaaccatctctctttct

SEQ ID NO: 43223 - DNA, 201 bp, Homo sapiens
gtggacaataatcccagtttatagcttctagtgcaatgacttttgccagcacccagcatatcagaagataaacccactgactttctttagtgaagattgcraattgtttaaatcagagcatgtgtgcaaagtccagggtactatctaattcaacacttctgtaatttgaaagctaataattataagaattattgtccttgt

SEQ ID NO: 43224 - DNA, 201 bp, Homo sapiens
tgttaagtgttttatatgttagcttaactgattctcactgcaatctatgaagcaggtactgttataatttctattttttagatgaacaactgagacacagygaagctatgtaacctttctaagattacccaactagtaagtggtggagtcaacatctgagctttggttatctgagcccataaattgcccgttagccctgcg

SEQ ID NO: 43225 - DNA, 201 bp, Homo sapiens
cacaatttcctgttttttatgatctctgaaaattgcagccctacctactaaaaatcttttattagattagaaatttgtttttgtttgtagttgatttattgttgattattagttgattatagttgattattgtttttatcttgatttttatgattgtgatctattttttatgtttattggattttggttttgctgtttgga

SEQ ID NO: 43226 - DNA, 201 bp, Homo sapiens
atttcctgttttttatgatctctgaaaattgcagccctacctactaaaaatcttttattagattagaaatttgtttttgtttgtagttgatttattgttgattattagttgattatagttgattattgtttttatcttgatttttatgattgtgatctattttttatgtttattggattttggttttgctgtttggatgtt

SEQ ID NO: 43227 - DNA, 201 bp, Homo sapiens
ttgtttgtagttgatttattgttgattattagttgattatagttgattattgtttttatcttgatttttatgattgtgatctattttttatgtttattggrttttggttttgctgtttggatgttgggctttcattttcaggatagctctatcacatatttcgtaattttgttttgtagaattatcttatattgaaggaat

SEQ ID NO: 43228 - DNA, 201 bp, Homo sapiens
aaaaaagcagatcaggcattgtcagcacatctgattatttcaagggaaccccagatctggatttttatgtgaaatattctaatttcacatataattagcamctcattaagaaaaaaactaaaaatgtcctgcttagggcaaaggagacatatctgtgggctcatcactgcctgtggacaatctgtttgcaaccttgggaat

SEQ ID NO: 43229 - DNA, 201 bp, Homo sapiens
cagtgttctcttggtgggtttataattttagattaaatcagtatttctcaaacttcaatgattggtgtattacagtgtggtagccagtctctgagatgatycttattccttgtttttgcttccttgtgaagttccctcccatatggaataggagtgatttatgcaactaattagagattgcagaagtgagtgtgtgacttc

SEQ ID NO: 43230 - DNA, 201 bp, Homo sapiens
agtgtctgtggctttgcgaagattcctcctaaaattctgctcatggaaggatttcaaagaaagactgagtgaacttgttcctgagaatgcttgaagggacrgggaaacattaaaaaataaagactgggttattggaaattgatggtggtgttggtgggggttgttaagaactaccgttatttacacactgatgaacttgtg

SEQ ID NO: 43231 - DNA, 201 bp, Homo sapiens
ccttgatctctcagatcacttgctctggaagtacactagctgctatgtcatgaggacacttaagcaacactgtggagaggtccacatggtaaggaacagcyagcaccaactcacaggtgaatgaaccaccttggaagcagatcctccagccccagtcaagccttcagatgactgctgttgtagctcacattttgactgcaa

SEQ ID NO: 43232 - DNA, 201 bp, Homo sapiens
ggcgacagcgtccatccccaacactgagccactcctgtcctggatgacttcctgcttaggtccgtcacatttcagaagagagctggctttctggaagcctvcgtttcccattcatcacagaacacgacagagtgcacacatcctggtatccttggtcttcaaaggccatttccagcagaccctctaacccaggcttgttct

SEQ ID NO: 43233 - DNA, 201 bp, Homo sapiens
ttgttcccctattggctagggttagaccgcacaggctaaactaattccaattggctaaagagaatgatggggtgagtgctttggtgggagtcacggcagagaaggtagcaggtagcaggtaattggaatgagttagggtggagcaggtgattggaatgtagggtggagcaggtgatcagaatgagtcagggtggagtatat

SEQ ID NO: 43234 - DNA, 201 bp, Homo sapiens
aggataggaaaaagatgtgtatgtattttgaaagaagaattttatttcctcctttctattaagtctcctttcatccttaggaaaagcctaagattagagayccagaactcttacaccttcatttttctgcaggagaagtgagatgtgaggctcccaataacaaattggacaaattctcaggaatactgacctataagggga

SEQ ID NO: 43235 - DNA, 201 bp, Homo sapiens
tgttcccctattggctagggttagaccgcacaggctaaactaattccaattggctaaagagaatgatggggtgagtgctttggtgggagtcacggcagagaaggtagcaggtagcaggtaattggaatgagttagggtggagcaggtgattggaatgtagggtggagcaggtgatcagaatgagtcagggtggagtatata

SEQ ID NO: 43236 - DNA, 201 bp, Homo sapiens
ttcccctattggctagggttagaccgcacaggctaaactaattccaattggctaaagagaatgatggggtgagtgctttggtgggagtcacggcagagaaggtagcaggtagcaggtaattggaatgagttagggtggagcaggtgattggaatgtagggtggagcaggtgatcagaatgagtcagggtggagtatataat

SEQ ID NO: 43237 - DNA, 201 bp, Homo sapiens
cccctattggctagggttagaccgcacaggctaaactaattccaattggctaaagagaatgatggggtgagtgctttggtgggagtcacggcagagaaggtagcaggtagcaggtaattggaatgagttagggtggagcaggtgattggaatgtagggtggagcaggtgatcagaatgagtcagggtggagtatataatcg

SEQ ID NO: 43238 - DNA, 201 bp, Homo sapiens
aagaatttaccgtatagcattctttttacataaactctccccccacctctttttttctttttcctttttaaattttcctaaagatgataaccattcttttytaaagcgaacttgcttcatgtctgtggactagactgcctaaggccataagattagaagttaggataatacgtgttatattgataacttttagcaaacttt

SEQ ID NO: 43239 - DNA, 201 bp, Homo sapiens
ttgaaaaaccaaaacaaaaaaagaatctctgtttcatgtgcaggaagaaagtgggacttactaggtttgaatgcggtgtagaaatgtttactgtggtgtayactgttactcagatctacacaattgctcttaaaattacaaagctgatgccgctgagaaaatcagaaaagaaaatccagtagttgttggcgagaagatcca

SEQ ID NO: 43240 - DNA, 201 bp, Homo sapiens
aggttcaaatgcaacagatattttttgagcgcttactatgtgccaggtattcatctagacatgaggcctagcattgaaccaaaagagacaaaaaccccttmtaaatttaagaatgagtcgtcagcatattaagtgcctactcattacccagtgcagcgtcaaagcatggtgaagtagtaggaagaatctgtattctagatt

SEQ ID NO: 43241 - DNA, 201 bp, Homo sapiens
tgcttccttgcccctccatgcccttctctctcaacttactggcaagaaagttgaggctatgcggaataatagtcatgggtaagaaggtatcacctttaacytgaactttgcccgaaggctgagtcactttattcagttgaaaacaattattgggccttttttgcttaaggtctcaatcttatctcttcctgtttagtgtct

SEQ ID NO: 43242 - DNA, 201 bp, Homo sapiens
ctcagtgacatgtgacaatacaatgaaggttgttgtggggaggggcagcttgctccaccaataactcaggaacactctttctagctaatggccccaccaayctcttggatttcaggatcttctactggattccctgcattcaaccagcagatggggaaaaagagagaataggaagactcacacatgattttttttcttttc

SEQ ID NO: 43243 - DNA, 201 bp, Homo sapiens
tttgagcatgtcctaaattgtgccagccaaaccaaccttctatggacccttgttaataaattggacagcttttatgattattttgattttctttaggctcytttgaacaattttagacttgtttttgcttaactcagacagaaaaattaatgaagctttaggggatggtcagacttagaggtgcaggagatcagtagtagc

SEQ ID NO: 43244 - DNA, 201 bp, Homo sapiens
tgtgaatattcggactaactccctgaatgatcctcccaagcccagaagcagacaggcaaagttgaagaagcaacaaatagtggagatggtattgaagtagragtcagaagattgggcccagttctgctacattctagtcaggagatgacctttaacttctcagagcctcaataacttgaatctgttatctaggactaataa

SEQ ID NO: 43245 - DNA, 201 bp, Homo sapiens
atgcctggttgactggaggaccaccctagtggaaaggggacagtctgggcctctggcctgccgtgcacacaagcctaacaattgtttttgtttaacgtgcrgacagaatagttgatccatttcaaccaggcatttacatccttagtatcctgtctcaattgccaaagtttgttttaagtctttaacttctaccatcactat

SEQ ID NO: 43246 - DNA, 201 bp, Homo sapiens
aagaaacagtggatttatataaaaggacttttttggaaaatttggccctcctcaaagcagctgtcttcttaggaaaggtgttctaggaatacccatgcctrtgtgtagctggcaaagtggtgatgtatgtcatgccctgcagatagcaatcctgcattcagagacaaaacagacagtggactgtagactttttcccgctct

SEQ ID NO: 43247 - DNA, 201 bp, Homo sapiens
gaagaagtcataatccttgtcccatacttgatctgaagtggcacgtttgctatcattccctcccactctttggcataggatacctactctagagggaagartcaaactctggctggctacccatggcttcagcaagctttcagatttgaattagccgctaatttctgtaggctatatctaatcagaattagaacagaagta

SEQ ID NO: 43248 - DNA, 201 bp, Homo sapiens
gcatcaaccaatgggtggataaagaaaatttcatatatatatacaccatggaatactactcagccataagaaggaatgaaataatgtcttttgcagcaacrtgggtggagctggaggacattattctaagtgaagtaactcaggaatggaagactagctactgttatgttctcacttataagtgagagctaagctatgagt

SEQ ID NO: 43249 - DNA, 201 bp, Homo sapiens
tacgtgcttgggttctggaactggttcaaaacctgtttcttctactcagtagctaagtgactttagacaaaattctttctcactcttaagttcctcatctrttattaaaagaggattattgtaaatattaaataatatgtataaatacttagcatagtacctagcacttagttagttattactatgttttattactattat

SEQ ID NO: 43250 - DNA, 201 bp, Homo sapiens
ctagcatgccctgaatttgtcatgtcacctcagatatctatgtgggcctcatttttcttttttataagatagaaataatattctctaccttagaggatgcwtgtgaaaatagaaaggaaataatatatattaaagcaattaatattttataacatgatattactatgcaagtgatattattagtgtggtagttagcatgga

SEQ ID NO: 43251 - DNA, 201 bp, Homo sapiens
ctctccctctttcccctctctgtctctctctgcctcttcccccccacacacctctctttcccctctctctctgcctctttcccctctctgtctctctctgyctctatcccctctctgtctctctctgcctctcttcccccccaccgcgtctttccctctctctctgtctctgcctctctttccctctctcctctctgtctc

SEQ ID NO: 43252 - DNA, 201 bp, Homo sapiens
ctctctgtctctatctcgctctcctctctgtctgtctctctctgtctctctctctcttcccctagggtagggacctacgggagtggaactactctctcttcccccaagaagaaaggaaagggcagcgggggggttgtgtcaggttcaacccttgaaattagcagaaggctcaacccctcaacaccagggatgtctcacctt

SEQ ID NO: 43253 - DNA, 201 bp, Homo sapiens
tgtctgtctctctctgtctctctctctcttcccctagggtagggacctacgggagtggaactactctctcttcccccaagaagaaaggaaagggcagcggkggggttgtgtcaggttcaacccttgaaattagcagaaggctcaacccctcaacaccagggatgtctcaccttgcccgtcctggaaggctcaacccctcaa

SEQ ID NO: 43254 - DNA, 201 bp, Homo sapiens
ttactttcttcactgtatgtacttcagcagctactcacacacaattgccactcataaaagctcatttttcagcgaaaggtttttttcctgaaagcaataayagtggggctgccaaccagcacaaatgtagttaagttttcccaaggttggttacatggtagtgagtatctttgggaagctctgagcagagaactaatgcca

SEQ ID NO: 43255 - DNA, 201 bp, Homo sapiens
tgttctgtgattatatagatcttcccataaggaggaggcgattgtcctctactggaggagtttggacagcaatctgaccccaattgagcagaacatgtttytaagcatttttcacttgtgtacttgttcattcaacaaatctttattatatccagagcctaatgctgagccaagcggtaggctacagagatttaaagaaaa

SEQ ID NO: 43256 - DNA, 201 bp, Homo sapiens
cacgagaaacctaggaataatgaatatttcactaacttgagtatggtgatggtttcacagatatgtgtgtgtatgcgtgtgtgtgtatgtctagtatatarttgtatactttaaatatgtgtgattttagggggatagtgactgaaaggggacatagggtggtttatgggtgctgagaatattcaatttatttgttctggg

SEQ ID NO: 43257 - DNA, 201 bp, Homo sapiens
taggacctagggttctaataaagtaggatcaagtagagactggggtcaacattctcagtcaggtttctcctgctgtaggttaatgtgtgtgggggtggggygggggggcaggggtcgagggatgaaggtggctatcttggacctggaaggtggagctgggactgtagagaagagaggagcctacaaaatctccttggtatt

SEQ ID NO: 43258 - DNA, 201 bp, Homo sapiens
tgaggccagggagcacctttatgagaccagtggccttgattttggtcagttttgtcaagagtgacaaaattatttatttcactctttattgaagccacttyttgctaaatgggaggctgtctgtgcttctttggtctgactagctctggtattaagtaatctctagggtctgtagcaataaccaaacaaactgatgattta

SEQ ID NO: 43259 - DNA, 201 bp, Homo sapiens
ctgaagccagccccaagctttgtatccaaagtttcagagttaggagatgaagatgatccaatgacatccactttgagtaattttttcaccttcagttcacsagtacctatgggagtgggagaaacctcacagaacatgaatacctctaaaagactaactggtccccattgatgttgctttctcccatattgacttttggca

SEQ ID NO: 43260 - DNA, 201 bp, Homo sapiens
aaattctttctcactcttaagttcctcatctattattaaaagaggattattgtaaatattaaataatatgtataaatacttagcatagtacctagcacttrgttagttattactatgttttattactattatctcccttgaaaatcccaaggagggcttctgctggactttcttttctgtcctatgtactgctgcctagag

SEQ ID NO: 43261 - DNA, 201 bp, Homo sapiens
gccagccccaagctttgtatccaaagtttcagagttaggagatgaagatgatccaatgacatccactttgagtaattttttcaccttcagttcacgagtasctatgggagtgggagaaacctcacagaacatgaatacctctaaaagactaactggtccccattgatgttgctttctcccatattgacttttggcataaag

SEQ ID NO: 43262 - DNA, 201 bp, Homo sapiens
ctgcggattttatggaaaccctcgtacaaatggcacgtgttcagtatgctataaagaacatcttcaaagactgaatagtagtaatggtagaataagccaamctgcaacctctgaatctttaccagttcaatgcacagatggcagtgtcccagaagcccagtcaacattagactctacatcttcatctatgcagccaagccc

SEQ ID NO: 43263 - DNA, 201 bp, Homo sapiens
tgggattacaagcgtgagccaccgcacctggctgtctctcaccttttgtcaggccactaacttatttttctccttcaaatctttttttttctttttttaattttttttttttaccttttttatttttatttttttgttttttcctcctccaaagctttctttcccatttttggatgcaagccagtgctctaggattccctc

SEQ ID NO: 43264 - DNA, 201 bp, Homo sapiens
gagccgagatcatgccactgcataaacaaataactttttagtatgtgtgtcccatctgatatttgggacatacttatcttgtatctgaatgttttatttgstaaatctggcaaccctaaacagaaggggttaaggtttgaatcctttagatttaaattgcttttttagcatcaccaaggcattttgtttctaactgacggc

SEQ ID NO: 43265 - DNA, 201 bp, Homo sapiens
ccttgaaaatcccaaggagggcttctgctggactttcttttctgtcctatgtactgctgcctagagactgtgaactatagggcctccctgccctcctaggmgagggacgctttgctgagagataaggctctagactgtagaactgaagcagcacatatgttggataaaatgttaatttaattcttttttttttcatgtatc

SEQ ID NO: 43266 - DNA, 201 bp, Homo sapiens
attccttttctgccctcctccttcttttcctggttacttaaatttcagcgtgctactttcttttgtttcatcttacagagctcattttccattttagtttstgccatttccttgctaggataatcgccaatcttctgtagctttaacccctaaaacccgaggtggtattacatatgttgcgtaagagctaagtctttcacc

SEQ ID NO: 43267 - DNA, 201 bp, Homo sapiens
ataataatgttcaccttgcatggtggtcgtaggagttaagtatggttctgaaaatgttagttctgtttctccaaaaaactattagcccttggaaaaagggyatctcatttatctctgtatacacagtatatttgtgatacagtttctatcacaatgttgtgcacacagccaacattcaataaatatatattgaatattgaa

SEQ ID NO: 43268 - DNA, 201 bp, Homo sapiens
gagagagagtgaggaggatcctatacttttaaatcatcagatcttgtgagaacacaagaatagcatgagggaaagccgcctccatgattcagtcacctccyaccaggtccctccccaacactgggagttacaattcaacatggtatttgggtgggggacacagagccaaaccatatcaaatagttctggataataatagta

SEQ ID NO: 43269 - DNA, 201 bp, Homo sapiens
agaaatcaacagctcttgcagtaagaagcttgttcttgcctatttctcactgtagttacagggaaagtgtgagtagctttgggagagggtgtatgatagcwgtgaaagaaagtaaatcagtgtctgtaaaatgcttaggttgaacatctgttcctaaggtgactgcttttgtcacactgtaatgttaacagcccaccttcc

SEQ ID NO: 43270 - DNA, 201 bp, Homo sapiens
aaactaaagccaagaaatgaaaagtgacttgccctaggtcacttaacaatttagttgcagagtccagtctagaatagctaaaatgtcctgagcatttttawttattaggaattgttttcaaatattttgtgtgccttaactcattaatcctcccaataaccttatgagtagatattattatcatttccatcttacagaaaa

SEQ ID NO: 43271 - DNA, 201 bp, Homo sapiens
ctgtctacttaattccccaaccagagtgtgaacttttaaaaagcatacacttgtgctctttaacccctcactctccacagtaggtggtgtacaaaatgctstgagatatatctagaggttgcataaatgccttccatgtccagaatactgtgctaggaagacactatgtggtttatacaaaaagacagttatccctgccct

SEQ ID NO: 43272 - DNA, 201 bp, Homo sapiens
gtacagctagcattccctagcaatcactctgtgtcctttctgtgcggggctgtataggttatggtgggattggtccagatccaccttgaaagcttggtgtkgccttactctatcctaggacctagggttctaataaagtaggatcaagtagagactggggtcaacattctcagtcaggtttctcctgctgtaggttaatgt

SEQ ID NO: 43273 - DNA, 201 bp, Homo sapiens
  misc_feature (1)...(201): n = A,T,C or G, or insertion/deletion polymorphism (see Tables 1-2)
taatttctgtaggctatatctaatcagaattagaacagaagtacctttaacaatggacttttaagaaagaaaaatcacatctttcagcgtaagttgtcgcngtcgtattcattgtgaatattcggactaactccctgaatgatcctcccaagcccagaagcagacaggcaaagttgaagaagcaacaaatagtggagatgg

SEQ ID NO: 43274 - DNA, 201 bp, Homo sapiens
tttctcaggagcctaaactaactacaagtcagtaacttccttctttggactagagaggtgtctacgttctggctggtaactcctacccctggtcctacccsggtcctccaggctctgtttcagcctttcccctcctggctcactgtttacaggtgtggtcaggaattctctgaaccagccgcaaatgctgctgagcattat

SEQ ID NO: 43275 - DNA, 201 bp, Homo sapiens
aaatcaaccatttaaaaaggtataatttagtgacaattacttcccatttataagcaagggatgcatgagtgctacccatagaccggatatgggccatgtckttagcgtttcttgatctcgttagataaattatctgaaattttgaggagacttcagcagaaagaagcaggggatatgctgtcaaatgcctgtggatttata

SEQ ID NO: 43276 - DNA, 201 bp, Homo sapiens
accgagaagccattactatgtgctaggctagagatataaataagacatggtctctgccctaaaagggctcaaaatgtagctagggaaataagttaccttayttgagtttccaaggtattttcaaatgtcttacgagatttgctatttatcagcatcctaagaggtaggcagtgcaacaatttttagagccattttagacac

SEQ ID NO: 43277 - DNA, 201 bp, Homo sapiens
gggaaatatttgtaaaccctgcatccatcaaaggactaatatccagaatctaaaagaaactcaaacaaatcagcaagaaaaaaactaataatcccatcaaraagtgagcaaatgacatgaatagacatttctcaaaagaagatatacaaatgtccaacaaacatgaaaaaaatgctcagcattactaatcatcagggaaat

SEQ ID NO: 43278 - DNA, 201 bp, Homo sapiens
aagggaactacattgtgtaatatttcaaaatgttaatcttctatatgcagtttgttataggtctatttcctgaacattttcttgtgtgattttagaaaagrcatcaaagtgacgatcgagtcaacaaccagcctgttctgctactggtgaatggcaagtaagttcttctagagaagctggtttaggtaggaccagtcctga

SEQ ID NO: 43279 - DNA, 201 bp, Homo sapiens
ggagacttccacagcagtccccagtctggaccaaactgaaacactcaagcactcgacgttctgcctatgcattctcccataaacaaggctttggggccctyatcacttctggcaagatagtgaagcccaggatgtccaagagaaacaccctttttttgaaaaagatagaggccctagggaaattccaaaggaggcagtcag

SEQ ID NO: 43280 - DNA, 201 bp, Homo sapiens
gcttttgcctctgtggatgaaaaccctatcccccatgctctggctataggtttttgacagaattcaagagtgcaggagacttccacagcagtccccagtcyggaccaaactgaaacactcaagcactcgacgttctgcctatgcattctcccataaacaaggctttggggccctcatcacttctggcaagatagtgaagcc

SEQ ID NO: 43281 - DNA, 201 bp, Homo sapiens
gtagtaatggtagaataagccaacctgcaacctctgaatctttaccagttcaatgcacagatggcagtgtcccagaagcccagtcaacattagactctacrtcttcatctatgcagccaagccctgtatcaaatcagtcacttttatcagaatctgtagcatcttctcaattggacagtacatctgtggacaagcagtacc

SEQ ID NO: 43282 - DNA, 201 bp, Homo sapiens
aatgagtgcaaacaggggaaatgccagagacttataaaatcagatctcatgagactcattcactatcatgagaacagcatgggggaaaccacccctgtgayccaattacctccacgtggtcccacccttgacacgtgaggattatgggattacaatttaagatgagattttgggtggggtcacagccaaaccataactgtc

SEQ ID NO: 43283 - DNA, 201 bp, Homo sapiens
agctgaaaaaagtatttaccctactctgatcatccttttctgggttctgcatttccttacacatacacacacccaaacacattttagtttcctcctttccrggctttctaaaccctgtaccggggctttttggcaataaaaaaaaaaggaccctatgtaactagattaccttatttagtaatatttattgagtatctacta

SEQ ID NO: 43284 - DNA, 201 bp, Homo sapiens
aatcccagcactgtgagagtccaaggccggcagatcacttgaggccaggagttcaagactagcttggccaacatggcaaaacctgtctctactaaaaataaaataaataaataaataaataaataaataaataaataaataaataaattagccaggcatggtgacacatgcctatagtcccagctacttgggaggttgagg

SEQ ID NO: 43285 - DNA, 201 bp, Homo sapiens
ttggccaacatggcaaaacctgtctctactaaaaataaaataaataaataaataaataaataaataaataaataaataaataaattagccaggcatggtgrcacatgcctatagtcccagctacttgggaggttgagggacaagaatcgcgtgagcctgggaggtggtggttgcagtgagccaagattgtgctattgcagt

SEQ ID NO: 43286 - DNA, 201 bp, Homo sapiens
gaacgaaatgatgggaaggacatctccgactaccagtccttctccctggtggtgcagacctccttgatctgggtggtcgcaatgcaggtgtggccagtggyggtgggggtaaggggattgggtgggggcctctctgaaagagtgggaggaatagagggtgagagtgtgggaagggagcaaccttcattacataattggagg

SEQ ID NO: 43287 - DNA, 201 bp, Homo sapiens
atcccagcactgtgagagtccaaggccggcagatcacttgaggccaggagttcaagactagcttggccaacatggcaaaacctgtctctactaaaaataaaataaataaataaataaataaataaataaataaataaataaataaattagccaggcatggtgacacatgcctatagtcccagctacttgggaggttgaggg

SEQ ID NO: 43288 - DNA, 201 bp, Homo sapiens
tcccagcactgtgagagtccaaggccggcagatcacttgaggccaggagttcaagactagcttggccaacatggcaaaacctgtctctactaaaaataaaataaataaataaataaataaataaataaataaataaataaataaattagccaggcatggtgacacatgcctatagtcccagctacttgggaggttgaggga

SEQ ID NO: 43289 - DNA, 201 bp, Homo sapiens
tctgaggctgcaacatcaggaatacagattggtgctatggcttggtgatctacactggtacgtttcccttggcccccagcctgctaaattccattcatggmtgagctatgggtacttagttttcaggatgtggatatgacactcagatatatttcagaacactatggttttgagatagataggcaggtagaaggatggatg

SEQ ID NO: 43290 - DNA, 201 bp, Homo sapiens
cccagcactgtgagagtccaaggccggcagatcacttgaggccaggagttcaagactagcttggccaacatggcaaaacctgtctctactaaaaataaaataaataaataaataaataaataaataaataaataaataaataaattagccaggcatggtgacacatgcctatagtcccagctacttgggaggttgagggac

SEQ ID NO: 43291 - DNA, 201 bp, Homo sapiens
ccagtctctactggtaacatctattttctaaaaccccatgaaaaagtaggagatactgcacccgtacaacagttctgtttgtgtcctgtacagtggtcacktgtcttttactctagtgaaaccaacctgaaagtgaagcaggccatctcagttaccagtgacatggaagatcgcctggagcttctgtctacctttaatggt

SEQ ID NO: 43292 - DNA, 201 bp, Homo sapiens
taagcatgataagtaagttaaatataaaccatgggatgtagctgtgggtagactgaaccagaaacacatgatgaaatggtggcgagaaagcaaattagttrctgccctttctgcagggccatggatactggccttttctgtgatgactctctgctacatcatttagctgttcttcttagcatacatttttttttaagagat

SEQ ID NO: 43293 - DNA, 201 bp, Homo sapiens
tagtcccagctacttaggaggctgaggcaggagaatggcgtgaacccgggaggcggagcttgcagtgagccgagatcccgccactgcactccagcctgggygacagagagagactccgtctcaaaaaaaaaaaaaaaaaaaaaaaaaggaaagtagagaaatagaaataaaaagaaaagacaaaactgagtatattaggaa

SEQ ID NO: 43294 - DNA, 201 bp, Homo sapiens
gaatcccaaggaagacactctgattttcagatgcttagccctgctaagaaagaaaccaggatgatatatttgcttgtcctgttctgacgcagaaccattcwttttctgctttctccttagtgttgaaataataagattgggcaacagtttatatatcaactgggatcggaagatgttttatgcaccaaggaacacaccagc

SEQ ID NO: 43295 - DNA, 201 bp, Homo sapiens
gagatttaaagaaaagaaaaaacatggtctctaccttttttaaataaattgacatgaaattgtacgtatttattgtgtacaatatgatgttttgaaatatmtacataccttctagaatggttatatcaagctaattaacatatgcagtacctcacatagtatctctgcagggaaggcttatggcctgggcaatttttagtt

SEQ ID NO: 43296 - DNA, 201 bp, Homo sapiens
tatgagtacacaaaggcatacaaagtggtaaaatggactttggagactcagaagggggagggtgcaaatggagtgaggaataaaaaactacatattgggtwcggtgtacattgcttgggtgatgggtgcaccaaaatctcagaattcacaactatataatgcatccatgtaaccaaaatcacttgtacctcaaaagctact

SEQ ID NO: 43297 - DNA, 201 bp, Homo sapiens
ctcattttccattttagtttctgccatttccttgctaggataatcgccaatcttctgtagctttaacccctaaaacccgaggtggtattacatatgttgcrtaagagctaagtctttcaccctggcatttgagtcaaaactctaagcattatatccttaaacagaggcttcttctattttgagacttctactaccttttta

SEQ ID NO: 43298 - DNA, 201 bp, Homo sapiens
attgtcctctactggaggagtttggacagcaatctgaccccaattgagcagaacatgtttctaagcatttttcacttgtgtacttgttcattcaacaaatytttattatatccagagcctaatgctgagccaagcggtaggctacagagatttaaagaaaagaaaaaacatggtctctaccttttttaaataaattgacat

SEQ ID NO: 43299 - DNA, 201 bp, Homo sapiens
tttttggttgttgttagaggcagggtctccctctgtcactcaggctgaagtgcagtggcatgatcaagctcactgcagcctccaactactgggctcaagcrattcttccaccttagcctcccatgtagctaggactacaggtgtgtggcaccatgccagctacattaaaaaaattttttttgtagagacagggtctcacta

SEQ ID NO: 43300 - DNA, 201 bp, Homo sapiens
tgagcttctccagaagggatcctgtctaattatttttcagcctccactagtatagtccagcataaggctgtgaaaagagcaagccttgagaaatgctatastgtctgattgattattatttggaaaatcatggagagaacaccaaggaaatcttagttttggcttggatctctaaactcctaagtgctaagctatttgacc

SEQ ID NO: 43301 - DNA, 201 bp, Homo sapiens
atgtatatttttttaacaacaatttaaagaaattcaaaccctcctttaaaacccttgccaagtctctgctgtgttcacttaccaacaggtgatacttatgrcaaggatggacagagggtgacggtctctgaggtgagtgattacagctccatgggaaatgcatgtgggagctgagtgaggctgtgcttcagagaagcatcc

SEQ ID NO: 43302 - DNA, 201 bp, Homo sapiens
gataaaggaggacaaatggatgaatgttcaagtgggagatataataaaactagaaaataatcagcctgtcatggtgagtacctcttttggctgtgacttgytcttttttggattgagtgggtaccagggactcttggagcacttctgctaccactccttttggtgacctttgttgcccattttgcatcagaaatcaacagc

SEQ ID NO: 43303 - DNA, 201 bp, Homo sapiens
gaggacagacaagatgaacgtaggtaaactcaggaaaatgtatctgagtatgtcattattattacctctgaagtgtgtgtgtgtgtgtgtgtgtgtgtgtrtatacatgcacatatggcagatcaacctggcaatcagattgttaacctaccaaacaactgatcaggaaaggaaatatatttttcaaaagtaaatactttg

SEQ ID NO: 43304 - DNA, 201 bp, Homo sapiens
gtatcaaatcagtcacttttatcagaatctgtagcatcttctcaattggacagtacatctgtggacaagcagtacctgaaacagaagatctgcaggcttcrgtatcagacatggcacagcagccatctgaagagcaaagcaagtctcttgaaaaaccaaaacaaaaaaagaatctctgtttcatgtgcaggaagaaagtgg

SEQ ID NO: 43305 - DNA, 201 bp, Homo sapiens
gatcattcgagactactaacaacacctctatgcacacaaactagaaaatctagaggaaatggataaattcctggaaacatacaactctcctagattaagtygggaagaaataggtcccctgaacagactaataacaagcagtgagattgaatgagtaatttttaaaaattgctagcaataaaaaagcccagggccagatgg

SEQ ID NO: 43306 - DNA, 201 bp, Homo sapiens
tgaggacaacctactggacaatgataaaccatgttgtcatctggggtagcctgggtttctacttttgggtgtcattcctcctgtacagcgatggcttgtgyctagtattccctgacgtcttccaattcctaggtaaggccctgcccagtgggcggagggtggggaaccaggtatatttatttaataaatgtttaccgagaa

SEQ ID NO: 43307 - DNA, 201 bp, Homo sapiens
gggagaaatagacagcagtacagtaaagtagagaacctcaataatccactttcaacagtagaatcattcagaaagagaatcaaggaaacagtggacttgawtaacactatgaacaaatggacctaacagatatatacagaacattccattcccaaacagcagaatatattgttcttttcaagtgcacatggatctgttctc

SEQ ID NO: 43308 - DNA, 201 bp, Homo sapiens
aacccactctttctttactcctctcttagctttttctagctttgttctcatcctttttcctctgctcctccttctcctactctatattccctttgccttcytctatctgcccctgctccatctctcctattctttctctttcttctctccacatttcctgtctcctctcgaactctattttcctttccaactttcaattct

SEQ ID NO: 43309 - DNA, 201 bp, Homo sapiens
tggccttgaactcctgagctcaagtgatcctcccgccttggccttccaaactgctaggatcacaggcgtgagcaaccatgtctggccatactccttattcttttttttttttttttttttttttttttttgagatggagtctagctctgttccccaggctggagtacagtggtgcagtctcggctcactgcaagctccgcc

SEQ ID NO: 43310 - DNA, 201 bp, Homo sapiens
acaaactaaataaggcaccagggaccaatcatggagaaactgagatatgtcacctttcagacagataattcaaaatagctgttttgaagaaacgcaaagamattcaagataacaggaaggaattcagaattatatcacataaatttaacaaagaggctgaaatagttaaaaagaattaaacagaaattctagagttgaaaa

SEQ ID NO: 43311 - DNA, 201 bp, Homo sapiens
gtgttgttcccctattggctagggttagaccgcacaggctaaactaattccaattggctaaagagaatgatggggtgagtgctttggtgggagtcacggcagagaaggtagcaggtagcaggtaattggaatgagttagggtggagcaggtgattggaatgtagggtggagcaggtgatcagaatgagtcagggtggagta

SEQ ID NO: 43312 - DNA, 201 bp, Homo sapiens
tgttgttcccctattggctagggttagaccgcacaggctaaactaattccaattggctaaagagaatgatggggtgagtgctttggtgggagtcacggcagagaaggtagcaggtagcaggtaattggaatgagttagggtggagcaggtgattggaatgtagggtggagcaggtgatcagaatgagtcagggtggagtat

SEQ ID NO: 43313 - DNA, 201 bp, Homo sapiens
gttgttcccctattggctagggttagaccgcacaggctaaactaattccaattggctaaagagaatgatggggtgagtgctttggtgggagtcacggcagagaaggtagcaggtagcaggtaattggaatgagttagggtggagcaggtgattggaatgtagggtggagcaggtgatcagaatgagtcagggtggagtata

SEQ ID NO: 43314 - DNA, 201 bp, Homo sapiens
ttttcctggaatataattggtatatgtcttccactttccatcatgtatgtaaaatttcatagtaaaacttaccgatagtttcaataaagaaattatctgcaaaaaaaaaaaaaacccaaacaaacaaaaacttccatacataaccatccatataccttttccataatatagggaattataaactgttttttctgtgctgtt

SEQ ID NO: 43315 - DNA, 201 bp, Homo sapiens
ataaagggaaagttgtggcagtaggagaatgtggacttgattttgactgactgcacttttgtcccaaagatactcaactcaaatactgtgaaaaacagttwgaactgtcagaacaaacaaaattaccaatgtttcttcattgtcgaaactcacatgctgaatttttggacataattaaaagaaatagagatcggtgtgtag

SEQ ID NO: 43316 - DNA, 201 bp, Homo sapiens
aatactattaaagtattttttcctggaatataattggtatatgtcttccactttccatcatgtatgtaaaatttcatagtaaaacttaccgatagtttcartaaagaaattatctgcaaaaaaaaaaaaaacccaaacaaacaaaaacttccatacataaccatccatataccttttccataatatagggaattataaact

SEQ ID NO: 43317 - DNA, 201 bp, Homo sapiens
atctacaagacagtaaagatgcactgcatttggcacaaacaaatcatatgtttttcagtacagctggatgtcatcctacaagatgtggtaaatttgaaaakaataaccctgatctttacttaaaggagttgctaaatcttgatgaaaacaataaagggaaagttgtggcagtaggagaatgtggacttgattttgactgac

SEQ ID NO: 43318 - DNA, 201 bp, Homo sapiens; identical to SEQ ID NO: 35172

SEQ ID NO: 43319 - DNA, 201 bp, Homo sapiens; identical to SEQ ID NO: 35266

SEQ ID NO: 43320 - DNA, 201 bp, Homo sapiens; identical to SEQ ID NO: 35296

SEQ ID NO: 43321 - DNA, 201 bp, Homo sapiens; identical to SEQ ID NO: 35299

SEQ ID NO: 43322 - DNA, 201 bp, Homo sapiens; identical to SEQ ID NO: 35170

SEQ ID NO: 43323 - DNA, 201 bp, Homo sapiens
aggtaaagtggggtgaagcgttaggaatggaggagcagcagagagggcacagggaggatggggccttacagatgatcccgtgtcaaaatacccaggcttcytccagctgtgaaacaggaaagacaaactaaatacggggatagtgcgtacttactgtctccaccccagaccagaagagcctctgcctctcatcagcactcc

SEQ ID NO: 43324 - DNA, 201 bp, Homo sapiens; identical to SEQ ID NO: 36607

SEQ ID NO: 43325 - DNA, 201 bp, Homo sapiens
gaagaaattctcaggcatcggtccctttacagcccctctaatgccgcctgccaccttcgtggctctccacagcttccgtgggagtcatttgccgagacaascaggggccattcttcctgggatgagcactggggccaccttatgtggcaccgccgaagtccagagcgcatgctgatggcagcactgtgaggtctttacagt

SEQ ID NO: 43326 - DNA, 201 bp, Homo sapiens
cgaccccgattcgggcgcacacactcggccccaaaccggcttggccggaaactcggcggctcccggggccgggacaccccggtgcagccgggagcggaccsggtgcggtcgcaggtggggggcaaggttatgcaactgcatctggcgcgaccgggtcgctgaggggcgtctggcaactttggcgacgtcagggaggagcgg

SEQ ID NO: 43327 - DNA, 201 bp, Homo sapiens
agaaattctcaggcatcggtccctttacagcccctctaatgccgcctgccaccttcgtggctctccacagcttccgtgggagtcatttgccgagacaagcrggggccattcttcctgggatgagcactggggccaccttatgtggcaccgccgaagtccagagcgcatgctgatggcagcactgtgaggtctttacagtgg

SEQ ID NO: 43328 - DNA, 201 bp, Homo sapiens
ctgagagttattccaccgtaatcacaggaagccctcctctgactgcattatcatccaaatgcacacggttctacatcctgcagaagaaattctcaggcatyggtccctttacagcccctctaatgccgcctgccaccttcgtggctctccacagcttccgtgggagtcatttgccgagacaagcaggggccattcttcctg

SEQ ID NO: 43329 - DNA, 201 bp, Homo sapiens
tgagagattctgcgtatttaggtgtgtgtgctaacaggaagaggtgagcacatgcatttataaccacctttgcaatccctgggacactccaaagttctttycataaattctatgtgtaacctttaattgcccatttgtgggacatgttgatttttactccacatctgctggagcacctactgatgtgaatcattttcctgc

SEQ ID NO: 43330 - DNA, 201 bp, Homo sapiens
tattaagtaaatgcatattcttatacacatgtatatataagaatatacagtaggccgggcgcggtggctcacgcctttaatcccagcactttgggaggccraggtgggcagatcacttgaggtcacgagtttgagaccagcctggccaacatggcaaaaccctgtctctactaaaaatacaaaaattagctgggcatggtg

SEQ ID NO: 43331 - DNA, 201 bp, Homo sapiens
tgacacagtgatgatgctcagacaaatgaggtcacactgagacaggaagcatctccatgaatttctatataggtggaaaactgcataagcaactagtgcargagacagaatgatccagcaccagtgaagttgctgtggtcccgggcaacgagtatgcctcaaaggtaatccccattctgatattttccaccattgataact

SEQ ID NO: 43332 - DNA, 201 bp, Homo sapiens
tgctggagcacctactgatgtgaatcattttcctgcattttcactacttgtccatttttcaaatccatcatttacaaatgaaaggcacctccactcaaggwaagaaaaatggatttgatgatgccctttaagcacccagctctagtggtataatgtgaaatacaccccagggctgtactgttgcctctgacagtaaggatg

SEQ ID NO: 43333 - DNA, 201 bp, Homo sapiens
caatgcccaagtttcctggcagctttatttacagtcactttaaaagacggaaggcagatttcaattttatggattgccaataaagtaagatttacagaagytccccagaccactgggaaaattactggagcccacagctgcaacagcacatccccaagggaacatgctggagagtggcaacttctcctatctggttttaaa

SEQ ID NO: 43334 - DNA, 201 bp, Homo sapiens
acctttaattgcccatttgtgggacatgttgatttttactccacatctgctggagcacctactgatgtgaatcattttcctgcattttcactacttgtccrtttttcaaatccatcatttacaaatgaaaggcacctccactcaaggaaagaaaaatggatttgatgatgccctttaagcacccagctctagtggtataat

SEQ ID NO: 43335 - DNA, 201 bp, Homo sapiens
tgcacacggttctacatcctgcagaagaaattctcaggcatcggtccctttacagcccctctaatgccgcctgccaccttcgtggctctccacagcttccrtgggagtcatttgccgagacaagcaggggccattcttcctgggatgagcactggggccaccttatgtggcaccgccgaagtccagagcgcatgctgatgg

SEQ ID NO: 43336 - DNA, 201 bp, Homo sapiens
ccggccgggccagcagggccgggccggcagcggtggagggggcgggcagcaggcgcgcagcgggccaagtccccggagccgaggcttcctccgcgtgagcscggcgagtctggccgcggatgccctgtccggagtgctccgtgccgccccaggcttgccagggtccgcagcgagacatgcccgagccaggcgctgcatcga

SEQ ID NO: 43337 - DNA, 201 bp, Homo sapiens
aacacaaattaggtgaattggacacggggagatccgcagccctaccgtgcagtgcaattaaagcgaagactgtttaattctccaaagactcaataatatgaaaaaaaaaaaaacgtttacggaaaacatggaactgacagttccaggaactcagaggtcatcaaacataactagagatttttttatttttaattctgtact

SEQ ID NO: 43338 - DNA, 201 bp, Homo sapiens
gagccaaaggtaaggtgaggcaagttttcaccaatattttgatttgtgatgctgaagacatgcacttaagcactacaatatgtaaatggtttcctacttcaaaaaaaaaaaaaaaagaagcgatgccaatgattttaatagacttagcaaaacaactgtaagtctactacacaattgaacaactctaagcagtcctgatga

SEQ ID NO: 43339 - DNA, 201 bp, Homo sapiens
gcaggggccattcttcctgggatgagcactggggccaccttatgtggcaccgccgaagtccagagcgcatgctgatggcagcactgtgaggtctttacagyggtttccataggtaatgggccaataaccaccaaatgtaagacttcataaaaaatctcattctcactgtgagggaaccaggaaatggagaaaaatcttttc

SEQ ID NO: 43340 - DNA, 201 bp, Homo sapiens
agccaaaggtaaggtgaggcaagttttcaccaatattttgatttgtgatgctgaagacatgcacttaagcactacaatatgtaaatggtttcctacttcaaaaaaaaaaaaaaaagaagcgatgccaatgattttaatagacttagcaaaacaactgtaagtctactacacaattgaacaactctaagcagtcctgatgat

SEQ ID NO: 43341 - DNA, 201 bp, Homo sapiens
tcctaggtcttttcctctcccaagagaattctactctgccacaaaggaactcagcctctgcgccctgtggcttctgctgacgggtggtgtgtgctctggakggggggtagggttcctggctaggagtggcagtggcgcctgctctggagtgtccctaaatgtcagcatgcaacattaccaggcaggccctcccacttcagt

SEQ ID NO: 43342 - DNA, 201 bp, Homo sapiens
gaagccctcctctgactgcattatcatccaaatgcacacggttctacatcctgcagaagaaattctcaggcatcggtccctttacagcccctctaatgccrcctgccaccttcgtggctctccacagcttccgtgggagtcatttgccgagacaagcaggggccattcttcctgggatgagcactggggccaccttatgtg

SEQ ID NO: 43343 - DNA, 201 bp, Homo sapiens
gccctcacccttgcgtctatgatgtcctgaaagtcaccaggtgcccaaaggacacacaggcaccacccagtccttagctctgctctccaggcggctacttytggcccttgctcctattttcaatctccagtctcggatgaggttttcccacacagggtgacctcagattttgctttattttatgaaaatccaacttaggcc

SEQ ID NO: 43344 - DNA, 201 bp, Homo sapiens
tgttctcaatatgtacaggaatgaatactctcccattttcctgggaaaagaggaagagtacgtccaagtcttccaaaagtgttattggtacattcaggtayaagttaaacaaggccaaaatatgcctatcttttgcttcactaaaatttgaactgtttatctggtatttctggagacaattcctaatcaccccccaacttc

SEQ ID NO: 43345 - DNA, 201 bp, Homo sapiens
agctctagaactatgaccagcaagaactggttggcataaattgagttagctcaattaagactggagaatgagggaaggctgtatttttctttttcccccayaaaggttcagtttcttctggcaattgcggtcctattctctgtgaagtgcaggcaggttttgggagagattacacctccactgccaagaaaaaactcaaaa

SEQ ID NO: 43346 - DNA, 201 bp, Homo sapiens
tgaatgtcacttcacatcatcggcaggttttcctcgggaagcacaaaacattaaagcccatcactgcaggtggagctgcgggaacgactttatttcttctyaaataatgtgatcaacagcatacctgacaagcaggcacgttgcaccttgaatcaatcagcaggaatgcaaaagcatacaaagatgtaagcaacagtgcat

SEQ ID NO: 43347 - DNA, 201 bp, Homo sapiens
cagtatcagctctcggcgggttgaatgtcacttcacatcatcggcaggttttcctcgggaagcacaaaacattaaagcccatcactgcaggtggagctgcrggaacgactttatttcttcttaaataatgtgatcaacagcatacctgacaagcaggcacgttgcaccttgaatcaatcagcaggaatgcaaaagcataca

SEQ ID NO: 43348 - DNA, 201 bp, Homo sapiens
cagctacactcagcccacttgtgttctctccatggtcgggcagtttttcctttcccacttgtgctaaggtctcctttgagataacagattgcacatcagtkacagcatcccatgccctatgaaaaggccattcctgccacttctgtgcttcttcagatgacacaaggctacaggagcatgcacaggagctcaacgtccttg

SEQ ID NO: 43349 - DNA, 201 bp, Homo sapiens
aatttgtctgccagtatcagctctcggcgggttgaatgtcacttcacatcatcggcaggttttcctcgggaagcacaaaacattaaagcccatcactgcasgtggagctgcgggaacgactttatttcttcttaaataatgtgatcaacagcatacctgacaagcaggcacgttgcaccttgaatcaatcagcaggaatgc

SEQ ID NO: 43350 - DNA, 201 bp, Homo sapiens
agccccggggggggcgggaggcgcgaggcgcggctgcgcccagcactggccccacctcccacgcgcccgcgggagatttgcttggggctggatcccccgcmtaccgtttccccgcagccgccggcgcttctggcgcttgtgacccgagcaggaagcccagagagaaaccagaaagacaggaaggggattcctggacttcct

SEQ ID NO: 43351 - DNA, 201 bp, Homo sapiens
ctccaagcctcaagtttccgccacaccctccagagaagcgtccccgccgcagccccggggggggcgggaggcgcgaggcgcggctgcgcccagcactggcsccacctcccacgcgcccgcgggagatttgcttggggctggatcccccgcctaccgtttccccgcagccgccggcgcttctggcgcttgtgacccgagcag

SEQ ID NO: 43352 - DNA, 201 bp, Homo sapiens
acggatgatttttccatatcctccctcatattagcccttctttctcttgacaaagcaatgctgaggacctattacctctatacaagagatgatttttttaygtatacagttctctgtactttcgtgcattctcaatctgcttaagtagaagataccagctcttaaggccaggtgatttgcctgaaaacatttcaagtagag

SEQ ID NO: 43353 - DNA, 201 bp, Homo sapiens
aaatcggctctatctagcagacaaagtgaacccactggacggttacaacagtaccatgaatgctaagagctaggagcaacatgttacaaaaacagtggcaycccttaaaaacaagtttccccaagaaaggtgggaggaaaataggggctcaggacagttgcaaatagatgtctatcttccaaataaaatgccaagtcttct

SEQ ID NO: 43354 - DNA, 201 bp, Homo sapiens
gcttaccttcctgaggtcaattttgaagtgtacatatctgattgttgttttcctaactcatcacaaagtgccttatcctaagcacaacaatcgtcagtccrgtggtttccagctgggtatctgcacccttgactttctgaaatttacactgacactaacagtttcaaggaaatcaatttctatagcatcgacttccatagt

SEQ ID NO: 43355 - DNA, 201 bp, Homo sapiens
cgtcttgataaatcggctctatctagcagacaaagtgaacccactggacggttacaacagtaccatgaatgctaagagctaggagcaacatgttacaaaarcagtggcatcccttaaaaacaagtttccccaagaaaggtgggaggaaaataggggctcaggacagttgcaaatagatgtctatcttccaaataaaatgcc

SEQ ID NO: 43356 - DNA, 201 bp, Homo sapiens
atataagtgctagacattgtctttgcagagttttatctgtaaaatagaaacatcagaatctcaatctcaggaatatcgtagggagaaaaaatttatcatakaatcaacactaagatcagatgtacttcaattctcctactgccaactcctttcacaaaagggcttggttcataaatgagaataatggcccaaagagggcta

SEQ ID NO: 43357 - DNA, 201 bp, Homo sapiens
cttttcctttcttgctaaaagtgagacaatcacaatgaaacataataaagaaattttctcacccattttatctatttttctgcttaccttcctgaggtcarttttgaagtgtacatatctgattgttgttttcctaactcatcacaaagtgccttatcctaagcacaacaatcgtcagtccggtggtttccagctgggtat

SEQ ID NO: 43358 - DNA, 201 bp, Homo sapiens
cgcaaattcataccactcttaaggtacacactgaacacaataactcttcagacttctagttggaaaaacaacattaggaattatctctcagaagaacagakaaataaagcattattactgatcaaattttaactcagtttcaggatctgaaaaacttaaatcacaggatgcattttaaaaaacaagtttcacaactgtacc

SEQ ID NO: 43359 - DNA, 201 bp, Homo sapiens
cttcagaaaaataaaaacatttactcctaaatctaattcagctttttgggcaagcagcgtatttagatgactctaccactggcttttcctttcttgctaawagtgagacaatcacaatgaaacataataaagaaattttctcacccattttatctatttttctgcttaccttcctgaggtcaattttgaagtgtacatatc

SEQ ID NO: 43360 - DNA, 201 bp, Homo sapiens
aatctttgttttctaggccagtgaccttgatcaggggaatacatttaataacaacataggaaatcctagtaacaaaacaattttgacacattaagaaaaaacaacaatatagaatcaagttttgctgaagtaaaatgttgcctttctagacctttaagataaatcccaaaccaggactagacagttctcaggaaggaatgt

SEQ ID NO: 43361 - DNA, 201 bp, Homo sapiens
gaagtcagattctacatttacctactgcaagattccatcgatgtgacattctggaaaagcaaaagtgcaagatcagaaaacagatgagtggttgccaaggsctagcggtagaggaagagacattctacaaagggacatgagggaatttcgagtgggtgggtatggctctatatcttgacttttatggtagtaacatgagta

SEQ ID NO: 43362 - DNA, 201 bp, Homo sapiens
tgataggtatttaactgatgcttgctgctgtacccaaatgaactgctgccattggtggtcttcagtcaagatgatttccagcctcctcccaaattgttttrtaaatgtgtgaaaactaaaaaaaaaaaaaaaactagtaaattcctgaaagggcttagctttgattaatggatatgactgggttcctacattttatctgct

SEQ ID NO: 43363 - DNA, 201 bp, Homo sapiens
atattcccacatgcatcttgttccacttctctcttgctcacttatttctcttctacctttcttacagtgtgtcctgactcccgcaaattcataccactctyaaggtacacactgaacacaataactcttcagacttctagttggaaaaacaacattaggaattatctctcagaagaacagataaataaagcattattactg

SEQ ID NO: 43364 - DNA, 201 bp, Homo sapiens
aaatcagtggatgaaagtgtaaaattgtgagaaatgtcactgtcacattaaagacttcaactgaaatcacaggtaaagctttcccaaagacacagctaacmaactgaagagcataaaaagggtttagatttcttacctcatattgcagtaagttttccatgatactacatttcttatctcataaacacaactcacacacat

SEQ ID NO: 43365 - DNA, 201 bp, Homo sapiens
attttacgcactttttttttttttctgagacacagtctcacgctgtcgcccaggctggagtgcagtggtgggatttccactcactgcaacctccacctccygggttcaagcgattctcatgcctcagcctctcgagtagctgggactacaggcgtgcgccacgatgcctggctaattttgtgtttttagaagagatgaggt

SEQ ID NO: 43366 - DNA, 201 bp, Homo sapiens
caaagaaatcacttttctaacaagaggcctgaaagagcagacagtaaaacacagaaaagacagctgggacacagaaggactggggtggacagccgagagtytcccgggtaatcaccaagcttcacacttacacgatgggccccagtaaaacagtgggccttaataagcacattcctttctctttaggcgcaccaagatgcc

SEQ ID NO: 43367 - DNA, 201 bp, Homo sapiens
tgattgtagaacctttgttgcacatcagctataagtagggatttcagcagttttaaatcagtggatgaaagtgtaaaattgtgagaaatgtcactgtcacrttaaagacttcaactgaaatcacaggtaaagctttcccaaagacacagctaaccaactgaagagcataaaaagggtttagatttcttacctcatattgca

SEQ ID NO: 43368 - DNA, 201 bp, Homo sapiens
atgattgtagaacctttgttgcacatcagctataagtagggatttcagcagttttaaatcagtggatgaaagtgtaaaattgtgagaaatgtcactgtcayattaaagacttcaactgaaatcacaggtaaagctttcccaaagacacagctaaccaactgaagagcataaaaagggtttagatttcttacctcatattgc

SEQ ID NO: 43369 - DNA, 201 bp, Homo sapiens
taaaaaaaaaaaaaaaactagtaaattcctgaaagggcttagctttgattaatggatatgactgggttcctacattttatctgctgcaatgtaatgattayattcaaaatacccctttgaaatgttcacagtccaaggaactgttactagtttccttctggtgataaagctttaggagggagagattcccatgagttccct

SEQ ID NO: 43370 - DNA, 201 bp, Homo sapiens
tcatcttctgcaacccctccatatttcaatgtgaataagagaaaagcaaaagtctgtcattaatattgcttcatagtaatataaaccatttctgtatttartgtcctttatgtcctcaaggtccttgcttgaaaatcacaagcttatcattcatccataccaagcccagctatgttgataggtatttaactgatgcttgct

SEQ ID NO: 43371 - DNA, 201 bp, Homo sapiens
cttagctttgattaatggatatgactgggttcctacattttatctgctgcaatgtaatgattatattcaaaatacccctttgaaatgttcacagtccaagkaactgttactagtttccttctggtgataaagctttaggagggagagattcccatgagttccctggatgctttcctattgtaaatggatgcaacacctgca

SEQ ID NO: 43372 - DNA, 201 bp, Homo sapiens
ttctccacttcctctgatagcaagcctaaatccaaacacaaaaatattaaatatttgtaagttagacacctgcatttgttcctccccatcatcttctgcamcccctccatatttcaatgtgaataagagaaaagcaaaagtctgtcattaatattgcttcatagtaatataaaccatttctgtatttagtgtcctttatgt

SEQ ID NO: 43373 - DNA, 201 bp, Homo sapiens
atgagggaatttcgagtgggtgggtatggctctatatcttgacttttatggtagtaacatgagtatatatgtttaccatagaaatctacaccaaaagagtraattttactgaatataaattataatactttaaaagtccctgccaactttcgtccgtttaatatacatctacaagaataacagggagcttcagcttaaatt

SEQ ID NO: 43374 - DNA, 201 bp, Homo sapiens
tgcctttctagacctttaagataaatcccaaaccaggactagacagttctcaggaaggaatgtggcagaaataggaattagtttgtaattcagaatggctrttaaggaaacattgcagaattaaaaatcaaagcctcttgtaatcttactaagaacaaatcaatattttaagagactcatattgttttaatgtaggagacc

SEQ ID NO: 43375 - DNA, 201 bp, Homo sapiens
taatgccctatatgtcttaatctagatgacaaattatataattaccttacttcttaatagaatgagaacaatacatctcatcttaccagctcaccatgagyattacatggggaaatatatctaaaatgtctgacagggttccaggcagagaacacaccctcaacaaatgttagacatgaaaacacatctcatgcccctgga

SEQ ID NO: 43376 - DNA, 201 bp, Homo sapiens
caatataaataatgtttccaactggatcctgcttataaagagagagtggatttttactgaagttgtataaataaaactaaaaatatccacaaatagtttcygaattttgaaggaatcaagtagagagaaaaagcaaatgcttccatatttgttcacaaaggattatttatcaaattattgcaaacggtagatagcttgtga

SEQ ID NO: 43377 - DNA, 201 bp, Homo sapiens
agtccttttgaataaagtttctccctaagtccagacttgtttttctttgacaaatgatacatactataatacagatgacttgaaaatgcattattgctaartgaatgaagtcagattctacatttacctactgcaagattccatcgatgtgacattctggaaaagcaaaagtgcaagatcagaaaacagatgagtggttgc

SEQ ID NO: 43378 - DNA, 201 bp, Homo sapiens
tcctgccttaacctgaccacagaccacattgcaccatttcctgctgaaacgcctagactttgcctgctctctcccacaccactaactttttttttttttttaagacagagtctctgtcgcccacgctggagtgcaggagcatgatctcggcccactgtaagcttccacctcccgggttcatgccattctcctgcctcagcc

SEQ ID NO: 43379 - DNA, 201 bp, Homo sapiens
aaattagccaggtgtggtggcacatgcctgtaaccccagctaattgaggggctgaggcatgagaatcacttgaactcgggagatgggaggttgtagcgagmtgagatcatgccactgcactccactctgggtgacagagtgagactccatttaaaaaaaaaaaaaaagtcactgaccaataagatctcattactgaccata

SEQ ID NO: 43380 - DNA, 201 bp, Homo sapiens
gacttgaatcaagagagagatataagatattcatagattggaatatgcaatattgctggatgtcaattatacccaaacaggtttagagattcagtgcaatmctgataaacattgcagtatgaattttttgtagaaataagcaaggtaattttaaaattatatgaaaaagcaaagaactagaatagccaaacaattttgaag

SEQ ID NO: 43381 - DNA, 201 bp, Homo sapiens
ggccagcctgtggaatggtcagccaattaaacctcttttctttacaaattactcagtctcaggctatttctttatagcagtgagagaatggacaggatgcmactggaattttcatgcatcatcactggaaatgcaaaatgttatgggcattttggaaaacagttaagcagtttgttatggtaaatgtaaattcaccacatg

SEQ ID NO: 43382 - DNA, 201 bp, Homo sapiens
ggaaagatgggtaagattggatgatcttaagcagtaaatatcgtttggattttggctcatataaaaatatcaacctttattctttctggttctacactaaygcaaaattgtcttaaaggttcagaatactaagacttccgtaattctttttcattgctactagggtaatgtgtaactctccccttaaaacttcccccaaat

SEQ ID NO: 43383 - DNA, 201 bp, Homo sapiens
ttggaggtggggtctggtggaaggagattggatcatgggggcagatttcccccttggcactgtgtcgtgataagagtgagttctcgtgagatctggcggtygaaaactgtgtggtgccctccctcacttcctctcttcctcctgctctggccaagtgaagtatggactccccctttgccttctgccatgaattgtaagttt

SEQ ID NO: 43384 - DNA, 201 bp, Homo sapiens
tctttgtccccacccaaatcttatgttgaattgtaatctccagcgttggaggtggggtctggtggaaggagattggatcatgggggcagatttcccccttsgcactgtgtcgtgataagagtgagttctcgtgagatctggcggttgaaaactgtgtggtgccctccctcacttcctctcttcctcctgctctggccaagt

SEQ ID NO: 43385 - DNA, 201 bp, Homo sapiens
tggagatatacttgattaaagaggatatatgaatagcaaacaagtgcataaaaacatgcttgaaataaccagccatttgagaaatacaaattaaaaccatsagtgactactacatggttattagagtggcaaacaaaacagaaaaagaaacaactgctggtgaggaagggatgtgatatggtttggatctttgtccccacc

SEQ ID NO: 43386 - DNA, 201 bp, Homo sapiens
aaagtaatagaaacaaagacagtatgatattgacaaaagaacagacacataaatcaatggaacagaaaaaaggtttcagaaacaaatctaaacgtgtatcrtcaattgacatttgacagacgtggaaagtaatcaggtaggtaaggggtaatattttctgaacatgtagtgctggaacaattgagtgtcctaatgcaaaac

SEQ ID NO: 43387 - DNA, 201 bp, Homo sapiens
ctgtagacataattgtttggcttgctacaaatccattttctgttcatgtagattctgccactgttgactccattgtcattcaggaaggcacattctccacytcctctgatagcaagcctaaatccaaacacaaaaatattaaatatttgtaagttagacacctgcatttgttcctccccatcatcttctgcaacccctcca

SEQ ID NO: 43388 - DNA, 201 bp, Homo sapiens
ataagcaaggtaattttaaaattatatgaaaaagcaaagaactagaatagccaaacaattttgaaggaaaaaaaaatggccaaatttggaaatcagggaasctgctttcgtaatttacaaagtaatagaaacaaagacagtatgatattgacaaaagaacagacacataaatcaatggaacagaaaaaaggtttcagaaac

SEQ ID NO: 43389 - DNA, 201 bp, Homo sapiens
aaagcctaataaagacaccatgaagcactgggaattatcttggtaaaacacagaatctttgttttctaggccagtgaccttgatcaggggaatacatttartaacaacataggaaatcctagtaacaaaacaattttgacacattaagaaaaaacaacaatatagaatcaagttttgctgaagtaaaatgttgcctttcta

SEQ ID NO: 43390 - DNA, 201 bp, Homo sapiens
atgagacaagggacaacatatgagcatctgaataaatgcagcaagaggatgtgaaaagcttaatattcatccacgatagtaagactcaacaaattagaaaytgaagaactttcttcaacctgataaagggcatctacagaaaaactacaactagcaacaaccttaacgatgaaagaataaatgctttcccccagtgacata

SEQ ID NO: 43391 - DNA, 201 bp, Homo sapiens
tggagatataagtgctagacattgtctttgcagagttttatctgtaaaatagaaacatcagaatctcaatctcaggaatatcgtagggagaaaaaatttakcatagaatcaacactaagatcagatgtacttcaattctcctactgccaactcctttcacaaaagggcttggttcataaatgagaataatggcccaaagag

SEQ ID NO: 43392 - DNA, 201 bp, Homo sapiens
ataccaagcccagctatgttgataggtatttaactgatgcttgctgctgtacccaaatgaactgctgccattggtggtcttcagtcaagatgatttccagyctcctcccaaattgttttataaatgtgtgaaaactaaaaaaaaaaaaaaaactagtaaattcctgaaagggcttagctttgattaatggatatgactggg

SEQ ID NO: 43393 - DNA, 201 bp, Homo sapiens
catttcacacagtgacaggcacataatggagcttaataaatatttattgacaacaaaaacatatggagaatattgtacagtttggagaacaagtaacttayctgacaaaacaatagaaagtgcaatcacacttgtagtcaggactgcaatgatgaacaagcaacaataaaccttgacaggagttactggagatataagtgc

SEQ ID NO: 43394 - DNA, 201 bp, Homo sapiens
taatgtttccaactggatcctgcttataaagagagagtggatttttactgaagttgtataaataaaactaaaaatatccacaaatagtttctgaattttgmaggaatcaagtagagagaaaaagcaaatgcttccatatttgttcacaaaggattatttatcaaattattgcaaacggtagatagcttgtgacagaaaatt

SEQ ID NO: 43395 - DNA, 201 bp, Homo sapiens
gttccgtaagcggaattcctatacccatagcctttctcatatcaatggacggcaaatgcattcttgccaaggctcaaaagaagacaggcttacctttgacrttcctctgagacgttttatccaatttgacataaaatactgttggctcagctttcaaaatatccagagtctgaccaccctcccctacctagtctcaatata

SEQ ID NO: 43396 - DNA, 201 bp, Homo sapiens
gtccttttgaataaagtttctccctaagtccagacttgtttttctttgacaaatgatacatactataatacagatgacttgaaaatgcattattgctaagkgaatgaagtcagattctacatttacctactgcaagattccatcgatgtgacattctggaaaagcaaaagtgcaagatcagaaaacagatgagtggttgcc

SEQ ID NO: 43397 - DNA, 201 bp, Homo sapiens
acacagactaagagttggcctgtgtggtcacggagtgggttaagagatgataaaaaaatctgctctgtacagatggcacacctggtcccaactaaaccctkgggccctagaaagataagacatcccctcctcacaagcccctcctcaagagccccctcctcaagagcccatttataaaaactctgacattcttaactacaa

SEQ ID NO: 43398 - DNA, 201 bp, Homo sapiens
gaagagtcctccttcaggcttttggtctacttgttctctgcctggaataggttccttcacatggttcctccatctctttcaaaaggttgctgaaatgtcaycttcctaagaaggcttagttttgtcaacctattgcaacctgttatacctccacccttatttatttttacttgtgtttttctgctggaatataagttccaa

SEQ ID NO: 43399 - DNA, 201 bp, Homo sapiens
aattatataattaccttacttcttaatagaatgagaacaatacatctcatcttaccagctcaccatgagcattacatggggaaatatatctaaaatgtctsacagggttccaggcagagaacacaccctcaacaaatgttagacatgaaaacacatctcatgcccctggaatgggatccttcttagtatttcagctttaac

SEQ ID NO: 43400 - DNA, 201 bp, Homo sapiens
agggtttagatttcttacctcatattgcagtaagttttccatgatactacatttcttatctcataaacacaactcacacacataaccatacataaacacarcaaaagatgagaagtctcaaaacatacatgttattatattccatgttgtctgtccatttccaaatgcgatgggatgattctcttctaaggccaatccaat

SEQ ID NO: 43401 - DNA, 201 bp, Homo sapiens
attctcttctaaggccaatccaatggtcagaagggcctttgtatcttttcaggaaattctataataaaacagaaactaacaccatgagcccctttctttcrtattactctggagtctctcttccctatcccttctctttttcactggcagcgtggtataattaagcagcataaattctggagtgagactaattcccagttc

SEQ ID NO: 43402 - DNA, 201 bp, Homo sapiens
catcaaagttccattttttccaacttttattttagatgtaggggatacatgtgcaggtctgttacttgcagtttttccaggggcatggtggaagctgctgmtgattccaccattctggagtctggaggatggtggccctcttctcacagctctactaggtagtatcccagtggggacataactggcaactgtagacataat

SEQ ID NO: 43403 - DNA, 201 bp, Homo sapiens
gagaaaaaatttatcatagaatcaacactaagatcagatgtacttcaattctcctactgccaactcctttcacaaaagggcttggttcataaatgagaatwatggcccaaagagggctagagataaaaatcgaattctccccacccccagggaatcttccagttactggaaaaagagtagaaattgggatgaaaaagaaac

SEQ ID NO: 43404 - DNA, 201 bp, Homo sapiens
tcttcttaccatgcctgaggcagacaatttaaggcttgattcctcaccctttcccttcatctgctgaaatcccatttagttttagtgcaccaggcatgcastggtatttcatcctatgcattccttccacagcctgacctataaagggctgacactgagtcctggcttgttcagatcagagagaattaacacttttatttc

SEQ ID NO: 43405 - DNA, 201 bp, Homo sapiens
gtaaatggatgatacaaattaatacaaccaattcattttatttggtttggttttggtttttgaatgggtttatgggtttaagagacattgctctctgttgwttatgtgtattcagtgtcagaaaggaaaagtgagcagtgtgaagtcttattagatggaagacaggtctaaggcacatggaaaactgatattcgtgatgga

SEQ ID NO: 43406 - DNA, 201 bp, Homo sapiens
tatttcatcctatgcattccttccacagcctgacctataaagggctgacactgagtcctggcttgttcagatcagagagaattaacacttttatttctttratttcaaaagcttctgaggtaacttttgagctcgtaaatgtcaataatttgttgtcaagacaattatattcttaacccagctgctacatacagggaacat

SEQ ID NO: 43407 - DNA, 201 bp, Homo sapiens
tgactatgcttctcaaaatgtaaatggatgatacaaattaatacaaccaattcattttatttggtttggttttggtttttgaatgggtttatgggtttaasagacattgctctctgttgtttatgtgtattcagtgtcagaaaggaaaagtgagcagtgtgaagtcttattagatggaagacaggtctaaggcacatggaa

SEQ ID NO: 43408 - DNA, 201 bp, Homo sapiens
tatttctttgatttcaaaagcttctgaggtaacttttgagctcgtaaatgtcaataatttgttgtcaagacaattatattcttaacccagctgctacatayagggaacatagagactgacagaaagtcagtgaatttagaattaaaacagtaagtttatctgattgactatgcttctcaaaatgtaaatggatgatacaaa

SEQ ID NO: 43409 - DNA, 201 bp, Homo sapiens
gagcctggcaggatatcttgccctgaatgcatggcccataatcgaagctttcaacaggactttttgggtgagtagataggaattaagggtccaaagaaaayttgggcactgccttccttttacattgatgacttaaagaagaagaggtacattagtaggtaaagaagaaataattaccaatttagaaagagggtacagagg

SEQ ID NO: 43410 - DNA, 201 bp, Homo sapiens
atgcatttactatagtaagaagttgagaatcactttctttcctaccaaattctcaattacttcacaagcctcctaggaaagcactaaggtctttgaataamtcagctggcccgcaggagaaaaaaggaaaccgtgcaggaattagataggaatatgttatttccaagaagggccctttctcctaaagatacatcctttttt

SEQ ID NO: 43411 - DNA, 201 bp, Homo sapiens
tgctcattataagaagtgatagctatccctctgtctcagagacaggatttgtcttattctgattgacacagctcatgttatattaagtttgtgaaatgaayacaaaagctaagataacttttgtttttaatgacttgcacctttttttaaaagaactcttagggatgttataaggataaagtaacataatagatattttgc

SEQ ID NO: 43412 - DNA, 201 bp, Homo sapiens
aggaagaccaatacatagctgtgtctccaagaatctatttccaggactccatcagaatgccaagcccttcttcttataaagtaagtcagattcatttgagmacatagagaagcctgacttttaaaatctaaaagcgtttctttaaaaattgaatacaaataacaggtttcactgtcatattacattcaaaccaaagataaa

SEQ ID NO: 43413 - DNA, 201 bp, Homo sapiens
ataagattagtgttatttggtccatagagatgccaaggtatgtcagttgtctcactgagaactagggaattcagccaaaaatggttcctgatcatgttctkccagagcaaatagtactgaagaaaatcaaacttgtcagaatagattttctgagatgtgatgagctagtgttagaatgtgaaccaactagtgcttgaatgt

SEQ ID NO: 43414 - DNA, 201 bp, Homo sapiens
atctaatttatttggtttgtacagaaaaactggtcctatgacctacttgaaaatcaaagctattacattttaatagctctgattagtttttaaaactctaytgacacaaaattgactctcccatattttccattaattggctaaattttgaaacctggaacagtattttaccttcaaccatattgctttttttcatctatt

SEQ ID NO: 43415 - DNA, 201 bp, Homo sapiens
agaaaactgtggtgcctctgtcagcctaggttcctgagtgactatggtccttaaaactaggtgtgtctcccagtacaaatggttgtgtacatatatgacakgaaaaagaaatacatttttgttttaagctatgactttaactagtttttttaaattgtttttgacagtgcagcatagactagcctatcttgactggtagaa

SEQ ID NO: 43416 - DNA, 201 bp, Homo sapiens
gtcacttctgggttaaggtagcaaaaatctcatgtgctgttggcagtttctctttctttaccatgggttcctgtctctctctctctctcttcttctaccayggccagtgaggagtctaggcatcattccagatgatgtagctagaaaactgtggtgcctctgtcagcctaggttcctgagtgactatggtccttaaaacta

SEQ ID NO: 43417 - DNA, 201 bp, Homo sapiens
aaacaatgtcacaaagtgggagaggcactaagaatgagatctggcaccacttactcttgtttctatacaatcgaagtacaacacttctcaattttctaggygtctttggggagagatcttatctctcttaatggtaccaactcagtaacccaaactgttcaccaatacttcttttaagtagttgtgaggtagggagtccaa

SEQ ID NO: 43418 - DNA, 201 bp, Homo sapiens
aaggctacctacacactaggatgcagtgttttccaaatacgctaatcttagaacactatacaaatacaaatacaaatttgcaggacattactggaaaaatmtgattccattgatctgaggtgagatagaagaagttggaatttttttaagagtatctctagtaattcttattttctggcagacttgaagaacatttttata

SEQ ID NO: 43419 - DNA, 201 bp, Homo sapiens
ggtgacggagtctcaccctgtcaccgaggctggagtgcagtggtgcaatctcggctcactgcaacctccgccttccaggttcaagcgattctcctgcctcratcaggagatggtctcgatcttttgacctcatgacctgagatggtcttgatcttttgacctcatgatctgtccacctcagcctcccaaagtgttgggatt

SEQ ID NO: 43420 - DNA, 201 bp, Homo sapiens
tattttcccttggacattttaacagctaataagccaagaaatgctatctaatttccttacacatcttttttcttttttcttttttcttttttttttttggkgacggagtctcaccctgtcaccgaggctggagtgcagtggtgcaatctcggctcactgcaacctccgccttccaggttcaagcgattctcctgcctcgat

SEQ ID NO: 43421 - DNA, 201 bp, Homo sapiens
gacaggagaatcgcttgaacccagtaggcagaggttgcaataagccaagatttcaccactgcactccagcctcagcgacagagcaagactccatcttgctraactaaactaaaataaaataaagtagcaagacctctgtgattaaaaacaatacattgaaaaaactaatcattcatgaggaaatactctgtagtttatagg

SEQ ID NO: 43422 - DNA, 201 bp, Homo sapiens
tgagacaggagaatcgcttgaacccagtaggcagaggttgcaataagccaagatttcaccactgcactccagcctcagcgacagagcaagactccatcttrctaaactaaactaaaataaaataaagtagcaagacctctgtgattaaaaacaatacattgaaaaaactaatcattcatgaggaaatactctgtagtttat

SEQ ID NO: 43423 - DNA, 201 bp, Homo sapiens
ctgagacaggagaatcgcttgaacccagtaggcagaggttgcaataagccaagatttcaccactgcactccagcctcagcgacagagcaagactccatctygctaaactaaactaaaataaaataaagtagcaagacctctgtgattaaaaacaatacattgaaaaaactaatcattcatgaggaaatactctgtagttta

SEQ ID NO: 43424 - DNA, 201 bp, Homo sapiens
cctgaaaagatccattttattctgactcaggtacaatataagacaggaaaatggatgttatatacatagatcatcaatagagaataggaagaaaaagatamcgattattttgtggtatcattgtatcatgactctgaataatatctatcaattactgattactcactatgtaccaagcccagtaggcactatagaaatgta

SEQ ID NO: 43425 - DNA, 201 bp, Homo sapiens
agtagagaaattactggactagacctggagctgtggattctggcctaaacactgtcattggcttgtaatgtaattttgtgcagttttctcatatataaaayggaagtaataagctcagatctcaattaggaaaagtaccaagatactagacgtaaacatgctttggaaaacattggagcacattaacatatatagcattat

SEQ ID NO: 43426 - DNA, 201 bp, Homo sapiens
cagctaagcctaatatgggaaacaagtcaatattttccagcatgctgggtccattttctccccccaatatttttaagcataagacaggtgcagaaatcacrtcaaccaccactggaggggtgtacagcagctgtcacacagccacacagtggcaaaagtctttgctaagatccaaaatgaaaagaatactcattgtaattg

SEQ ID NO: 43427 - DNA, 201 bp, Homo sapiens
gaaattttaagtaatatattgaagatcacagagatagggcatgaaatggaatttgaacccaagtctttcttgctcctgaatccaaattcttaaccacactattggcttttgttcctctccattaatcctgaatgtgatttatttttttcccaaaaaggaaactggattacttgacctgctgtttgttcagaatatttattt

SEQ ID NO: 43428 - DNA, 201 bp, Homo sapiens
catagaaattttaagtaatatattgaagatcacagagatagggcatgaaatggaatttgaacccaagtctttcttgctcctgaatccaaattcttaaccayactattggcttttgttcctctccattaatcctgaatgtgatttatttttttcccaaaaaggaaactggattacttgacctgctgtttgttcagaatattt

SEQ ID NO: 43429 - DNA, 201 bp, Homo sapiens
caagtgatccttccaccttagcctcccaaagtgctgggattataggcataagccaccatgcccaacctgtttgattattttctatgtgtcccacttctctwatcgaattttcttttccttcactttttttagtccaccttttaagtccttgccagttacctgtaatatctggatcatctatgtatctgcttcaaatgtata

SEQ ID NO: 43430 - DNA, 201 bp, Homo sapiens
atatcttttaaatggcttactatgtttgaggcattgcaataatgtgtcccttaacgtatttaattcttacgacaaatctatgagataggtactgtttactcatattccggatagggaaactgggcatagaaattttaagtaatatattgaagatcacagagatagggcatgaaatggaatttgaacccaagtctttcttgc

SEQ ID NO: 43431 - DNA, 201 bp, Homo sapiens
cgattcagggtatgccgtcttgtttttcatttgatgacattaggatatcatacctaatggaaaaattaattgtgtgtgtatttatgtgtgtgtgtgtggakgcacgcacacatgcatgtgcatcatgatgatgtactacttaagcaataatgggccattatagaaggtaaatcaattaattctaagttgacattgtcatag

SEQ ID NO: 43432 - DNA, 201 bp, Homo sapiens
tttattaattatttttttgagacacagtctcattctgttgctcaggttggagtgctgtgcacgatctcagcgcactgcaatctctgcctcccaggttcacktgattctcatgcttcagcctcttgagtagctgggattacagacatgcaccaccaagcccagctaattttttgtatttttagtagagatggctttttgcta

SEQ ID NO: 43433 - DNA, 201 bp, Homo sapiens
gctttttgacaaattatattttataaccaaatttaactcttacataaactattttctgatacaaccaaaagcatttttcttccccattcaactctaattgkatattattattattttacttctatagccattaaaattttctaacttgaattatatttacttatatctataattatcttcctttcagggaaattttacagg

SEQ ID NO: 43434 - DNA, 201 bp, Homo sapiens
gagacagatgtcacttttatactcaatctaagagctactacctttcaacagctcatcaggaggtaaaatcaaatcttcagagacaaaagacataagcaacrcatctgtagcagccagaaagtaaattttttaagctacgaagggccttggagacgattcagggtatgccgtcttgtttttcatttgatgacattaggatat

SEQ ID NO: 43435 - DNA, 201 bp, Homo sapiens
ggtgtacagcagctgtcacacagccacacagtggcaaaagtctttgctaagatccaaaatgaaaagaatactcattgtaattgaaactatgcaggggacaragcttcccagatgcatacaaaagttctgaggctttgaaaagagacagatgtcacttttatactcaatctaagagctactacctttcaacagctcatcagg

SEQ ID NO: 43436 - DNA, 201 bp, Homo sapiens
tgtctgttcgtattagaatcattttatgacaaatggaataattcagtaaccactttaatttaatactgcatgtttaatatttattgagcaataaaccatayactaagcaaaaagttactaaccctcccccaccaaaaatgatttgctcgtattcactttttcccttatctaatgctgcaaagataattactttgtccctat

SEQ ID NO: 43437 - DNA, 201 bp, Homo sapiens
agcatgtcatataataaatcttagcaaactatatggagaaatataccacagaagtgaaacaatttttaagtatgtgtgtatatttatatatttgtctgttygtattagaatcattttatgacaaatggaataattcagtaaccactttaatttaatactgcatgtttaatatttattgagcaataaaccatacactaagca

SEQ ID NO: 43438 - DNA, 201 bp, Homo sapiens
atgcccatgatcctatgacatgaggtaagaaattcaaggcaccatggttccctctgacacctgataaactgtatgtatttattttttcctagaaaaaaagsgtatttgacacatatcgggagacacagtttcaaatcccacgttgaccatacacatgctgtatggccttgggcaactcctttgagtctctgtttcatcatt

SEQ ID NO: 43439 - DNA, 201 bp, Homo sapiens
atatgaggcaagaagaactttcaataaagaaaatgcatgtaactgcccagaccctccttggagttataaaagagccatataatttccacagcttccatatrccaccaacacttatggtcctacatagcaagtcccataaagcctcagtagacatgtgacatcccgaaaacagagcaatgcccatgatcctatgacatgagg

SEQ ID NO: 43440 - DNA, 201 bp, Homo sapiens
gacagtaatttcaatctcacttttacttcacatacattagatgtggtaacttcttttcagtcagagggacagatgaattctctaggaaatttatatgtacrtatttgcaggtacctttaagctagttctgaggagaaaaaagttatatgaggcaagaagaactttcaataaagaaaatgcatgtaactgcccagaccctcc

SEQ ID NO: 43441 - DNA, 201 bp, Homo sapiens
tgacagtaatttcaatctcacttttacttcacatacattagatgtggtaacttcttttcagtcagagggacagatgaattctctaggaaatttatatgtamatatttgcaggtacctttaagctagttctgaggagaaaaaagttatatgaggcaagaagaactttcaataaagaaaatgcatgtaactgcccagaccctc

SEQ ID NO: 43442 - DNA, 201 bp, Homo sapiens
atgttgatttttattcaatggctcatctattctgatatttcagtttcttaaaatatttatgcaaagttttgtttggattacttacatacgtagcacaaatkattctttatttgccatggtgacagcacaaatcacattatttgcagaggttggggagtcccacaaatcagcccccacaacaacaaatatttatttattgaa

SEQ ID NO: 43443 - DNA, 201 bp, Homo sapiens
gcttccagttactgcagcaaaacctaagaccaccttccctctgtagctcgagtgggagacattgttctgctgtctctctaggctctttggtacgctgaggstgatgtgattgcccagactcgtgtcctgcatggaatttaaactacttttgtaacagcaaaaggaatttactgacttcctctcagattgaaagcagaaatg

SEQ ID NO: 43444 - DNA, 201 bp, Homo sapiens
acctgcaggtgtgagggctagctcttgggagatttcatgcctcaaggctcactttctttctttttttttttttttttctgtgcaataagatctgggtccayttccaacttttctccctatagctcacatacttgaagtgtgccaagaacaccagatatggcaacatcccacagatgatgaatggtatgaaaatggcctgag

SEQ ID NO: 43445 - DNA, 201 bp, Homo sapiens
taatcagtggctttacaatttaagttagtttacaatgaattaaaggaactcctttttatgcagagggttttaaaaaatcaggttttcaatttttcaaatgrtcttttaaaaacatttctatcataacaaatgtgggttaccaaattataaggaattagaatataatcatatgctttagtatcaaaactttatttaatataa

SEQ ID NO: 43446 - DNA, 201 bp, Homo sapiens
atgtgcatgttaagtgaagggaaacaagctctaatggtgccctttaatgttctgaagacacaggtgttctctgtgaacttgacatttgctcggtctacatstgatcctaagggttccagataagatgaattactgtgtgaaagtcctcaggcattttctcacagataaatagcatgaaattttgtgatggagagagaacaa

SEQ ID NO: 43447 - DNA, 201 bp, Homo sapiens
tgtttagatctacttgcttagtccactgcttcagaaatcagcactgctttgtttaaaagataattattgattgctatgttatataataatcttccaagacmgttacagattaatctgaatacctatgacctcaatctgaatttctatgtcttagaagttttggagatagccaacccaccaatctgtcataaagcatattag

SEQ ID NO: 43448 - DNA, 201 bp, Homo sapiens
ctatttttttccaggaggattttggaaactcgaaattcttaaaagaactattttaacaaaaataaattgaaggaaaccgactgattttaattttagagatyattgctttcaaatatatgatcttcaagtcctcttgaattttgagctattttgaaatcaagttctatttgtataaggctttctctctgaggcaaagtgtta

SEQ ID NO: 43449 - DNA, 201 bp, Homo sapiens
aattactctgttcttagagttctgcaatgtcacaagatcataaaatcctgaatcaagaaggacagatcagaggtcattttgagcagcctcttttattgggmcacaaaacatgcttatccccatgcaataatggcattctaattccagtctttatcaatagtaacaataactttagcaattactttttaatctcagaattct

SEQ ID NO: 43450 - DNA, 201 bp, Homo sapiens
ttatattcataaccattcttaataatatgtcccttctgagcttttattatcttctcttatgaatggatggcagcagggatattgtaacttatctcaattgkaagttaagctatgtaggattcatctctgttcacttacagagtctaacaatttatcccctctataagtttcacaatagtcttaagtttattgaactcaaac

SEQ ID NO: 43451 - DNA, 201 bp, Homo sapiens
ggcatttgtaacacaatggtatttgtgtagctacgcatatctaaacatagaaaaggtaggataaaaacacaatatcataacttgtgggatcaccatcatayatgtagtccctcattggccacaacattgttattgtagtgcatcactgtatattttagggagagggctcttctcgaaattctcaaattatgcccacttggt

SEQ ID NO: 43452 - DNA, 201 bp, Homo sapiens
tttattcacagtagaacttctttcaaaattgaagtcaatcctctcaaactctgccactgcttcatcaaataagtttataagtttatgaaatattctaaatyatttgttattatttcaacaatattcacaacatcttcaccaggagaagattttatctcaagagacaactttctctgttcatccataagcagcaactcctca

SEQ ID NO: 43453 - DNA, 201 bp, Homo sapiens
ttgccctaccctttcccatgctctaccactggcaggttctcaaagtagcccatgcttcccaatctctgtgcttttgatcaagcaatttcctttgtgagaawtgcccttcctccctcccaagtcctccagtcaatttctgagcttttccagaatagatcaaattctgctcactccagatgtcttattaatcttttccttccc

SEQ ID NO: 43454 - DNA, 201 bp, Homo sapiens
atgattttggatacttaatactaccaataaaatctaaataacaataatttatgattcttttgcatttgagggaaatatcacagccaggcatggtagaataygggccttagaaattaagacctaaattcaagttcctttgacacttgctaatcaagtcatcacaggtacatttcctggcttttctgaatttgaagtttctca

SEQ ID NO: 43455 - DNA, 201 bp, Homo sapiens
atctggtattttagactccattaagactcgccattttgtagctgaccaaaagggtcattctttagtcccatttaaaatcggcatttcatcatttcaaaaakcctgcttcaatctaagcaaattatcatgtgattctgcaattgatagctagctcaataactgatttatttgataagagggaacacttagaaaatatacagc

SEQ ID NO: 43456 - DNA, 201 bp, Homo sapiens
agaagttttacaaaacatcagtcctttgagaatttctatacattgtacaagttatttaaaatctgccaaatgttacaatatgaaatgtaaaactaggaaayccaaatgcaacaagtggaaaacatgggctcagctaataccacaacacactgccaagatggaactctccacaaggtctatcttcctgctacttctgtcctg

SEQ ID NO: 43457 - DNA, 201 bp, Homo sapiens
aaattaagtacattcattgtatttcaatatttctctagccattctttttggttgaaagtgtgtgtgtgtctgtgtgtctgcgtgtagatatggggcattamggcaggcaaacttagaacacaaaatataaaaattgggtggggaaacatctggatgacctcaatatttacctaacattcttctttgcaaatgttctgaatt

SEQ ID NO: 43458 - DNA, 201 bp, Homo sapiens
tattcagctgcaactatttaatccttacaaaaacaaaaaagcatgagttcatataagggccacactgtgtgaggggcatagagagagattttagaggcttygcacagtgcagggagtttggtcttaacccattttataggtaaagaaattgaggtgtaatcacatgagacagaatttgaattctgatctgtcggattcagc

SEQ ID NO: 43459 - DNA, 201 bp, Homo sapiens
gagtccactttgaacgcaggaatcttcacctctttcctttcaactgtatggaatttgaatctgacaaacaacctgtctgttgctagaatttataagtgatytgaaaaaaaatcaaaggccataaaagctatttgtcaaataaactgcagaacacgatatcagtctgcagggctcatttgcagaactcatgatgagcatggg

SEQ ID NO: 43460 - DNA, 201 bp, Homo sapiens
gaacacagaatactttgctttaccaaaacagagaagaaatgggatttagtctctaaacttcatgtgagtttttttccatttttattaaccccagtacacayagtgctaccacagcatgtagttaaatagtcccagtgccacagtcttgtaagcaatacttatgcaagatatattgcattgaaatgagtttgtattttccaa

SEQ ID NO: 43461 - DNA, 201 bp, Homo sapiens
tgcctatttggctcagctgtctgtcgatttttctaggttatgagattgctcttggtgacttttgacaatatgagaacacttccctcacctttaatgatgargcaaggggctccatacacataacattagatagacgagaattccacgaaaaaggataagccatccaatatgctagcatagaccaagatcttaaaataaata

SEQ ID NO: 43462 - DNA, 201 bp, Homo sapiens
tgcatgcaacacactgttctaagtaacatacagatattaaaatgacttaattctcaaaacatgaagtgagtttttgtttttatgcccgttttgcagatgaraaaactgaggcatagggaaggtaagtaacgcgcttaaggttacatagctggtaaattgtagccaggagttggaatctaggtgccaaaatctatgctgtta

SEQ ID NO: 43463 - DNA, 201 bp, Homo sapiens
ttgtgtgcatattctaatatgtatctttgtttctaaatagttgatgcattctagcttaatccttaataagaaaggacagcttcattacaaaacaaattccycattggcagataagcagatgagagggagaatatttaacattactgataaagaatcaagttatgttctagattcatgcagagttttatagaattggtgcaa

SEQ ID NO: 43464 - DNA, 201 bp, Homo sapiens
gctggcaagatccttccttgtccgttttagtgcattcataatactggtcattttcctctcatacataatcaacccattgaaatttaaataccacaatcaaygtgaagcttgaactccggtttaatataatacctattgtataagaccctttactgattccattaatgtcgcatttgttttaagataaaacttctttcataa

SEQ ID NO: 43465 - DNA, 201 bp, Homo sapiens
ttctctatttggaagtagtatccatattgaaattcctccatccagtggtgcccagagctttcttggtttcttatgcgttatcaaatatctgctcccagagygagagcaggattactgtcccttccaagggcactcacctttaaatagagatgaaagtcttcagctaaaggtaagaaagttatatattaagagcaggcatag

SEQ ID NO: 43466 - DNA, 201 bp, Homo sapiens
caaattaagtctgttcgtggaagacttactttgatttcatggtgtaggagggagatcgtagacttcgaatccactagacctgaagttaaataaacctgggstgcagttttggttagcctggtagcacggcatggtatcagtttcctcatctgtaaaatgggaacaatacttcatgtcccagcacaattttgaggataaatt

SEQ ID NO: 43467 - DNA, 201 bp, Homo sapiens
gcaattgtgatgggatgtgaagaacagaaatcctggtgatatgaatgttaaccaataaagttctcaaacttgccatttagcgcattcctgaattctctgayggcataaataccacaaagtagaagtacaactttactctaagctctaagtcctgtattactcaaaagttcttcaaatcttaaactgctaccaagaatgaat

SEQ ID NO: 43468 - DNA, 201 bp, Homo sapiens
tttttctctctcctgcttctctccataccatttggctcttcttatctctgttctgcatctttagctggagtggaggctgcacttcccttgtcccttaacakgcatatcaaaaaatgaatataagggccaataggaaggctacctgtgaattgtagcaatgttttagcagaagagaaaggatgttccacagaagtgattcct

SEQ ID NO: 43469 - DNA, 201 bp, Homo sapiens
tcaggtgcatattgctacaccaatatgtgaactacatgatgacagcactatttacaaaatagaaacgtttggttcatcagcaaagtaatttttagatgtgrtatcagagttcctttattgttaactccccctgtcctgggtttttatttttctctctcctgcttctctccataccatttggctcttcttatctctgttctg

SEQ ID NO: 43470 - DNA, 201 bp, Homo sapiens
cagagcatctacaaaccagaaaatctgagttctaggctgttttctaatgattcttagacacatatcaatttctaagatcataaaatgaagatacttagtaygactacacctgcctatcttctaggcaggcgtcaaggacattgtaagccataaatcaccaaaaaaaggcaagaaattatttttatcatgactaaaaatttt

SEQ ID NO: 43471 - DNA, 201 bp, Homo sapiens
agaagcatctttaccaccgccaccaccactatcacttccagcaagtttctgctcacatatcagtagctgctaggaattttccaatgcttttgtatagccakgcaagaaagaagagtgttagcaagagctttcgactcagccaaccaacaatgtttgccataccccaaatgctgaactcctccacagaaaggatttgagcat

SEQ ID NO: 43472 - DNA, 201 bp, Homo sapiens
tttttacagggtggctattcaatttttttttacttataagaacaataatgtatttgttcataattgtgtgagttagcaaggcaattctcatcggggctggyctggctcatctctgaagtcatctgccagttttgaaggggattgatggtctaggatagccccattcatttgtctggctcttacaagcttgttggatttaga

SEQ ID NO: 43473 - DNA, 201 bp, Homo sapiens
taaaagggaaaacctgaaaacataaggtaaaggcttttttctgaaacccttgccagtgtttccctgtaaatgttacagccttcaaagaccactcaacattwcccaccattttaaaatccataatttattacaaataagtatagtagaaaggttctattccatactgaatatattaataaaaatagtatttttaaaaaaaaa

SEQ ID NO: 43474 - DNA, 201 bp, Homo sapiens
ttgagtaattatgatgccatcagcacactataagatgtaaacattttaatggtgaaatatttaaaataaatatctttgaatgttcaaattctgtttgatayatttgttctctttatttcctcaaaattacagtcttaaattttttttttcttttgagatggagtctcgctctgttgcccaggctggagtgcagtggcaaaa

SEQ ID NO: 43475 - DNA, 201 bp, Homo sapiens
ggtgcatgccactatgcctggctaatttttctatttttagtagaggcagggtatcaccatgttggctaggctggtctcaaactcctgttctcaggtgaccygcctgccttggcctcccaaaatgctgggattacaagcgtgagccatcgcacccaacctactccatgatttttttgattatttattttgaaattattcagc

SEQ ID NO: 43476 - DNA, 201 bp, Homo sapiens
acaaaattagtaagactgaatttgttactatttactcgccaaaccctcaaggtagtttcatagagataatcacaaaaacaggaaatagtacacaatgtggkattggtgtttttcctacaagctccttttcctatggattattttttttccaatggagagaaatgcttttttacctggataataaattaaaaagtggtttct

SEQ ID NO: 43477 - DNA, 201 bp, Homo sapiens
tttatatatattatatgtatacatatcatgatggtgaatattcataaactgaatacatctatgtaagcaatatctaaactaagaaacagatattacaaggkgtacagcagcccgccccaccccaccccaccccaccccacccagtccctgcccagagtaaacactatcctgacctaaatacatagattagttctgtctgtt

SEQ ID NO: 43478 - DNA, 201 bp, Homo sapiens
atatatgaaagaaacagaaaaagaaaaagaagaagacaaaagaagtggcatgagtttaagaggaaatgggaggtaaactggcaacagtgaaagtaggctayagtctcaaacttgattagtaaagaaaaaagaaaaatatgcagatgaatgatcaaagtatacccttttttaaaaaaattagagaatctcagaattaaaaag

SEQ ID NO: 43479 - DNA, 201 bp, Homo sapiens
aggctgtattacccccaaagaaaaggacaaaattagtaagactgaatttgttactatttactcgccaaaccctcaaggtagtttcatagagataatcacaraaacaggaaatagtacacaatgtgggattggtgtttttcctacaagctccttttcctatggattattttttttccaatggagagaaatgcttttttacct

SEQ ID NO: 43480 - DNA, 201 bp, Homo sapiens
cagagggtggttgattttaacatacatttgcaatgcatcagccaaagtgcagcataaaacggaagagaataaactgtgagactataccttgcacatgtttyttattgcatgagtaagttctatatcaggtctggaatttctgtactcaaaggacttatattctgaagcaacaattacaaatattgagtggaggtaatattt

SEQ ID NO: 43481 - DNA, 201 bp, Homo sapiens
aacaaacatatgcagtcttttagctacaacactcaaacataattacaatgcccctttccattgaaataatctatgcatcccgccacagtgacttcattccytaccaggatgcctgctgaatcagactgccccaattattcaggcacagtgcctatgcttatgactaataatattggggaataaacgaaattaatgtccatg

SEQ ID NO: 43482 - DNA, 201 bp, Homo sapiens
ataagtaattatttcttatctataatattctacttatatatcaaactgccctcgcctttgccaaagccctcagtggacaaataacttcaaataactactawttctcagagcagtgcaagtcatctaggatcattgtttacattctatacatattgaaaggctttctgtaaaagtgagaaatgttttaatttttaatgatag

SEQ ID NO: 43483 - DNA, 201 bp, Homo sapiens
agtcaaacagttcccaaaacttttagatgtgatggcaagaataagagcagaagatgatctgcacatcaaacagctttttcgtctttgcttagtgtcaagcrtttggcaaaacaaccctttgtattatttcagcatttcagaggcctaattttccatagttgtgactcacatatcctattcataggcagaggtcttataaaa

SEQ ID NO: 43484 - DNA, 201 bp, Homo sapiens
gcttcacagggaaacccacatttaaaccaagtgtcaaattagtaggtaatcaatcaccaagtgaagaattaaagaacatcctagtaagagaaataaatgcygggttcattgtgcagaatgtatcagctgagtatcaaattagaagacaaatctttttggaaactatttagagaaataatgagagctaaactaagctgagtc

SEQ ID NO: 43485 - DNA, 201 bp, Homo sapiens
gtcatttacttgtataacctgcatcacctcaggaaggtgcatatgaggttacatcaatatcaagtgagagagcaaggattatgtggtggcctgagtgaatytgctcatgctcctgggtgcaaaagagtgggaactgactgagactgattatctttattccttcttgacagcttaattaagttctctaattagtcacagtca

SEQ ID NO: 43486 - DNA, 201 bp, Homo sapiens
tgtggtgcctctgtcagcctaggttcctgagtgactatggtccttaaaactaggtgtgtctcccagtacaaatggttgtgtacatatatgacatgaaaaaraaatacatttttgttttaagctatgactttaactagtttttttaaattgtttttgacagtgcagcatagactagcctatcttgactggtagaacaaacta

SEQ ID NO: 43487 - DNA, 201 bp, Homo sapiens
gaaaaggaagctatgacattctgaagtttggcacctcgtaagtgcccactactattaattgcattgaatatgaactgaactgtgggttcactaaaagcatrcttctggagttaggaggccttggcaaatgaggctaaaaattaactcacacattcaaagccatctatttttaaaatgcatgataagcaacacaggaagctt

SEQ ID NO: 43488 - DNA, 201 bp, Homo sapiens
acaaacaaaaggagtgggtaaagagatgtgtatatatatacatactgaaagaactttttctatatatgagtgaatagcttacctaacgtaacagtctttayataataagactacttatttaaattttaaaagaatttacctctagatgggtttttgagtgaatttcctcagaaaattcattttcatggcacagaggattat

SEQ ID NO: 43489 - DNA, 201 bp, Homo sapiens
ttgtagatttaataactagtttaccactgtaaattttaaaacgccaactgccagtctcctgctcaaaagttgttgcctcacctccatcccatggtactttytggactacatatcataaatctatttgtataagtatttcaagttcatgcagattagagaaatgtgattgatatttatttttctagtacgtatttacataaa

SEQ ID NO: 43490 - DNA, 201 bp, Homo sapiens
gggacatgaaattatgggaaaaaagttctttctttctcctcactctttgagaatgaatcttctgtaattctcagtatcttctgagcacagatatataattyttgtagatttaataactagtttaccactgtaaattttaaaacgccaactgccagtctcctgctcaaaagttgttgcctcacctccatcccatggtacttt

SEQ ID NO: 43491 - DNA, 201 bp, Homo sapiens
agatattaaaatgacttaattctcaaaacatgaagtgagtttttgtttttatgcccgttttgcagatgagaaaactgaggcatagggaaggtaagtaacgygcttaaggttacatagctggtaaattgtagccaggagttggaatctaggtgccaaaatctatgctgttaatcactaaactacgctgccttagtttttata

SEQ ID NO: 43492 - DNA, 201 bp, Homo sapiens
gaagtgagctgagcgtgtgcgcggtacggggctctcctgccttctgggctccaacgcagctctgtggctgaactgggtgctcatcacgggaactgctgggstatggaatacagatgtggcagctcaggtagccccaaattgcctggaagaatacatcatgtttttcgataagaagaaattgtaggatccagtttttttttt

SEQ ID NO: 43493 - DNA, 201 bp, Homo sapiens
taccacaaagtagaagtacaactttactctaagctctaagtcctgtattactcaaaagttcttcaaatcttaaactgctaccaagaatgaatagatgcccmaaatatccactttggggctggatattctgctcaaattaatgaatagactcttgttaaacatatatgccatgaaaactgactatgtgcaagttaaagccta

SEQ ID NO: 43494 - DNA, 201 bp, Homo sapiens
cttttctgtttcccaagcaaaaatcagaattgaacaggaaccaaaactattgagaccttccttctgtttcccaagcaaaaatcagaattgaatgggaaccraaactattgagaccttcctacccacctgtgattaaatgagccaaatgagtagcaacgtggcagatggccctacagttaatgagattcttgcaagcccgca

SEQ ID NO: 43495 - DNA, 201 bp, Homo sapiens
tatatatatacacacacacacacacacacacacatgcgatgacgttcctgaaaatatgatcctagataattaagagaatggggagttgctattcaataggyataaaatttcagttatgcaagatgaataagttctagagatctgctgcacaacatagtgcctagagttaacaatattgtattgtgggccaagtgcactggc

SEQ ID NO: 43496 - DNA, 201 bp, Homo sapiens
ttttaagatctcttttacaatttgataggtcaaagctgatatacttcaaacttgattgctggtgagattgaattttttgtttgtttattaactatttgtayttcttttgtgtgagctgcctcacatttgaggagaaaagctgcctctcacaacattcataaggcttcctgaccctagagaccctctatatttccacaacat

SEQ ID NO: 43497 - DNA, 201 bp, Homo sapiens
acacagttgatcacattctccttcttaacctaccatcttcattacattcaagcatgccactcactggtgattttcttccaacctcactgggactctcttgwgaagttctcttttccatttcatcttaccaacctcttaatgttggggtgtcccaggttagcccttggaccttctcttttgtgtgtaaatttactcctttag

SEQ ID NO: 43498 - DNA, 201 bp, Homo sapiens
gtgatttctattgttttgtatagtctctgatctccagttcatctcattctctctcttactcactccaaaattttgctccacaattctaccaaaactgctcyccttaaggccatcaataaactccacattgctcagtctaaagtcagttctccatcctcctcttacttgaactgtcagcactatttgacacagttgatcaca

SEQ ID NO: 43499 - DNA, 201 bp, Homo sapiens
aactttagttttaattccactttgtgactgcccttagaaaaggggggatggtagggttaggaatagtgacagtgttgataaagcataggagaaggaaaggmtctgtagaaatcttgagagtgaccctaaaatgggaatggttcttaagtttttttgctaaggactactagttaatcacaagggatcctttctgagaacaat

SEQ ID NO: 43500 - DNA, 201 bp, Homo sapiens
ctgcatagcacaggggaaaggagcaaagtccacctgcatcataatccacaatcacagagacaaatgtaggaagaccaatacatagctgtgtctccaagaayctatttccaggactccatcagaatgccaagcccttcttcttataaagtaagtcagattcatttgagcacatagagaagcctgacttttaaaatctaaaag

SEQ ID NO: 43501 - DNA, 201 bp, Homo sapiens
attactagttgacattgcagtgtgtagctatttttattttttaccatctcatcaacaagaatgcaagaagtcctccagtggaaggcactttgtcttattcwctactgtatccccagcacgaagaacagtgtaagagtttaataaatactcattgaataaacaagttaattttatttttattaaggatctgtggcatttgct

SEQ ID NO: 43502 - DNA, 201 bp, Homo sapiens
taaatactcattgaataaacaagttaattttatttttattaaggatctgtggcatttgctacccgggactaagtaaatttttgctcgagttacaatattgscacatgggggctctgctgttagttgcaagagtatcctaagcattccccaacattcttaagggaactgttcaactgggaatggccacagctacagctacca

SEQ ID NO: 43503 - DNA, 201 bp, Homo sapiens
tgttgagtccaaatgtttccttacctagtctttatgcaatctcgcatttagattttcatcaaatcttttggctctactgccctccaaggccatatgcaaaratgttgcctctgtctagttcatttgaatggaaatccatttgctattgtttgggggctaattttgcaaatcatttcataactttctgttcaaaaactacct

SEQ ID NO: 43504 - DNA, 201 bp, Homo sapiens
gtacaatgtattttacaattatactttctaacaacagaacttctataagcaataataatccattttattgaaaaaaaagaaaaacagcttctatcttatcmtttccagcaaatgttgtaatgataattaataactttattaacaattctccatgttttctttttatttttaagggctctcacttctcccaatcaggattct

SEQ ID NO: 43505 - DNA, 201 bp, Homo sapiens
aggagaattgcttgaacccaggaggcggaggttgcagtgagccaagatcgcgccattggactccatcctgggcaacaagagcaaaactccatctcaaaataaaaaaaaaaaaaagtcactatggccaatatgaaaattaggacctgttaggttgaaaacatccagtctgcagtgagtataggattaaacatgattggagta

SEQ ID NO: 43506 - DNA, 201 bp, Homo sapiens
agttacgcttctattcagacatagggagagagagtgtaaatgaattatctcctccccacagcctttctacagacccttctctcttaattatacacatcccyattgcacaggtcctgccaagcgctggtatccacagggtagatgttgaaaaaagttataattactatcttcagtctgctgctattttacaccctcagactc

SEQ ID NO: 43507 - DNA, 201 bp, Homo sapiens
aaacatgctttggaaaacattggagcacattaacatatatagcattatcaaagtctttccaaatttcttatcatataatacatggtaaacaacaaaatagwaggaagacttcctctaacctctgaaaagtcagaaacttttcctaggtgcctttggtattttctaatcttactctgagtattgtttccctgaaaagatcca

SEQ ID NO: 43508 - DNA, 201 bp, Homo sapiens
aaaacacacacacacacacacacacacacacacacacacacacacacacacacaaagatagtcactaacacacagcagcatgtaagaagtgtcaagagagragtaaaataaaaaattgctgtagttagaggagggtggttgtacaaggttttggttttgttttgttttctccaaagtcttcctacagcatgcagaatttaa

SEQ ID NO: 43509 - DNA, 201 bp, Homo sapiens
gcacagatggtattttacatctgcacatgcaatttcctttttctccatttttatataaacctctctctttttttaagaatgatagaatttaccagtaaaakgcagaactacttaattgcctctagaaatgttcacacctccatttcacatttttagcagcaatttaactgcctttaagtatatgtagaaagatgggagggt

SEQ ID NO: 43510 - DNA, 201 bp, Homo sapiens
ctcccttttgcatattaagcaatatctgtgtaattgattctctctcttttggtacttaaagatgcatttggcacttgagaaagctatcttcagcttctaayagtaagtttgtttcctagagctgtttggtacctgaacaattcagatacatttgtagttactaaggctcagagaagagggatacaaatttggttgttttgt

SEQ ID NO: 43511 - DNA, 201 bp, Homo sapiens
ctacctcccttttgcatattaagcaatatctgtgtaattgattctctctcttttggtacttaaagatgcatttggcacttgagaaagctatcttcagcttytaacagtaagtttgtttcctagagctgtttggtacctgaacaattcagatacatttgtagttactaaggctcagagaagagggatacaaatttggttgtt

SEQ ID NO: 43512 - DNA, 201 bp, Homo sapiens
aggctgaggcaggagaatcacttgaacttgggaggtacaggttgcagctcagatcaccactgaactccactctgggcaacagagcaagacaggaaaaaaawatatatatgtaaaaatatatatgaaagaaacagaaaaagaaaaagaagaagacaaaagaagtggcatgagtttaagaggaaatgggaggtaaactggcaa

SEQ ID NO: 43513 - DNA, 201 bp, Homo sapiens
attttctgatacaaccaaaagcatttttcttccccattcaactctaattgtatattattattattttacttctatagccattaaaattttctaacttgaaktatatttacttatatctataattatcttcctttcagggaaattttacagggaggaaaaaatcttacattttttttgtatcctaaacatgcttaaggcagg

SEQ ID NO: 43514 - DNA, 201 bp, Homo sapiens
cacgcccggctaattttctgtatttttagtagagatggggtttcaccatgttagccaggatggtctcgatctcctgaccttgtaatccacccacctcgggytcccaaagtgctgggattacaggcgtgagccaccgcgcccaacccactttaactcttttcatacaaatttatctagagaaaatgtccttctaagaataga

SEQ ID NO: 43515 - DNA, 201 bp, Homo sapiens
ctttcgagaataaatacttagacacctaatacgtatgaagtcacacagataattggcatgagccaaatgagggttacttgtactctatataaactcttacrtactctcttatcagtagaaatttctattgagaggtggcttggagaagatctctaagttgctgaatcccacaaagactttaaaaaggtagaaaattctaaa

SEQ ID NO: 43516 - DNA, 201 bp, Homo sapiens
tatcaacaaaaatcctagatgctatgattaagcccaataaagagaaaaaatgagagagtcatattaaaaaaacagagatacaaaataaagaggaaaaaaaygagagaatcacacacaaaaaataatagagatacaaaagaagttatctagtgaggtgtttttaaaagcacatgaacaaaagatcaaaaaaaatcaaagaca

SEQ ID NO: 43517 - DNA, 201 bp, Homo sapiens
tgacctcaatatttacctaacattcttctttgcaaatgttctgaattgtctcatcaattctgcatcatctctgcccccttatacacttttccctgcattgyctggaagctacactcccagaatttcttaccagcatggttccaaatttgattctgctaatgaggtacacttgcaaaagatttggaaggcagatgagaaaga

SEQ ID NO: 43518 - DNA, 201 bp, Homo sapiens
tctcaagccaaccaaggactcagctgggttggggctagattgcagttttagtggaatgtagtcttccccttgtttatctatacttgtaagccatgacactycctggattttgattgaaagcctggtatatctttatcttctgggccctgaaaaagttctctttcagaagttttcagctcatttctttatcttagggcccta

SEQ ID NO: 43519 - DNA, 201 bp, Homo sapiens
ttatagcatataagctcctataaggaaaatcacttactaaaaatgtcttctcttctgtacatgccagcagtgctattcctcaaagcaataatctgcatagktttaaaattagtggtgctaaatgtcagcgatgactcatgctttagcattatctcttaagtatgcaggtgataaactttaaaaattaagtacattcattgt

SEQ ID NO: 43520 - DNA, 201 bp, Homo sapiens
tcaagtgatccttccaccttagcctcccaaagtgctgggattataggcataagccaccatgcccaacctgtttgattattttctatgtgtcccacttctcyaatcgaattttcttttccttcactttttttagtccaccttttaagtccttgccagttacctgtaatatctggatcatctatgtatctgcttcaaatgtat

SEQ ID NO: 43521 - DNA, 201 bp, Homo sapiens
gactcaatgaaattttattttaatacacttgaaataaaaattcattaattctattcaatcaataaaaaaaactaaggctaaaaattaacggtttggggaayagcagaatagtgaaaaataacagagctttgagagagttatcaccttgcttcctctatgatacctggcatattaataactaccaagactcagagaagctga

SEQ ID NO: 43522 - DNA, 201 bp, Homo sapiens
cttccttagtgactcaatgaaattttattttaatacacttgaaataaaaattcattaattctattcaatcaataaaaaaaactaaggctaaaaattaacgrtttggggaatagcagaatagtgaaaaataacagagctttgagagagttatcaccttgcttcctctatgatacctggcatattaataactaccaagactca

SEQ ID NO: 43523 - DNA, 201 bp, Homo sapiens
tctaaaaacacaattattttcccagttagcgaaagcaattttctgactgttccaataaatcttttatcattttcagaaccatgtaggctactacttatccraatcttctagtaaagaattaagcagtttcatcccaggatttaaaactgttgcactgatctcaccatataggaatagggggcattagcgggataatatagg

SEQ ID NO: 43524 - DNA, 201 bp, Homo sapiens
ctttcataggaaccatagatttttcctgggaatgctctatgctcatctaaattttagatatatggaccaaactacagacattaatattttaaggaatcttyatgataaaataaatattaagaagtcatgggtaagaatagccagaatggcttgtctagataattctcttctgcaatggttatcgaagtgtggtgtgtggat

SEQ ID NO: 43525 - DNA, 201 bp, Homo sapiens
tgcttggcaaataccagcagacttgctagacacaggcagcagcctccaatttcacagggcttgtgttcccaatgcacacctaaaaggatagctttctcacatgttttgtgattctaacaatgtgtgcagagaggaatggatactgtaactatgaaatggaaaagctctagatttctgagtggttcagaatcacgggcctaa

SEQ ID NO: 43526 - DNA, 201 bp, Homo sapiens
gcttggcaaataccagcagacttgctagacacaggcagcagcctccaatttcacagggcttgtgttcccaatgcacacctaaaaggatagctttctcacatgttttgtgattctaacaatgtgtgcagagaggaatggatactgtaactatgaaatggaaaagctctagatttctgagtggttcagaatcacgggcctaaa

SEQ ID NO: 43527 - DNA, 201 bp, Homo sapiens
gaatagatggtatgcttatttaaatacaagacaagtcattttgccttgctgcactgtatttatcacaaggctattgccagctttttctttaacattaaatacacacacacacacacacacacacacaactgtctttttttttttttaagacagagtcttgctctgtcacctggagtgctggagtggcgtgatcttggttca

SEQ ID NO: 43528 - DNA, 201 bp, Homo sapiens
aatagatggtatgcttatttaaatacaagacaagtcattttgccttgctgcactgtatttatcacaaggctattgccagctttttctttaacattaaatacacacacacacacacacacacacacaactgtctttttttttttttaagacagagtcttgctctgtcacctggagtgctggagtggcgtgatcttggttcac

SEQ ID NO: 43529 - DNA, 201 bp, Homo sapiens
atagatggtatgcttatttaaatacaagacaagtcattttgccttgctgcactgtatttatcacaaggctattgccagctttttctttaacattaaatacacacacacacacacacacacacacaactgtctttttttttttttaagacagagtcttgctctgtcacctggagtgctggagtggcgtgatcttggttcact

SEQ ID NO: 43530 - DNA, 201 bp, Homo sapiens
tccaacacttcccaagagatcctgttagtacattatagcaactacagggaatgttttacaaatgactgtcattataatgttaaatctaacatatatgccarcccccttagtttatacaataactttcctccaaaaatcttaattaaaaataaaatatagctgacttcgttataaagagactcattaaccaggacattgcag

SEQ ID NO: 43531 - DNA, 201 bp, Homo sapiens
tagatggtatgcttatttaaatacaagacaagtcattttgccttgctgcactgtatttatcacaaggctattgccagctttttctttaacattaaatacacacacacacacacacacacacacaactgtctttttttttttttaagacagagtcttgctctgtcacctggagtgctggagtggcgtgatcttggttcactg

SEQ ID NO: 43532 - DNA, 201 bp, Homo sapiens
ctcagtaacccaaactgttcaccaatacttcttttaagtagttgtgaggtagggagtccaacacttcccaagagatcctgttagtacattatagcaactayagggaatgttttacaaatgactgtcattataatgttaaatctaacatatatgccaacccccttagtttatacaataactttcctccaaaaatcttaatta

SEQ ID NO: 43533 - DNA, 201 bp, Homo sapiens
caagacaagtcattttgccttgctgcactgtatttatcacaaggctattgccagctttttctttaacattaaatacacacacacacacacacacacacacaactgtctttttttttttttaagacagagtcttgctctgtcacctggagtgctggagtggcgtgatcttggttcactgcaacctctgcctcctgggttcaa

SEQ ID NO: 43534 - DNA, 201 bp, Homo sapiens
agacaagtcattttgccttgctgcactgtatttatcacaaggctattgccagctttttctttaacattaaatacacacacacacacacacacacacacaactgtctttttttttttttaagacagagtcttgctctgtcacctggagtgctggagtggcgtgatcttggttcactgcaacctctgcctcctgggttcaagc

SEQ ID NO: 43535 - DNA, 201 bp, Homo sapiens
gacaagtcattttgccttgctgcactgtatttatcacaaggctattgccagctttttctttaacattaaatacacacacacacacacacacacacacaactgtctttttttttttttaagacagagtcttgctctgtcacctggagtgctggagtggcgtgatcttggttcactgcaacctctgcctcctgggttcaagcg

SEQ ID NO: 43536 - DNA, 201 bp, Homo sapiens
cccagagtgctgggattacaggcataagccaccatgcccagcccaacaccatatcttttaaatggcttactatgtttgaggcattgcaataatgtgtcccytaacgtatttaattcttacgacaaatctatgagataggtactgtttactcatattccggatagggaaactgggcatagaaattttaagtaatatattgaa

SEQ ID NO: 43537 - DNA, 201 bp, Homo sapiens
aagaaagcccaacatactcttaaagacgatgggggaaaggcagtttaagaaataaaagtcctctgtttatccagggaggtactttacaaggcagacagctwcaccacagtagagagacaatatttcctcagctgagtcggttaattaaaatgcacagttacaacagactttcttagagcctgcagctgaatgactgaagtc

SEQ ID NO: 43538 - DNA, 201 bp, Homo sapiens
catttctttttctctttctcatctccacttaaaatttctttcaatttttctttctatccaacttttaagtcaatccatacaacttggatatatgccttcaractgagttaaaaggaaaatactaatagttttatctctcatgaaagcaataattaaaatgacaccatctaataatttaatgtaaaaggagggaaaaattct

SEQ ID NO: 43539 - DNA, 201 bp, Homo sapiens
gtgtggcggtctttccaaaattttagaaaattcttggccttaactcctcaaaaaatgcatctccccgtgtattctctcctctcctttgggacttcattttyacttatgtttaaaaaaattagcataacacaaataccatttacacaatatctaatttttccctttttctttctatgctttgagtattttttcagttcacta

SEQ ID NO: 43540 - DNA, 201 bp, Homo sapiens
tcaatgagatgatgtagataaaatcatttaatacaaaggttggcacataatactttctccttcccttcattagttccaactgctaaaaatctcagtaccayaatgcgctttgaaagtcatattacactacctatttttattttgaataacagactcctggtggactttccggaaatagaatctaaatttccataagctcaa

SEQ ID NO: 43541 - DNA, 201 bp, Homo sapiens
gggaggccagggcaggcagataacaaggtccggagatcgagaccatcttggccaacatggtgaaaccccatctctagtaaaatacagaaaattagctgggyatggtggcgtgtgcctgtcttcccagctgcttgggaggctgaggcaggggaatcacttgaacccgggaggcggaggttgcagggagctgaggtcacgcca

SEQ ID NO: 43542 - DNA, 201 bp, Homo sapiens
gctaccacagcatgtagttaaatagtcccagtgccacagtcttgtaagcaatacttatgcaagatatattgcattgaaatgagtttgtattttccaaggaygttgacattacatcttttcaaagaatttaaacaattttttacttgatttggtgagtgaactacctaagtagacaggcagtaaattgtctttctatggagc

SEQ ID NO: 43543 - DNA, 201 bp, Homo sapiens
tatttttactaatttttttttattgtttgggggtttttcatatgctgagaggaaaaatctaggcaagtcaccataaaataaaattttaaggatgccagatyattaaaatcatacttttataagcaataaagaaaaagaaatagttaaagtggatttctcaaggtactttgatattgattaaatcttacaatagatgccact

SEQ ID NO: 43544 - DNA, 201 bp, Homo sapiens
tgtttcataaataaataaatgaaacagcattgagaagccagatttctccaccacacctcacattagttagggagttttcagataaggttcgcgaatgggaragcagcttgctacaggcatgtggttgagagcttaccagaatttctctttccagttttttcgaagaccctaatgtagttagtagaatccttagctctgtcc

SEQ ID NO: 43545 - DNA, 201 bp, Homo sapiens
gaaagcctgtttggatgtcagctgcttgggttcagcaaatcctgaaatgctcctctgcaatatccaagtcctgccaaagcaggacaaactatttttagatsaggcatgtcaaaaacgtagtctgttttataaagaatgtgaagactacatcaatatagtaaggaagaaaatgccagttggaaagcaagtgggctattagaa

SEQ ID NO: 43546 - DNA, 201 bp, Homo sapiens
agaaattattctaatccaaataatatttccccaagtctcacagtgcaaaacaccacagcagagagcacatggtgatcaagaaagacagcattatcataaayatttgtatttcttatgctaacagatcccattcttccagtctgtggcattgtcccaaactgccccatcaaaggttctaaaatatgcttagggcatctctat

SEQ ID NO: 43547 - DNA, 201 bp, Homo sapiens
tctcttccatggcaaaagtaatgaggtggggccaatgtgtcccattgtctcccaatatccacagcagccactcaacactgtagtgctgtggccaggtgaarggactctgaaactgtagtactatcctttgaagctaccacagttcttctcctctatgctgaattaaccacatccttgtttccatttaaataagaaagatgc

SEQ ID NO: 43548 - DNA, 201 bp, Homo sapiens
acggaacttggatctgtcctataatcagctgcattctctgggatctgaacagtttcggggcttgcggaagctgctgagtttacatttacggtctaactccytgagaaccatccctgtgcgaatattccaagactgccgcaacctggaacttttggacctgggatataaccggatccgaagtttagccaggaatgtctttgc

SEQ ID NO: 43549 - DNA, 201 bp, Homo sapiens
atgcagtatttccaatggcgggagacagaaacaatgtcacaaagtgggagaggcactaagaatgagatctggcaccacttactcttgtttctatacaatcraagtacaacacttctcaattttctaggcgtctttggggagagatcttatctctcttaatggtaccaactcagtaacccaaactgttcaccaatacttctt

SEQ ID NO: 43550 - DNA, 201 bp, Homo sapiens
tattcaaatgtcccttcaataaggccttcatgataccccctacttaaaatggcttttagaattgtttctccttattttactgttctccaaagcaattatcrccatataatatagtacttattttattcatttgtttatctgtcttgcccaacaatgcaccccataaaggctgagatttttgcctggtatgttcacagatct

SEQ ID NO: 43551 - DNA, 201 bp, Homo sapiens
atctgaaatggaaggtgacaaagccaagcagaatttgggctagaaagtggtgttgccccattctcaaggatttgttgttttatcagtgcatagacatcaattttttttttttttttaagatggagtcttgctctgttgccaggctggagtgcagtggcgcaatctcggttcactgaaacctccaactccctggttcaagca

SEQ ID NO: 43552 - DNA, 201 bp, Homo sapiens
aagacagctgggagccacggtggaaggcagacaatgccctggatttaggtactagtctcctccaggttgtgtttaaaaagctgggtttttttggggtttttttgtttgtttgttttttggctcggcatggtggctcatgcctgtaatctcaacactttgggaggctaaggcaggtggatcatgaggtcaagagatccagac

SEQ ID NO: 43553 - DNA, 201 bp, Homo sapiens
agacagctgggagccacggtggaaggcagacaatgccctggatttaggtactagtctcctccaggttgtgtttaaaaagctgggtttttttggggtttttttgtttgtttgttttttggctcggcatggtggctcatgcctgtaatctcaacactttgggaggctaaggcaggtggatcatgaggtcaagagatccagacg

SEQ ID NO: 43554 - DNA, 201 bp, Homo sapiens
gacagctgggagccacggtggaaggcagacaatgccctggatttaggtactagtctcctccaggttgtgtttaaaaagctgggtttttttggggtttttttgtttgtttgttttttggctcggcatggtggctcatgcctgtaatctcaacactttgggaggctaaggcaggtggatcatgaggtcaagagatccagacga

SEQ ID NO: 43555 - DNA, 201 bp, Homo sapiens
acagctgggagccacggtggaaggcagacaatgccctggatttaggtactagtctcctccaggttgtgtttaaaaagctgggtttttttggggtttttttgtttgtttgttttttggctcggcatggtggctcatgcctgtaatctcaacactttgggaggctaaggcaggtggatcatgaggtcaagagatccagacgat

SEQ ID NO: 43556 - DNA, 201 bp, Homo sapiens
cactttgggaggctaaggcaggtggatcatgaggtcaagagatccagacgatcttggccaacatggtgaaaccctgtctctactaaaaatacaaaaattasccgggtgtggtggcaggtgcctatagtcccagctactcaggaggctgaggcaggggaatcgcttgaactggggaggcagaggttgcagtgagccgagatc

SEQ ID NO: 43557 - DNA, 201 bp, Homo sapiens
gcttgaactggggaggcagaggttgcagtgagccgagatcgcaccactgcactccagcctggcgacagagcaagactccgtctcaaaaaagaaagaaaagaaaaaaaaaaaagctgtttttttttttttgtaattaaaccaaactaaatatttcccaggagggcaagacagttcccaaaatgtctaacgaacttccacgta

SEQ ID NO: 43558 - DNA, 201 bp, Homo sapiens
ttttcaagaataccattatttttaaataaaatgcctctacatggcagatgttattatgttctactttggagatgaaaagaatcgaacattattagttatgrtccacagaaccagaagatttattttaaagataaagttcagatgatgaacataaaggaagttatctcatcaaagaaggcaagactgagtaaatctcagaaa

SEQ ID NO: 43559 - DNA, 201 bp, Homo sapiens
aactttttcaagaataccattatttttaaataaaatgcctctacatggcagatgttattatgttctactttggagatgaaaagaatcgaacattattagtyatggtccacagaaccagaagatttattttaaagataaagttcagatgatgaacataaaggaagttatctcatcaaagaaggcaagactgagtaaatctca

SEQ ID NO: 43560 - DNA, 201 bp, Homo sapiens
cagcctcaagtattcagtgtggcttagaatcacattattttgttttggatttctcaactagcctcatggataatcttccctcttcaaacaatttattatcytgaaccagatcagacctggttgtgatgccgacttaaggggtcgtgccaaagtaggggccatacacagttcctggaggctgactcagtccaagagtggcta

SEQ ID NO: 43561 - DNA, 201 bp, Homo sapiens
gttcatgacccttgataacccttaatatatgctcatggccacagaacctatacagaatcaagggaaaattaattttgtcatagatactctgattgcagaamtatctgtaacactttataaatattgtacaatgtacttactcataaatcatgaaaatggttcctaagtaaaaatccttaaaagtttataagtcaggtttta

SEQ ID NO: 43562 - DNA, 201 bp, Homo sapiens
tttttgagacagagtctggctctgtctccaggctggagtgcagtggcgccatcttggctcattacaacctcctcccgagttgaagagatcctccttcctcmgcctcccaagtagctgggactataggcacgtgccaccatgaccagctaatttttgtacttttaatagaaacggggtttcaccatttggccaggatggtct

SEQ ID NO: 43563 - DNA, 201 bp, Homo sapiens
gacgttgccaaattgtaaaacaagacttggaaatcacagaaaatgttgctagttattgatcacggtgaccattcagttcctactgagccacccaaaagaaycattcattttccagcagagagcctgctcatttgcaagataaaagagagacatttctgcacatgcccataatgttcttcaccactgggggcagctttacat

SEQ ID NO: 43564 - DNA, 201 bp, Homo sapiens
tcttgtgacagagaaaataaaataaatattgaaaagtattatgacagaaactagctagcttcccaccacatctgttccatcttcttcctgggcccacaggmagtataagcttcccactctcctttacagttagaaatggcaatatgactgcattctaacatgaaggaagtggtgggatatttccagtcttagccaataaaa

SEQ ID NO: 43565 - DNA, 201 bp, Homo sapiens
tctgagcttcttcaatctctggcctaatgcttcattatagcatgaagttcccccaaaatacactaatatgggttcaacaatggcgactttttaaagtaaaygcttggctattaatgccttattggttccctaatagaaaagggcaatgctcatatgattcctttcttaccactcttccttccaggttcaatatgatgcagt

SEQ ID NO: 43566 - DNA, 201 bp, Homo sapiens
atactgcaagcagacaactgcaaaatgtgaggagatgacaaaaatgtaaagttttcgactcagccttgtctctgaaacccatctctgtaaaatcagactasaggtttcactgccaatttcttctagcctgtatgtttcataaataaataaatgaaacagcattgagaagccagatttctccaccacacctcacattagtta

SEQ ID NO: 43567 - DNA, 201 bp, Homo sapiens
aatagtactgtttatatgagtattgtagagcaagcatttcagagcaagttattatatttataaagattatctgaaattcagttggataatcctcctgaatwtaaaatatattgtattattttattgttgttgttgattagccattctaaaaaaatctgtcctcctaaaataaaaatgcattgtaaaattatttccttcagt

SEQ ID NO: 43568 - DNA, 201 bp, Homo sapiens
tagctctgtcctgttctgttcagaatttgtcaggctgccctgttgtgttccattacatgtcctgcacacaccagtcccctaatgacagacacttcattcasatgtgtaaagagaacacattccaagacgtgccttccacccacagcctcattgaaaaggacgactttgataacaccttaataaatgtataaaacgaatctt

SEQ ID NO: 43569 - DNA, 201 bp, Homo sapiens
cataatcagctcaaaatttattatactatatatagcatcaaagaatacatttttttagagatgaaatgaggtctatgttgcccaggcttgcctcaaactamtgggctcaagcagtcctcctgcctcagcctcctgagtagctggacctaaggcacgcaccactgtgccttgcagaatacattttattaacgtaaaaatcat

SEQ ID NO: 43570 - DNA, 201 bp, Homo sapiens
cgaggctgtgcccattcatttgtttatttatgcaataaatattatcttttttcaattctagagatacaacagtgagcagagacaaaagtttcttccctcamaacacatataattctaactctgggaaatgaatattaaagtaggataaaagcaaaatatataaaacattggataaaaattgtgaaaaaaaataataatgca

SEQ ID NO: 43571 - DNA, 201 bp, Homo sapiens
cagaggttgcagtgagccgagatcgcaccactgcactccagcctggcgacagagcaagactccgtctcaaaaaagaaagaaaagaaaaaaaaaaaagctgtttttttttttttgtaattaaaccaaactaaatatttcccaggagggcaagacagttcccaaaatgtctaacgaacttccacgtagagaaaacggttactg

SEQ ID NO: 43572 - DNA, 201 bp, Homo sapiens
tgaaccacatcagctgagtacatcacagaaatgctttcactgtattgagctttaatgttattcttatagcttttatcaacatttgctttaaaaaaaatccrtagctgaagcatgcgtctgcattttacaaagaaactgtccagtacattattctatattccctatttagtagccaacattagaattttaattcaagttatg

SEQ ID NO: 43573 - DNA, 201 bp, Homo sapiens
aatttatttgatgtcattactttttaaaataaccaaatgtcatatatttatcattttaaagaattaatatgcagctgggttaactcggctatgtaatatatttttttttcaggatatacctttcagattattcaaagaaatagctaaaaatgagctatcagattcaaagaagctttttaacatagccaactgtaggtcagt

SEQ ID NO: 43574 - DNA, 201 bp, Homo sapiens
atcctttgcctggttgccagggcaaccgggatcactttctttaaccacactggagcttattctgtgtaatcatttgccaagcaatcatttgccaagcaatmatttattcagtcattcaacaagcacaaatcaagtgccttttatgtgcctcacacttgtaagtgatgaggatacaatgcccaataaaatgttctggttgcc

SEQ ID NO: 43575 - DNA, 201 bp, Homo sapiens
gtaatcccagcactttgggaggccaaggtgggcagattacttgaggtcaggagtttaagacgagcctggccaacatggtgaaaccctgtctctaccaaaamtacaaaaattagctgggtgtggtggcatgtgcctgtaatcctagctgctgggggcgctgaggcaggagaattgcttgaacccaggaagcggaggttccag

SEQ ID NO: 43576 - DNA, 201 bp, Homo sapiens
tcactcagcctccctaatagctgggattacaggcttgcgctaccacacctagctaatttttgtatttttaatagagaccaggtttccccatgttggccagsctggtctcaaatgccttacctcaagagatccgcctgcctcggccttccaacgtgctgagactacaggcgtgagccaccgcgcccggcctatactgcttct

SEQ ID NO: 43577 - DNA, 201 bp, Homo sapiens
acccaggaagcggaggttccagtgagctgagaacacaccactgcactccagcctgggcaacagaatgagactccatctcaaaataaataaataaataaacwaatattatatgtaaatatatatatttactttatgagctatttcttttaaaataacatccattgctttattttctgactgcaaaagcaaatatactcattg

SEQ ID NO: 43578 - DNA, 201 bp, Homo sapiens
ccaataaaatcatatttaacgggttgatttccaaagtatgagtttgttttacaaaatttaagaggaggaaaaaaagaatatgggtgggatttgtggaggtmctgctatagttaatgagaagatatcacaaatcaggtaaaaatactctctacagatttcttttatgtttgcctcacatactgccaggtattaagcatcaga

SEQ ID NO: 43579 - DNA, 201 bp, Homo sapiens
cagctactcaggtggttgaggaaggagaattgcttgaacccgagaggtggaggttgcagtgagccgagattgcatcgctgcactccagcctgggcaacaakagcgaaactccgtctcaaaaaaataaataaataaataaataacttagctgtgtcacacacagcctctgaacacacattttaccccgtcatacttgacttc

SEQ ID NO: 43580 - DNA, 201 bp, Homo sapiens
acacttagtcaaacttttattcctaagtgtggaataatcaaggttgtatatagaaatccatactttagtataacatcatgagtgaaataaatttgcacacactatatatatatacacacacacacacacacacacacatgcgatgacgttcctgaaaatatgatcctagataattaagagaatggggagttgctattcaat

SEQ ID NO: 43581 - DNA, 201 bp, Homo sapiens
agtaaagactttaggcaaatagtcaatgaaatcgagcagacattttgaaaatagaatgtagttatgtcaaacagcatgtgcaatgagaattttccaggccragaaggaagtcagagataactgatacaacaagctagttctacttaaaaaaaaaaaaaaaaagttcttggagtttattttcccttaatatttagcaaacta

SEQ ID NO: 43582 - DNA, 201 bp, Homo sapiens
acttagtcaaacttttattcctaagtgtggaataatcaaggttgtatatagaaatccatactttagtataacatcatgagtgaaataaatttgcacacacyatatatatatacacacacacacacacacacacacatgcgatgacgttcctgaaaatatgatcctagataattaagagaatggggagttgctattcaatag

SEQ ID NO: 43583 - DNA, 201 bp, Homo sapiens
gttcagagggaactatccaaggtcacactgctatattcgtttattcttctgatcctgagacattttgcttttctctactgatgagtgtatgctgcactgcrttggacaactttatatggagcccaaccttttcttttcactggagtttcccatccactcttatttcttcagttttgtggtttgtcattgtttgtttgttgt

SEQ ID NO: 43584 - DNA, 201 bp, Homo sapiens
cattttccagcagagagcctgctcatttgcaagataaaagagagacatttctgcacatgcccataatgttcttcaccactgggggcagctttacataagaytgcattcactgaaaccaaagcaacagtccgagcagctttcagaatgacagtctgcagaagtgagctgagcgtgtgcgcggtacggggctctcctgccttc

SEQ ID NO: 43585 - DNA, 201 bp, Homo sapiens
cttagtcaaacttttattcctaagtgtggaataatcaaggttgtatatagaaatccatactttagtataacatcatgagtgaaataaatttgcacacactytatatatatacacacacacacacacacacacacatgcgatgacgttcctgaaaatatgatcctagataattaagagaatggggagttgctattcaatagg

SEQ ID NO: 43586 - DNA, 201 bp, Homo sapiens
aattttgtaatggtctggaattgctatgactccctgtacaccagaactttcttctcacacattgatcacttcaagcatccacagtttttctttttctttcytttttatttatttatttttgagacagagtttcactcttgttgcccaggctggagtgcgatggtgtgatttcggctcaccccaacctccacctcccgggtt

SEQ ID NO: 43587 - DNA, 201 bp, Homo sapiens
aaaacttttaaaaagtatacaggcaaattactaaaatcttttagaacacagtcttttctttttctcttgagggactactctatgtctttgcagtaacttcygcagcctcaagtattcagtgtggcttagaatcacattattttgttttggatttctcaactagcctcatggataatcttccctcttcaaacaatttattat

SEQ ID NO: 43588 - DNA, 201 bp, Homo sapiens
tagattattctaatcttgtgacagagaaaataaaataaatattgaaaagtattatgacagaaactagctagcttcccaccacatctgttccatcttcttcytgggcccacaggaagtataagcttcccactctcctttacagttagaaatggcaatatgactgcattctaacatgaaggaagtggtgggatatttccagtc

SEQ ID NO: 43589 - DNA, 201 bp, Homo sapiens
ggaaagcaagagccaaatccagatttaatccaaatgtgttaaactcttggtcttgctcacaaaatgtgacccacgaaaacagttatggcttcaccatcccyagggttgcttagccaataaaaatgaaccatctttactttccctctttatttcatacctccacttctatttccttagaaaagttctgttgattttattgta

SEQ ID NO: 43590 - DNA, 201 bp, Homo sapiens
acaacaacaacaagtattgttcttagttacattttgaaaatccagacaagttataatgcccattaacatatgttcttaatttttactcaaatactgatgaycgctataaagacacatgcacacgtatgattattgcggcactattcacaatagcaaagacttggaaccaacccaaatgtccaacaatgatagactggatta

SEQ ID NO: 43591 - DNA, 201 bp, Homo sapiens
gtctcatctgtttacactagagcctgtgttcattccatcagtaaatagttattgagcacctaacacatgccaggtactattctaggagtcatccgctaccaaaaaaaacactttttaagtcaagacaatgtatttaccagaaatgaaaatatttcaacgaatgatgacgttctttcagaatatgatttcatttattgtcag

SEQ ID NO: 43592 - DNA, 201 bp, Homo sapiens
tgcagtgtacaaagtcaatatacaaaggtaagtatactattttttaccaaccacaaatgatgaaaaattttaaatatacactgaaggccgggcacggtggytcatgcctttaatcccagcattttgggaggccgaggcgggcagatcatgaggtcaggagatcgagaccatcctgactaacacagtgaaaccctgtctcta

SEQ ID NO: 43593 - DNA, 201 bp, Homo sapiens
acaacaaagccatgaggatagattaaaaaataaactgctacataaacttgatcttcaaaatacttctcaatgcgttcatgattccttttaatattattagrgtaaatagtaaatatagcctgcagaagttttaccctcttaattttcattcctttatgctttttttcttgtatgtacttgatgactaaagtcacacttaaa

SEQ ID NO: 43594 - DNA, 201 bp, Homo sapiens
gatacctcttccaatattaccttgtcacatattaatcattttcattaacatgctttcattatcatagtttataccatttatatgctattctctaatttctraagctgttattttttatccatagatagatttgatgctaaccatcttaaatcagagttcctccattcttgagctactgatgttgactcatcatgtatgtgc

SEQ ID NO: 43595 - DNA, 201 bp, Homo sapiens
caattaggatatggacttcctcagccttatcagatgttgccaaattgctctccaaagaactaatatcaatttacattccagccagcagtgaatgaaagttycagtttctctacctcccagacatatgtattgtcatgctttaatttttatcatctaatggctgtgagatgcaattttattattgatttaatttttatttcc

SEQ ID NO: 43596 - DNA, 201 bp, Homo sapiens
ggtaaggcatcttaccagttcttatgcactgcaatggccactaggtaatattctttaagcaatactgttatacatattattatattacagcaatcctaaaygagataggaaagacatcatctttcattttctacatggagaaattaaggctcagagaagttaggtgaaaagactaaagtcaaaaatgctaatgggtgtaag

SEQ ID NO: 43597 - DNA, 201 bp, Homo sapiens
agaaaatataactagagcttactataatatgttctgcaggtgggaaaaatgttacagctccatgaacataaagcaatcattaattagcagcaaagacacgycattttcaatcttatcttttcatgattttaaaaaaaccaacacttttcccttatattttccaggtaaggcatcttaccagttcttatgcactgcaatggc

SEQ ID NO: 43598 - DNA, 201 bp, Homo sapiens
aaaattatcacaatttatacccaacatacctaaagaaccctgtccattgtgccctcattggttgtcctcttaacttggacaaatgtaatcacgtctttgaygtatttccagcttcacggtggttttggatatacacttctgtaaaatgatcaagatttttgttggaattcacgagtgtttgttaaagttttattaaaagcg

SEQ ID NO: 43599 - DNA, 201 bp, Homo sapiens
attagaaagagcaattgtcacagatcaacaataatgggagatttcaatgcacttttcttataactgatacatcaggcagcagaaggcattagtggattgtrggagatacaaataacgcaactaagaagtttgttccaatggctatatgtaaaaccatggaccctacaattagagaacacacattcacttaaatacataata

SEQ ID NO: 43600 - DNA, 201 bp, Homo sapiens
ctcataataaccctaggaggtaggtattatcatcaaccatacatacagaagagaaaatggaagcagaacttgaggaagtaatttgcccaaggacctacagrttgcatgtggcagaggtggaattcagtcccagatcatcaggccccagaacctggcttcataaacacctgcccttgaaacccactatggagccccaggagt

SEQ ID NO: 43601 - DNA, 201 bp, Homo sapiens
agggactcggaggttgcagtgagccgagatggagccactgcactccagcctgacgacagagtgagactctgtctaaaaaaaaaaaaaagaaaaaaaaagaraaaaaaattaaataaactaataataaaatcataaaatctgggctgtgagttcacttctagaatgctaggtactcatggaaatttacctaaaaccaaaaag

SEQ ID NO: 43602 - DNA, 201 bp, Homo sapiens
gaaactttcattctattccataacatgtacatgttggtgataatataaatgagtattttttccctaaaatttttagtagaatttcaccctaggctatgtgyaactttaataatgatgatgataatgatgacgatagcaaatatatagagtgcttacatgtaccaggtacttttctaagcactttatatgtatgaactaatt

SEQ ID NO: 43603 - DNA, 201 bp, Homo sapiens
atctcttatttccttttcccaggtcacacctctccatctggagtgagtggctaaaaacatatccttttgcatcagagactttctatgttatggtttgtacrtactgtctcttcttccttcttcactcctcttcatctctggcattctctggttctgaaacttggatctaagcaagaaccctgtcattctagtatagattct

SEQ ID NO: 43604 - DNA, 201 bp, Homo sapiens
ttccctgttaaaatgatgacacatgtaaggacagccccatggcatggtgtctgatacttcatctctgttagctttttcttcccataatgcttcttccctcaaaaaatgctgatcacagaaattttgaaacacaagatatttgtggctttttttttcagtggaaaccatcattattgcctgtaaccttgatccgttctaata

SEQ ID NO: 43605 - DNA, 201 bp, Homo sapiens
tcctcatcaatgtggaagaggcataattgaagggagaaaacacctgatctaaatacactttatctaaatcacttcccccaagcagacattctctatctcarttcctagttcatttccttcattgtatttcctaattcaaaattatttctttcttcacctgttcattgtgcctgtgatcacataggccataggttttatatg

SEQ ID NO: 43606 - DNA, 201 bp, Homo sapiens
gggggctttgataatgactctgccatacttctggccatgcgacctggaagaatttgttaaccattctatccctcaattgccacatcagtaaaatggggagyataaacagaacttagaacatagatgtttgtggggatgaataggattatataggtgagatacagagtactgttgtgcacacattgagtgcccaataaatgt

SEQ ID NO: 43607 - DNA, 201 bp, Homo sapiens
ttctcttgctagacttttttactccattcctctgtcaccaaatctcttatttccttttcccaggtcacacctctccatctggagtgagtggctaaaaacawatccttttgcatcagagactttctatgttatggtttgtacgtactgtctcttcttccttcttcactcctcttcatctctggcattctctggttctgaaac

SEQ ID NO: 43608 - DNA, 201 bp, Homo sapiens
tggttgtagattgagagaaaaaacaggagcagtttgcagtctcttgtttctcttgctagacttttttactccattcctctgtcaccaaatctcttatttcyttttcccaggtcacacctctccatctggagtgagtggctaaaaacatatccttttgcatcagagactttctatgttatggtttgtacgtactgtctcttc

SEQ ID NO: 43609 - DNA, 201 bp, Homo sapiens
aatgtttgctgtttatttcagtgagtagttatttcagtttttaatagatatgttttcctttattaggatttgttaaaactaaaaaaattaataataacttcaaacaatcattgttatcatttccaataagcaaagcagacaatttaaagagacagaattctcagacatgcaatgctatttcaaagtccattcacgtgctgt

SEQ ID NO: 43610 - DNA, 201 bp, Homo sapiens
aaacttagtatcattattattctaaacataccaaggctcaagttttcattacctaaaatatactcttcgtaagacttgtggctgccgaataaaatacattmatcagatgcagtattgctttcacggtaattatgatactatttataatgccatggttatgttcataggccactaacaaacatatgcagtcttttagctaca

SEQ ID NO: 43611 - DNA, 201 bp, Homo sapiens
atgtttgctgtttatttcagtgagtagttatttcagtttttaatagatatgttttcctttattaggatttgttaaaactaaaaaaattaataataacttcaaacaatcattgttatcatttccaataagcaaagcagacaatttaaagagacagaattctcagacatgcaatgctatttcaaagtccattcacgtgctgtg

SEQ ID NO: 43612 - DNA, 201 bp, Homo sapiens
gtgtgaaacataaagataagagtgccagtgagaaaaataatctgtttagtagatttaaattatcattatatttcaccaaatcctgttaagaaagaatataycccctcgaaaggttcaattctacaacaatgagtagttaataggttcttagaagggaggaagtcattgtactactgaatagtaataaaatctatgattcag

SEQ ID NO: 43613 - DNA, 201 bp, Homo sapiens
tgtttgctgtttatttcagtgagtagttatttcagtttttaatagatatgttttcctttattaggatttgttaaaactaaaaaaattaataataacttcaaacaatcattgttatcatttccaataagcaaagcagacaatttaaagagacagaattctcagacatgcaatgctatttcaaagtccattcacgtgctgtgc

SEQ ID NO: 43614 - DNA, 201 bp, Homo sapiens
tcccagtcactgctctgtcagctttaatacaatgcatccatttgtcttactaacacttcaatttatgggatagctgtttttcacaattaaaactactgaarctttagtatacatggaaatgatcatgatagcattttctccatatttctaacaactctggaaggctctattgtaaaaatatagggccttccagatgactag

SEQ ID NO: 43615 - DNA, 201 bp, Homo sapiens
gtttgctgtttatttcagtgagtagttatttcagtttttaatagatatgttttcctttattaggatttgttaaaactaaaaaaattaataataacttcaaacaatcattgttatcatttccaataagcaaagcagacaatttaaagagacagaattctcagacatgcaatgctatttcaaagtccattcacgtgctgtgca

SEQ ID NO: 43616 - DNA, 201 bp, Homo sapiens
gcaaaagttaataaaattggaacactatagaaacacagaaaaccctcatatttcaaaattaaagatatttgtactacttttatttatcattttcaattgayggtttgcactcaaatatttcattaagacttcagttatttcaagaatttaaacatgattttatgcattaaaaggtatcagttaaaagacctgtgactgaat

SEQ ID NO: 43617 - DNA, 201 bp, Homo sapiens
ttggagaagatactgttcctatgatctcttttattttgtacttcaattccaaaatttataatgtatttgccaaagactttctttagtagctaatggaaaawaattctaaagaagagatggtggtaaggctgtaattttttaaaagaatgactattctttcattgagatgatatatgtcctatataaaaacttcaagtaata

SEQ ID NO: 43618 - DNA, 201 bp, Homo sapiens
cttctgtgcatataagacaattaaattagaaatgtatttattactattttagttataaagaaaacggaagacagggcaaaagttaataaaattggaacacyatagaaacacagaaaaccctcatatttcaaaattaaagatatttgtactacttttatttatcattttcaattgatggtttgcactcaaatatttcattaa

SEQ ID NO: 43619 - DNA, 201 bp, Homo sapiens
tctgtcacccaggctggaatatagtggcccaatctcggctcactgcaacctccgcctccagggttcaagcgattctcctgcctcagcctcccaagtagccrggactacaggggtgtgccaccacgcccagctaatttttgtattttttaagttgagatggggtttcaccatgttggcaaggctggtctcaaactcctgacc

SEQ ID NO: 43620 - DNA, 201 bp, Homo sapiens
gattgtaggagatacaaataacgcaactaagaagtttgttccaatggctatatgtaaaaccatggaccctacaattagagaacacacattcacttaaatayataataagctttaaaactgaacatatacataaagcaaatctcaatcaacaccaaaaattcagtatcactcagaacttctgtgcatataagacaattaaat

SEQ ID NO: 43621 - DNA, 201 bp, Homo sapiens
ctcatgcctttaatcccagcattttgggaggccgaggcgggcagatcatgaggtcaggagatcgagaccatcctgactaacacagtgaaaccctgtctctrctaaaaatacaaaaaaattagccgggcgtggtggtgcacgcctataatcccagctactcaggaggctgaggcaggagaatagcttgaacccgggtggcgg

SEQ ID NO: 43622 - DNA, 201 bp, Homo sapiens
tgtcacagatcaacaataatgggagatttcaatgcacttttcttataactgatacatcaggcagcagaaggcattagtggattgtaggagatacaaataaygcaactaagaagtttgttccaatggctatatgtaaaaccatggaccctacaattagagaacacacattcacttaaatacataataagctttaaaactgaa

SEQ ID NO: 43623 - DNA, 201 bp, Homo sapiens
attggttcattgatcttgttaatgctcagatattggtaaattatttatttggaaggaccttcagagcctactaaacattctttggcatgtcattgatgttsctttaaatattttaacttgctcaaaagttatttataaccaatattaatgaattttaaaagaaaccacaagaggccgggtggggtgactcacgcctgtaaa

SEQ ID NO: 43624 - DNA, 201 bp, Homo sapiens
gcacacgtatgattattgcggcactattcacaatagcaaagacttggaaccaacccaaatgtccaacaatgatagactggattaagaaaatgtggcacataatacaccatggaatactatgcagccataaaaaatgatgagttcatgtcctttgtagggacatggatgaaattggaaatcatcattctcagtaaactatcg

SEQ ID NO: 43625 - DNA, 201 bp, Homo sapiens
tctaaaattggtattcctggattactttaatgactcagaaaatattaaatacctatatttctgtcaatgataatgacttgccttttttttctttcatgactttttttttttttttttgatacacagtctcgctctgtcacccaggctggagtgcagtggtgtgatctcggctcactgcaacctctgcttcctgggttcaag

SEQ ID NO: 43626 - DNA, 201 bp, Homo sapiens
tcatttgaatggaaatccatttgctattgtttgggggctaattttgcaaatcatttcataactttctgttcaaaaactacctttaaaatatttaaaaatayatcatggtgctttgaggcttaagattaagaaatattttcaagaactaaagtctcataaaaatgaaggaaagcaagagccaaatccagatttaatccaaat

SEQ ID NO: 43627 - DNA, 201 bp, Homo sapiens
aaaaacctctagtgtgtgtaataattctgccttaattattttagagattaccttgctctgctctaagactatgaatttatttgcttagtggcatgtttccktgtttaactatttaaaaaaacaaaacactaaagacaattctctttaattacaaagagataatatgtgatgttaagtgttatttagatttaaatttttaaa

SEQ ID NO: 43628 - DNA, 201 bp, Homo sapiens
ctggtatttttgtgggagtaaggcttgggaatttcagacctcagagctaacagtgggcagaggatgaaagatgtacctcaaaggttcttaaaagccataakgatatcaggggtgtcttaaatttccccaacaacctccatatccctaatgataagttgccactgtaaatggctgttgtgtaatccatcatgaatatagatt

SEQ ID NO: 43629 - DNA, 201 bp, Homo sapiens
atttcctggtatttttgtgggagtaaggcttgggaatttcagacctcagagctaacagtgggcagaggatgaaagatgtacctcaaaggttcttaaaagcmataaggatatcaggggtgtcttaaatttccccaacaacctccatatccctaatgataagttgccactgtaaatggctgttgtgtaatccatcatgaatat

SEQ ID NO: 43630 - DNA, 201 bp, Homo sapiens
gtagagaggcaaaaaaggcacattggaaataaagaagtttctacggaacaataaagaaggaatcagcaaaaaatatagtaattccaaactcatatgtgagwaataacattgtccagaatatacaaagtaaaattgagattagaaagagcaattgtcacagatcaacaataatgggagatttcaatgcacttttcttataac

SEQ ID NO: 43631 - DNA, 201 bp, Homo sapiens
aaaagttgaaaataaaaagatgaagaatgacaatgaacagaagaaagtgagacacttgtagagaggcaaaaaaggcacattggaaataaagaagtttctayggaacaataaagaaggaatcagcaaaaaatatagtaattccaaactcatatgtgagtaataacattgtccagaatatacaaagtaaaattgagattagaa

SEQ ID NO: 43632 - DNA, 201 bp, Homo sapiens
agctcattcttctacaacaattgtaattatatttctaaaatgagatggctgatgccattcccctacataaataagatgcaaaccaaattcctaacacggcrttttagcacagcctttgcatatctcaccagatttatgtctcatctaccttcccatatactccagtgctacaattctttttctataagcagaaataagtgc

SEQ ID NO: 43633 - DNA, 201 bp, Homo sapiens
gacatatctcttggcaatgctatttcttctggccttcttactgcctgaaatatgcccacctatgtctatactaggaactcttggaaggccccgttcagaartcacttatttcaagaagcccttattgaggtcaccagttagaagtgctcactgtattttatgaatactgatagctccgcatagcccaatctaatattcacc

SEQ ID NO: 43634 - DNA, 201 bp, Homo sapiens
gggaattacacaggatctcatctttttccttttcttcatacccactgccatagccttggttcaagtcctcatcatctcttacatggcccatggtagcagtsagctagcaggaccccctgcttctagatgtacctcttttaatccattctccaaacattcaccaagtgatctttttaaaacacgaagcagataaagttaccc

SEQ ID NO: 43635 - DNA, 201 bp, Homo sapiens
aatctagatctctagcccaagatgtgtcagttgagcaacagacccatgtttccaattcctctgaggtgtcattgcttgaatgtcacagaaataatgcacaytccataatctcaaacataacccatgatttccatactctcctccttttgtatttctctctccgtgaatagaaccaccatccacccaggcctctatgacaga

SEQ ID NO: 43636 - DNA, 201 bp, Homo sapiens
atcattacataaaataaaagtgaaaaagaaatacaacaaatttcagactgccttatgaaatacaatagctaagcttaaatattcacagggctaatcccagaaaaggcagtctggactcggttatccacataactacctctattatccatttcatattagaatgtagaattataacatagttaatggggtttcaatttaaag

SEQ ID NO: 43637 - DNA, 201 bp, Homo sapiens
cctgctacttctgtcctggtatttcccagagttcatgccttctcattccaagtatatgctaaatactcctaaatctagatctctagcccaagatgtgtcasttgagcaacagacccatgtttccaattcctctgaggtgtcattgcttgaatgtcacagaaataatgcacattccataatctcaaacataacccatgattt

SEQ ID NO: 43638 - DNA, 201 bp, Homo sapiens
agccagtacatagataaattccttacatgatgatcaacaccaaggaaacctcttactgttctcagacctaacataaagaatgatgattttcattcactgtsaggtacaaaagcaataatatatgcaaaataggaatacaggaaatattgcacagctcactaatatactgcaagttactaatgggaaaaatatcaaaatacc

SEQ ID NO: 43639 - DNA, 201 bp, Homo sapiens
  misc_feature (1)...(201): n = A,T,C or G, or insertion/deletion polymorphism (see Tables 1-2)
actacattcaatactatttatagaatacagctgcagggctttgtatatctaataattattgtgaagaagttttacaaaacatcagtcctttgagaatttcnatacattgtacaagttatttaaaatctgccaaatgttacaatatgaaatgtaaaactaggaaacccaaatgcaacaagtggaaaacatgggctcagctaa

SEQ ID NO: 43640 - DNA, 201 bp, Homo sapiens
tcccaaagtgttgggattacaggcgtgagccactgcactcggcccacacatctttatacaagaggagtgaagttatacacattgtagtctatcctacaatttttttttttttgagatggagtctcactctctctcccaggctggagtgcagtggcaccatctcggctcactgcaacctctgcctcaggggttcaagtgatt

SEQ ID NO: 43641 - DNA, 201 bp, Homo sapiens
aaacaaaacagtggaggttttctaaaaaatcattattttccatgattttgtgggcagccacaaaattccgtttcccatggtatcagcccaggcactggacratcatgaggtccaaaatagcctcattcgcatggttgactaccacagtgctagctgacaaatgggagctcagctggggttttcaactaaagcctttgtttt

SEQ ID NO: 43642 - DNA, 201 bp, Homo sapiens
ctcttcctactcagtacagatgatcaaggtgggataacacagaagaatcttcacacccactcatcactctctctctctctctctctctctctctctctctytctctcattaaaagcactaagcggccaatgccttactgtctattccatgggcttcactaggctgtcccttcttaggcctagaacgaaatgggcttcacaa

SEQ ID NO: 43643 - DNA, 201 bp, Homo sapiens
gattagaggcatgcaccagaaaacaaaatattttattcatcattagtaacatttgccagaactctgtgctgtttaaacttcataaagtatatcacatgtakgatattttctagttttctagtctcttctgtatatatgccagaataatatcaaatactttcatttaatcagttatgattattttataccaaagaaatctca

SEQ ID NO: 43644 - DNA, 201 bp, Homo sapiens
gcttagtatccatcgctcctttataattccacatattcacgtaagaaggcaatgataattcaggaggtacttcaagatcagtcagtgcctcctggttattaaaaaaaaaactttataaataaaaaggctgtaccccaataatataaatttgtcaacaatgtggagatataaaaatttaccccagaacatcaggaagaaaca

SEQ ID NO: 43645 - DNA, 201 bp, Homo sapiens
aagagtatcctaagcattccccaacattcttaagggaactgttcaactgggaatggccacagctacagctaccaagtactaacagtataaggaaggatccwctggtttgacatataggctgatatattttagagtaatataaggacccacagactcctgttctctgctacttcattgcaaactatgcagggattctcattt

SEQ ID NO: 43646 - DNA, 201 bp, Homo sapiens
tagttaatttgttttgaatggtgaggcaaacaaagcatcattattcctatgaacatttaacagtttttgagtaatcatgatggcatgtattgaacattttrgtgaaacaaatatctgctaatgatggaaatgtatttgctagtggtacaagtcttacaagacacgctgcagaagaaccttcagaaaataacctctgacctt

SEQ ID NO: 43647 - DNA, 201 bp, Homo sapiens
tacatatatgacatgaaaaagaaatacatttttgttttaagctatgactttaactagtttttttaaattgtttttgacagtgcagcatagactagcctatsttgactggtagaacaaactaaagctgtgtgaatgaagaaaaaggcatccagaagtgacctgtcaaaataacctcaaagagtcatgggaaccttccttagt

SEQ ID NO: 43648 - DNA, 201 bp, Homo sapiens
tatatatatatacattatctcttaggatcatataacaaagtttgaggcaggtggatgatatttgtatccccattttatagataagaacgttaaaacccacrgagtaaattgtttaaagtcactcaagtactaaaccttactcagtgtgatcaaaagcccatattctttattgtaacttatagcatataagctcctataagg

SEQ ID NO: 43649 - DNA, 201 bp, Homo sapiens
ccacagaagtgaaacaatttttaagtatgtgtgtatatttatatatttgtctgttcgtattagaatcattttatgacaaatggaataattcagtaaccactttaatttaatactgcatgtttaatatttattgagcaataaaccatacactaagcaaaaagttactaaccctcccccaccaaaaatgatttgctcgtattc

SEQ ID NO: 43650 - DNA, 201 bp, Homo sapiens
tgttagccttcatatttcctacatgtgggggctgcatctgcccaaagagttcctctttttctaattaacacaaaggtgatggataggccagtggctgtctygtgcaaatctaggatgcgtttcaataagccagacccagcaaatgattctcaagcttagtaaggtttgaaaaccactggtaagagttttgggagcagaggg

SEQ ID NO: 43651 - DNA, 201 bp, Homo sapiens
ttcagttatgaatttctaagtttatatctggcaactcagtttcatattggactaaaatttggcagtattgccaaactgagatttgatttatttacccaatytaaacaaaatatgtttagctatttgaagtcctataagcacaataaaataaaaagtctttagatacatgacactatttttataattgtataaatcattaag

SEQ ID NO: 43652 - DNA, 201 bp, Homo sapiens
tgccttaattattttagagattaccttgctctgctctaagactatgaatttatttgcttagtggcatgtttccttgtttaactatttaaaaaaacaaaacmctaaagacaattctctttaattacaaagagataatatgtgatgttaagtgttatttagatttaaatttttaaaaatgaaaaatatatgcctatttttgct

SEQ ID NO: 43653 - DNA, 201 bp, Homo sapiens
tttaccttatgtttatacaattcttatctcagggccacgttgctaccataaatcaaatatgccaggtttcaagtttcagcatatgagcacagatgtgagcraacagcttttgatcactcagttatctctaccagagtaactgaaacagggattctcaacacatagaacttctaatccaggctgacctcaattaactgcaag

SEQ ID NO: 43654 - DNA, 201 bp, Homo sapiens
agtctaatacccacatttagcattcaaggtaactgagaaataaagaggtcaaatgttgctcaagatgactcagcaagttaggagccagtgtggaccagatmagtgtccttttctctacaccatgtggataatggatgtttatagcaaagttaacattgaacctgttgagattcatgtagataatctggaattttatgtctc

SEQ ID NO: 43655 - DNA, 201 bp, Homo sapiens
atccttgcataaaacagatgagaagctcatctcactatgagatgggttggagaagtcttcattttctttaagagtttatactcaagcttgtcagtagacawcattaagctgttatgagattccttctcttgctcagttgaatctgcttcatgaaccaagtcaggttctcttccatggcaaaagtaatgaggtggggccaat

SEQ ID NO: 43656 - DNA, 201 bp, Homo sapiens
gtttgatacactatgttatgtcagtgcttctgattgccaaaaccaacagttcatgtttaaaacctttcagaacattctgcagtctgattaggtcacctctsaatactaggaactaaaatgagaccacagctaagaagaaaggagacaggtgcaatttttttcctacttattctcatttcctaataataatataatcaatag

SEQ ID NO: 43657 - DNA, 201 bp, Homo sapiens
cacagaagtgaaacaatttttaagtatgtgtgtatatttatatatttgtctgttcgtattagaatcattttatgacaaatggaataattcagtaaccactttaatttaatactgcatgtttaatatttattgagcaataaaccatacactaagcaaaaagttactaaccctcccccaccaaaaatgatttgctcgtattca

SEQ ID NO: 43658 - DNA, 201 bp, Homo sapiens
gagccacgtgcgtaggttttgaaacacggacacagggcaggactaagggagagggaagcagaatatgttgtaaggacttaactttttctctgaatgaaacrggtggccacaaagtggcacatgacatgacctgattgacattgtaacaggggagcaaggcagaattagagagacagttataagagtatcacattgattcag

SEQ ID NO: 43659 - DNA, 201 bp, Homo sapiens
acagaagtgaaacaatttttaagtatgtgtgtatatttatatatttgtctgttcgtattagaatcattttatgacaaatggaataattcagtaaccactttaatttaatactgcatgtttaatatttattgagcaataaaccatacactaagcaaaaagttactaaccctcccccaccaaaaatgatttgctcgtattcac

SEQ ID NO: 43660 - DNA, 201 bp, Homo sapiens
cagaagtgaaacaatttttaagtatgtgtgtatatttatatatttgtctgttcgtattagaatcattttatgacaaatggaataattcagtaaccactttaatttaatactgcatgtttaatatttattgagcaataaaccatacactaagcaaaaagttactaaccctcccccaccaaaaatgatttgctcgtattcact

SEQ ID NO: 43661 - DNA, 201 bp, Homo sapiens
agaagtgaaacaatttttaagtatgtgtgtatatttatatatttgtctgttcgtattagaatcattttatgacaaatggaataattcagtaaccactttaatttaatactgcatgtttaatatttattgagcaataaaccatacactaagcaaaaagttactaaccctcccccaccaaaaatgatttgctcgtattcactt

SEQ ID NO: 43662 - DNA, 201 bp, Homo sapiens
catggtgaaaccccatctctagtaaaatacagaaaattagctgggtatggtggcgtgtgcctgtcttcccagctgcttgggaggctgaggcaggggaatcrcttgaacccgggaggcggaggttgcagggagctgaggtcacgccactgcactccagcctggcaacagagcaagaccccatctcaaaaaaaaaagaaagaa

SEQ ID NO: 43663 - DNA, 201 bp, Homo sapiens
gggtcattcttctacttacaacaattccctttggtattccttttagtgcaggcctcatactgattaattctctgtttttgttttgtttttgtattttgggtttttttttttttttggtcagaaaatgtctttgtttcgatattttcaatagatatatttgtattagttacagaattgtaggtttgcagttatcttctctca

SEQ ID NO: 43664 - DNA, 201 bp, Homo sapiens
tatttttagtagagacagggtttcaccatgttggccaggatggtctcgatctcctgacctcatgatcctctggccttggcctccaaaagtgctgggattayaggcgtgagccaccatgcctggcctcacattccttcttttaattatttgcattgtacttacaattttgatattttctttttagtttgtgcatctgtttaa

SEQ ID NO: 43665 - DNA, 201 bp, Homo sapiens
ggtcattcttctacttacaacaattccctttggtattccttttagtgcaggcctcatactgattaattctctgtttttgttttgtttttgtattttgggtttttttttttttttggtcagaaaatgtctttgtttcgatattttcaatagatatatttgtattagttacagaattgtaggtttgcagttatcttctctcaa

SEQ ID NO: 43666 - DNA, 201 bp, Homo sapiens
tcccattgcccctagtcacttcctaccacattctttctgtttgtttatttgtttgtttgtttgttttttgagacagagtctcactctatcaccatgctggrgtgcagtaccatgatctcaggtcactgcaatcttcacctcctgggttcaagcgattctcatgcctcagcctcccaagtaactgggattacaggtgctcgc

SEQ ID NO: 43667 - DNA, 201 bp, Homo sapiens
gatggtcttgatctctcgacctcatgatctgcccgccttggccccccaaagtgctgagattacaggcatgagccaccgtgcccagctgccactttaactctttttttttttttttttttttttgagacggagtctcgctctgtcgcccaggctgaagtgcagtggcacgatctcggctcactgcaagctccgcctcccggg

SEQ ID NO: 43668 - DNA, 201 bp, Homo sapiens
ctttaactctttttttttttttttttttttttgagacggagtctcgctctgtcgcccaggctgaagtgcagtggcacgatctcggctcactgcaagctccrcctcccgggttcacgccattctcctgcctcagcctcccgagtagctgggactacaggcgcccaccaccacgcccggctaattttctgtatttttagtaga

SEQ ID NO: 43669 - DNA, 201 bp, Homo sapiens
aaaacatcaatatgtctttatatattatgttataataatacatacaaatttagtagaaaggaacaaattaactataaaatccagataacttgtagcatatrtaaaaaatagtcttttgagaagattcatgatagatattaatttttcaggcataatcaagaattggaatccaaacagtagaaaattcgtgttagaaaggac

SEQ ID NO: 43670 - DNA, 201 bp, Homo sapiens
tagtgattcactcactataaatatgtacttttctgtattttccactttcatttatttttacttaaaatgagagcataaaggcatatgaggccaactacagyaaatgtctatgttttatgaggtagtttactcttcgctttcacccatttctgatttgattcctgattcctgattttcttcacccaactttttaaaggcaac

SEQ ID NO: 43671 - DNA, 201 bp, Homo sapiens
caacaggactttttgggtgagtagataggaattaagggtccaaagaaaatttgggcactgccttccttttacattgatgacttaaagaagaagaggtacaktagtaggtaaagaagaaataattaccaatttagaaagagggtacagagggtagaaaagaaatagtctaatgtttgcaatatgtttggaacatatattcag

SEQ ID NO: 43672 - DNA, 201 bp, Homo sapiens
acacttcattcagatgtgtaaagagaacacattccaagacgtgccttccacccacagcctcattgaaaaggacgactttgataacaccttaataaatgtayaaaacgaatcttagaggaaaaaagaccaacactatgacagttctctgttgcttttctattgctgacattacaatgtccctgcgttcatctgtattgtgaa

SEQ ID NO: 43673 - DNA, 201 bp, Homo sapiens
ttttcagaaccatgtaggctactacttatccgaatcttctagtaaagaattaagcagtttcatcccaggatttaaaactgttgcactgatctcaccatatrggaatagggggcattagcgggataatatagggacacctgggccacagggccacagatataaccatggaggttagtcaggtcagcacttcagtctctaaat

SEQ ID NO: 43674 - DNA, 201 bp, Homo sapiens
agtttccatgacgaataaggacaagtatataaaatcctacagatatatgacccataacacattacagagcactgatttcccagaggataatgtaaaactcrtgtacccagtaacagttctatttttgttctcttctataactcaaatctattcatgctgcacatttacttttacataaaaatgtattttagttatctgggc

SEQ ID NO: 43675 - DNA, 201 bp, Homo sapiens
actacctgttaaaaatgtaccattctagggttgaaaaataattaatgttaaaaataatagctaatgttttagcacttgctaggtgataggctctatgctamgtcctttgcatgcactatgtcatttaattcttagaacaacggtaaatggtagatactattattatctcaattttatagttgatgataatcgaggcttagg

SEQ ID NO: 43676 - DNA, 201 bp, Homo sapiens
taaccaaggatataaaatacagaaggactgcatttgtgattgtggttcttaataggtagccactgccattttcttcccaaccatggtaacatctaaactgsagtttttattgagctatttattttgtacaacatcaaacataacaaaattgataaggagattattctgccactcaacccctggcccaatgccaacagcttc

SEQ ID NO: 43677 - DNA, 201 bp, Homo sapiens
atttttgttatctggtctttcaaccaagtacttgtcaaccaagaattgcttacaaaattttcctatcaattcctaaggtgaaacaattaacagggttaacwgtccaaaatcattagtcaggtcattggcagaaccaggagttcaatatgagatattttttaaatgtctctctttatattgtctgatacttaaaatctttaa

SEQ ID NO: 43678 - DNA, 201 bp, Homo sapiens
atacaggtatgaatggagtcttgcctttccagtaagatattatgagaacattagggaccctaagagagaagctgaagtccttcagctgacctggtaggaaraaggggagaagcataagaccccagggacacaatgcaagctacatcttaagcagactgtctgcagagggcttgagccttccagctctgaaggcgccctcgg

SEQ ID NO: 43679 - DNA, 201 bp, Homo sapiens
cctacagcatgcagaatttaacctgcctcttgctgggatccaaagaggcagggagggcatggcaagaagaaccagaaggggtgacagccccaagtgcttgyatttcgttaaaaaattccctcttctcaagaaagaaaattattccttttacgtgagctactggattgttttgcaggctagagccattttctgctggattgg

SEQ ID NO: 43680 - DNA, 201 bp, Homo sapiens
atagcaggctttggcaggaagaggtataaaatattatcttaagaataaaacagtaggtactgaaattagacaaagacaattgaaatagaaaaaaattgttmaccttgtgaggttatataaaatagaataaaagagatcaatgaatagataaggtcagatggcaaaagataagctaagtaataagacaaggaagaataaaag

SEQ ID NO: 43681 - DNA, 201 bp, Homo sapiens
gagttatttggaagaatggcactaaagagaatgagcccctttaagggcagccaagagctagattttgctagttaagcatttaatgtaaaacagaggccaaytggaataatcattttgtactggaaaaaagaaacacaggctttggagtcaaacagaattagtttcaaataccagccttgcccctcagtagtggggtgactc

SEQ ID NO: 43682 - DNA, 201 bp, Homo sapiens
tggcctcccaaagtgctgggattacaggcgtgagccaccgcgcccagccacatccagtttttctagtagtttattcctaaatcaatatcctgactacagtyaagcatcctaaaaatgaatgattacatttatagctgttttctttacaccttcatctatatctctaaatattgttctgattagacctcctgctttaaaact

SEQ ID NO: 43683 - DNA, 201 bp, Homo sapiens
ctgaattctgcatataattcccacttagaatgttaggtcccagcatcgcaatacatctactgacatgagatttttttttctcctcagagaggaaatttatrttttattatttatcattcctatgcttaagcttgcttattggatttattcaataggcatcatcttcatcatcttatagatgtgcatagaaaaggtgaagta

SEQ ID NO: 43684 - DNA, 201 bp, Homo sapiens
catggtgaaaccccgtctctactaaaaacaaaaaattagctgggtgtggtggctggtacctgtagtcccagctactcaggaggctgaggcaggaggattgyttgaacctgggaagcagaggttgcagtgagccaagatcacgccactgcactccagcctggcgatagagtgaaactctgtctcaaaaaaaaaaaaaatgta

SEQ ID NO: 43685 - DNA, 201 bp, Homo sapiens
caaaggttcttaaaagccataaggatatcaggggtgtcttaaatttccccaacaacctccatatccctaatgataagttgccactgtaaatggctgttgtrtaatccatcatgaatatagatttagttattgactgggaattctggtcaaggaggaatattttcaggttttatttacactgatgataatgtgtttcctcat

SEQ ID NO: 43686 - DNA, 201 bp, Homo sapiens
ttaaattacttattttgtttcaagacggagtctcactgtcaccccagctggagtacagtggtgcgatctcggctcactgcaacctccatctcccaggttcmagtgattctcctgcttcagccttcccagtagctgggattacaggcacccaccaccatgcccagctaattttttgtatttttactgagatggggtttcacc

SEQ ID NO: 43687 - DNA, 201 bp, Homo sapiens
tttcatacttatgtggatataaatataaattttgaagaaattcatagcaagacctcatccctataaaatgaaactcatctgaaggattttctttaaaaaaygttacttgaactaaaacaggtgcaagatttttatgcaacctggcagatgcatacagaatatcacttcatttagttgggacagaatatcacttcatttagt

SEQ ID NO: 43688 - DNA, 201 bp, Homo sapiens
tgtcagtattaaaaactaagtcaaccacaagcagttttacatcatgtttacaaaatatgctataatagtaatacacttgaggagggttaaaaatggttctytttttattgcttctcagccttttggctaagatcaaatgaacagttctttttctaattgttcaaattgatttcatagtcttgtaatctacatatttatgaa

SEQ ID NO: 43689 - DNA, 201 bp, Homo sapiens
aggttatgagattgctcttggtgacttttgacaatatgagaacacttccctcacctttaatgatgaggcaaggggctccatacacataacattagatagaygagaattccacgaaaaaggataagccatccaatatgctagcatagaccaagatcttaaaataaatacatttgcattctggcagtttgaacagcagagtta

SEQ ID NO: 43690 - DNA, 201 bp, Homo sapiens
cataatctaaaaacagacatataataatatcatgtggaaataccatgataatttaaagagaaagaaagcaagaacaagagtgagagagtaagtgagtgagwgaatgagtgaaaaattgagagatgccaaatggggagataagaaatgcttttcctacatggaatcctctgtcttctgcttgctaggcatgtattggaatgg

SEQ ID NO: 43691 - DNA, 201 bp, Homo sapiens
aacgaaatgggcttcacaaatagaaattattctaatccaaataatatttccccaagtctcacagtgcaaaacaccacagcagagagcacatggtgatcaakaaagacagcattatcataaatatttgtatttcttatgctaacagatcccattcttccagtctgtggcattgtcccaaactgccccatcaaaggttctaaa

SEQ ID NO: 43692 - DNA, 201 bp, Homo sapiens
ccttctgagtagctggaattacaggcgcctgccaccacgcctggctaattgtctgtatttttagtagagatggggtttcaccatgttgacaagtttcatarattaaaaagtaggataaataaatacagtagagagaaataacatttcagaaatgtcagtattaaaaactaagtcaaccacaagcagttttacatcatgttt

SEQ ID NO: 43693 - DNA, 201 bp, Homo sapiens
cactggccttttctgtttcccaagcaaaaatcagaattgaacaggaaccaaaactattgagaccttccttctgtttcccaagcaaaaatcagaattgaatrggaaccaaaactattgagaccttcctacccacctgtgattaaatgagccaaatgagtagcaacgtggcagatggccctacagttaatgagattcttgcaa

SEQ ID NO: 43694 - DNA, 201 bp, Homo sapiens
atcaagtgtattttttagaaattaaaacatttctttaagtaaattgagaatttaaagacagtgtgatacatacacaaacatacatgcataaatatatacaygtatatatttaaggaatatatgtaaataatatatttaaggatgccaatttcccagaataaagtatactttaaatcccacttctttccaaagacaaagaat

SEQ ID NO: 43695 - DNA, 201 bp, Homo sapiens
ttaatagtccagcatcatataggaacttgtaagacatgtggattccaggacctataccagacctactggatgaaaaacttgggtggcagggggttgactasttaaagaagtgggtggtgatttttgtgaatgctaaagtttgagaatcactcttgttctattgtatcctaaccaaataataggataattaacactaataat

SEQ ID NO: 43696 - DNA, 201 bp, Homo sapiens
ggagtgaagttatacacattgtagtctatcctacaatttttttttttttgagatggagtctcactctctctcccaggctggagtgcagtggcaccatctcrgctcactgcaacctctgcctcaggggttcaagtgattctcctgcctcagccacccaaatagctgggactacaggcatgccccactacagccagctaattt

SEQ ID NO: 43697 - DNA, 201 bp, Homo sapiens
tatgaatgggaaaaagaccattagtaattagttatttttaaccatctaactttgtactttttatgtgaaaggtacatagcattgatgttgatacgagacastgatatgagacttggcacatcactggaaaattactgctagggcaaatatcattgatgtcaagacactactagtgtagcagaatcgaaattattcctaagg

SEQ ID NO: 43698 - DNA, 201 bp, Homo sapiens
agaaactttaaaaaactattcttatcctttataatcacaaactcaaatattacatatgaatgggaaaaagaccattagtaattagttatttttaaccatcyaactttgtactttttatgtgaaaggtacatagcattgatgttgatacgagacagtgatatgagacttggcacatcactggaaaattactgctagggcaaa

SEQ ID NO: 43699 - DNA, 201 bp, Homo sapiens
caatccaattatacttttagttatttttaaatgcacaattaattcattattgactatagtcaccccattgtgctagccaatactaggtcttatttactcaytctaatattttataccctcagttgttagtattaagactaaataaatattaatcataagatccaaagggtaggtgtaaagtcagaactatgcagtaagata

SEQ ID NO: 43700 - DNA, 201 bp, Homo sapiens
aagaatacaaattatatttatattggatcccttttttttcttttccacatctttcatcttcccataataaatgttgtgtttttgtgcatttgaactaaatwttatgggatttttttcaaagcttttctccatatttctaacttggttttcagtcacatttattccacttgttgttattgcttctaatatttttgtctatga

SEQ ID NO: 43701 - DNA, 201 bp, Homo sapiens
tataatggtttccaaggtcaatgccagttcaaggaagaggttcgttgctttgcaacacttttcagggagaaggtaggatcaggagctccagtgtttccttmtaaacaagcacaaaatatgatatattaaaacacctatatttataactaatctcaaattcacttatcacttttaacttggtattcatatattcagaataat

SEQ ID NO: 43702 - DNA, 201 bp, Homo sapiens
cctgttaagaaagaatataccccctcgaaaggttcaattctacaacaatgagtagttaataggttcttagaagggaggaagtcattgtactactgaatagyaataaaatctatgattcagtgtgtttcaaacatttaggaatgctttttgatgaatgggttttttaacagctactgaattggatttgtcctctttatataa

SEQ ID NO: 43703 - DNA, 201 bp, Homo sapiens
tcacattatttgcagaggttggggagtcccacaaatcagcccccacaacaacaaatatttatttattgaactcttggaacagttacaaagaaatataagasacagtttctgttttcaagaaccttacaatatgggaagataaaatatttacagatacaaattaaccaataaaataaagacagagatacaagcaatgccaca

SEQ ID NO: 43704 - DNA, 201 bp, Homo sapiens
cacactttggggcattttgctttgcctcagttaaagagaaacatcacttttcattggcactacaaaaataaaacagaggttaacacagaagggtccagggmagagtccattagtggaaaagctaatttggcagctgcatcaaactcctggagatcatgagcagtgcttctaggaagcactaaagagtttgaaaaacacaga

SEQ ID NO: 43705 - DNA, 201 bp, Homo sapiens
ttgacctcatgacctgagatggtcttgatcttttgacctcatgatctgtccacctcagcctcccaaagtgttgggattacaggcgtgagccactgcactcrgcccacacatctttatacaagaggagtgaagttatacacattgtagtctatcctacaatttttttttttttgagatggagtctcactctctctcccaggc

SEQ ID NO: 43706 - DNA, 201 bp, Homo sapiens
caattgtaaatattcataaattagggaccaggattcctatttcctaaggaatgtgctcagcctgggagaaacctcactttagaccagtggggctcttgggmactttcatcatgacatttaaacaataaatgtatctgtcaggtgatggtggattcacttcggaggaactgacacctttgatgaccatcacaggactgagtc

SEQ ID NO: 43707 - DNA, 201 bp, Homo sapiens
tgacaaagaataattttctcattataaataattagaagcaaaaatatccctcccttacaaatttagataatagagactatttttatttttattacatttargaatcattgggttcctaaatggatatcctacatggatattctaacgaaataagtatttccagatagcatagccttttaatgtcatctcattaaacagtga

SEQ ID NO: 43708 - DNA, 201 bp, Homo sapiens
tgcctcgatcaggagatggtctcgatcttttgacctcatgacctgagatggtcttgatcttttgacctcatgatctgtccacctcagcctcccaaagtgtwgggattacaggcgtgagccactgcactcggcccacacatctttatacaagaggagtgaagttatacacattgtagtctatcctacaattttttttttttt

SEQ ID NO: 43709 - DNA, 201 bp, Homo sapiens
tcatactttaaaattacatacatttttaaactggcacaaaagtactgtcttgggagaaggcaagaaaatagataaaatgttcatcagatgataacaattgyaaatattcataaattagggaccaggattcctatttcctaaggaatgtgctcagcctgggagaaacctcactttagaccagtggggctcttgggcactttc

SEQ ID NO: 43710 - DNA, 201 bp, Homo sapiens
taaatgaaacagatagtagaggcatcaaaatgaaaaagaataaagtcatcatcaagtgtattttttagaaattaaaacatttctttaagtaaattgagaayttaaagacagtgtgatacatacacaaacatacatgcataaatatatacatgtatatatttaaggaatatatgtaaataatatatttaaggatgccaattt

SEQ ID NO: 43711 - DNA, 201 bp, Homo sapiens
gcactaaacttttctgctgtgttgcacatagtgcatgcagaatgcatgtagaacatgccctgaagaatctgcaatgcagataagaggaaagcattattccyaatttgcatatcacaccacacacagtaactgatttgtcaaatatcaaacaatttacatattctaggcctcctgctctccctttcttgagcgttcggtcta

SEQ ID NO: 43712 - DNA, 201 bp, Homo sapiens
tgttttatcagtgcatagacatcaattttttttttttttttaagatggagtcttgctctgttgccaggctggagtgcagtggcgcaatctcggttcactgmaacctccaactccctggttcaagcaagcaattctcctgtctcagcctcccgagtggctgggtttacaggcatgcaccaccatgcccagctaattttcgta

SEQ ID NO: 43713 - DNA, 201 bp, Homo sapiens
tttcttgcaaaactgaaacaaaatgcttcataaaacacaaaatatattcaaaagtggccacatcatttaaatagttaagattttttattgcaaagataaamggtgcctgcattacataagactctccctgttacttagatggactaggggcattactgaaagacaaatttgcaagacacccataaagctaccaaaattcag

SEQ ID NO: 43714 - DNA, 201 bp, Homo sapiens
actgtggctaggcatgcacaaatttcacataaagatataaagctaatatacatttccttcctctgatttccattgcccggatttcttgcactaaacttttmtgctgtgttgcacatagtgcatgcagaatgcatgtagaacatgccctgaagaatctgcaatgcagataagaggaaagcattattcccaatttgcatatca

SEQ ID NO: 43715 - DNA, 201 bp, Homo sapiens
aatttcatacaatatacattttctcactgaccttatcacccactagcctctctttggcttattacaggaagagaacttcctcatggtctccgtacttacamctccttctgcctataatactcttgccccaaatgtctgcctcctcaactcctctaagtttttttttgttttgttttttgtttttgtttttgtttttttttt

SEQ ID NO: 43716 - DNA, 201 bp, Homo sapiens
tcactggccttttctgtttcccaagcaaaaatcagaattgaacaggaaccaaaactattgagaccttccttctgtttcccaagcaaaaatcagaattgaaygggaaccaaaactattgagaccttcctacccacctgtgattaaatgagccaaatgagtagcaacgtggcagatggccctacagttaatgagattcttgca

SEQ ID NO: 43717 - DNA, 201 bp, Homo sapiens
attctaagcattagtcttagcatatgctgtgtttcacatttagaaatccctaaatgtgttcagaactgagggatgtattattcataacttatctttaaatktattatttaatgcagtatccatttgtaagttagtagatgctgatctcaccaattcattgactgtggctaggcatgcacaaatttcacataaagatataaa

SEQ ID NO: 43718 - DNA, 201 bp, Homo sapiens
aggaagaaaataaatattctaattggcccaactgatttatttgaaacaggaagatttagcaacttagcatttattggttaacaaaccacaggtcttttttycctccacctgctttcttgcaaaaaaaaaaaaaaaaaaaaaaaaaatgcctgtgcctgaaggttatttagaaaaactcttgaaagctattaatagaaagca

SEQ ID NO: 43719 - DNA, 201 bp, Homo sapiens
tgtatttcctggttactaatcaaatttgtttctatttcatttctgagccaggaaggcagacacaagttataggtaaatgtcaggtgctttaactgacctasggcagtcaataaccagtctttcctcccctgatgaagtcaattactaatttagagaccactgtgttccttgtctcttctcctaagccaagtataccacaag

SEQ ID NO: 43720 - DNA, 201 bp, Homo sapiens
atagatggatagataaatggatgaaggggtggaagaaacagtatattttttttcatacttatgtggatataaatataaattttgaagaaattcatagcaakacctcatccctataaaatgaaactcatctgaaggattttctttaaaaaacgttacttgaactaaaacaggtgcaagatttttatgcaacctggcagatgc

SEQ ID NO: 43721 - DNA, 201 bp, Homo sapiens
aaggaaagatcaaaaacaagagagaacaatgaaaggatagtgctaagtgtgaaagaaaaacattaaggaaaggagtcggagggaaagtaagagtgttactkcattatatttaaaccagcctgtcacaaggagaaaagaggcagaaacatgtgtgcttcttgtctgaccacttatctaccaaatccagttcttctaccttta

SEQ ID NO: 43722 - DNA, 201 bp, Homo sapiens
ctccttagcaaggaggaggcaagctttgcaggcagctagtaagagttgtcagttccctccagtgaaatgttctctgcaaaaagtcaatagtcaaaaggcayaatgctgtcatttcagagtgaaattaattcctcttattatttttacctgttgctctgttttcctgcagagtaaatctcagtattctgactgtgtttaaaa

SEQ ID NO: 43723 - DNA, 201 bp, Homo sapiens
cactgatctatttactttcttcgtcaatacaattttattctctgaacttagtgctgttttctcattattcatttcatctagagtaagtctttaaatttcaygtaaatgattattttattggtaaaatgtataacaagtcacaggcctcttaggagatacccacgtttttgtttttgctcttgtttttgtctaaagacagtg

SEQ ID NO: 43724 - DNA, 201 bp, Homo sapiens
aatatcaatgaaataacagcaatatataaataagaccaacctggccagcttaaacatgacgttatctatataaagcctcatagcaacagcagaagatcttkccctccactctcatcatatcctacacataattccaccctaggaacatggtgtttaaaatggcttgcttgtaaaatcagggaattggtttcattcacccaa

SEQ ID NO: 43725 - DNA, 201 bp, Homo sapiens
gccttccttttacattgatgacttaaagaagaagaggtacattagtaggtaaagaagaaataattaccaatttagaaagagggtacagagggtagaaaagraatagtctaatgtttgcaatatgtttggaacatatattcagggtccaggagcactgcctgtatctgattccttgcttctgcttatccagagatgagttta

SEQ ID NO: 43726 - DNA, 201 bp, Homo sapiens
ctctaccctatcaataatacatatatgtctcagtttcatgtcccttaataaataattaagaaatcactaaaataaacagccaaggcattcaaaatacattmgttctccccatagacattgggatggttcccattacatactttttaagagtctgatttacttgcaaaagctacacatattttattaaaatgtaagtaatca

SEQ ID NO: 43727 - DNA, 201 bp, Homo sapiens
ttccctttacttccagtgtgttgatgaagcaataatggtatgagttaatgctgctgctgcttaacctatgtttaaacaactgacatagtacatattgtaawgtttgtagttcctagcaggcaaggcgctatggcagtgcccacatctaccagttaaatgagactacgagaaagatatgtatttcaaaagcacacaagagcc

SEQ ID NO: 43728 - DNA, 201 bp, Homo sapiens
taatcacagaaataaaaaaattaactactatgagattttaagaatgaaatcacgacatactaaaaatgaggggatatgcatgctcaggctaaaaatccatkttgctagtcatggttacttttactctcagaacattttcctagtcaagatgttttgactacttactgattttcagctagagttaaccaatgggagaaaatt

SEQ ID NO: 43729 - DNA, 201 bp, Homo sapiens
gtattgtggaactcttccctgagaaagtgatgttagcgtcatagtatgatgctggtataaagatagacatagaaatgaagcagaaatagagccaaacatawatgatcaatttatttttgacagcaattccaagattatttaaaaagaaaagaaaatcattttgactaaatgatgcttgaacaatatctgtatatgaaaaaa

SEQ ID NO: 43730 - DNA, 201 bp, Homo sapiens
gagaagaagagaatcctccctaatacattctacaagcccagtatcaccctggtaccaaagcaaaggaaagacttaacaaaaaagagaaaactacagaccaratctctgatgaatatagatgcaaaaatgctcaacaaaatagtagcaaaccaaatccaacagcgcatcaaaaaaataatccactatattcacatggatttc

SEQ ID NO: 43731 - DNA, 201 bp, Homo sapiens
gatgttagcgtcatagtatgatgctggtataaagatagacatagaaatgaagcagaaatagagccaaacatatatgatcaatttatttttgacagcaattmcaagattatttaaaaagaaaagaaaatcattttgactaaatgatgcttgaacaatatctgtatatgaaaaaaatgtactgcacattactccatatacaaa

SEQ ID NO: 43732 - DNA, 201 bp, Homo sapiens
tgcttccactaaatgttttatgaaaagtttgcattaaaacttagcacaaatttaaaaaacaatataattacaacttttttttctactacacacaagagagwtaaagagatgaaattcgaaagaaaattttaaaaatgttagcagtttttgctttggcaaagaaagaagatatttgttttttcttcttttttttctaaattt

SEQ ID NO: 43733 - DNA, 201 bp, Homo sapiens
aattataatctgcaatgaagaaaacaataagaaaaatcataatatgttataaattaaggaatatgcttccactaaatgttttatgaaaagtttgcattaamacttagcacaaatttaaaaaacaatataattacaacttttttttctactacacacaagagagataaagagatgaaattcgaaagaaaattttaaaaatgt

SEQ ID NO: 43734 - DNA, 201 bp, Homo sapiens
  misc_feature (1)...(201): n = A,T,C or G, or insertion/deletion polymorphism (see Tables 1-2)
aggcagattttcagcttagctcaaagcaaactataattaaataaaacaataaaaattttaactcaatgaatatcctaggagttaatctgctgtggtaatcnatagtgacataaaaacaagatgcatagagctgaaaaaggcatctgtccacctgagtgaattcctgtagtaggcagcatttcaagatttagtttgattcaa

SEQ ID NO: 43735 - DNA, 201 bp, Homo sapiens
ttttagatggagtataatttgtttcaatcttttggaaaagccctttaacaatacaaattaaacaaataaaaaatatatacatatatatttgtgtgtgttcrtgtatacatatatactttaaaataaaaacatacatatttattctttgactcaacacttctcctaggaaagtgttatctgaaaagttgatcatcttaatta

SEQ ID NO: 43736 - DNA, 201 bp, Homo sapiens
aacaacaacaacaaaaaccaaaacactgcaaacaaacaaaaacagtccaaggccaaatgaattcacagccaaattctaccagacatccaaagaattggtamtaattcaattgaatctattccaaaagattgagaagaagagaatcctccctaatacattctacaagcccagtatcaccctggtaccaaagcaaaggaaaga

SEQ ID NO: 43737 - DNA, 201 bp, Homo sapiens
tatataaaacttgtactttttggtaaaacatgtcataaataaaattaaaactaattatatctgggaaaatatttgcaataaatgtggccaatataaagttyatatttttaatatgtacagcactcttagaaattgttttttaaagattacctaatagttttatcatggtttattttacacacaataagccattgaaaagaa

SEQ ID NO: 43738 - DNA, 201 bp, Homo sapiens
agagagaagaaaagagagagaagaaaattaaccatttttggaatgagtaataaaattcaataagtaaaagaagtttctttaaaaagtcaatatttttttttaaggaatgatgagaattatgtggagctttgagacaaataccatggaaatttatcagaagtgaaaaataagaattgaataaaaaatattggttaacatctt

SEQ ID NO: 43739 - DNA, 201 bp, Homo sapiens
aagagtggaaataaggaagataattactggagaagaaaaacaacttaaaaggtgttgtttagattatatgtttagagagagagaagaaaagagagagaagwaaattaaccatttttggaatgagtaataaaattcaataagtaaaagaagtttctttaaaaagtcaatatttttttttaaggaatgatgagaattatgtgg

SEQ ID NO: 43740 - DNA, 201 bp, Homo sapiens
caatattaaggtgaatcaagaaagcatttagaaaactttcactgttgcctagtctgttatacagaataacttactttaataatatataataaaaaatattrttttatcaataaaagataaaaaagatatttaatcaaaaaatgctgacaatattgaacatcttatctataaaacaaattcataagaactttttgcaaagct

SEQ ID NO: 43741 - DNA, 201 bp, Homo sapiens
tcttagtatgtttgaaggtctcagaagccatttttctgagaaaatatacactacctaaattgagccagaaaataaaaacattcttaatgtaccattagtcrtgagtagtatcaaaatgttagttacctctaaataagaatttggtcccaaagtatttagggtttttaaaagaattattcctatgctatagaatttgttgta

SEQ ID NO: 43742 - DNA, 201 bp, Homo sapiens
tgttgagctgtttttcatatgtttgttggctccatgtatgtcttcttttgacaaatgtctgttcatgtccactttttatagcactggtacaagaacagacmtgtaaaccaatggaacagaatagataactcagaaataagaccacacacttacaaccatctaatcttagacaaacttgacaaaaacaagtaatggggaaag

SEQ ID NO: 43743 - DNA, 201 bp, Homo sapiens
tatctacctgacatcacttaatgtagtcttaaatattgagtaatcgaggatagtaaaattgcttgtgcttttggtggctttcttttaaaattttcctcacrtgattgtattataggctctcaaagagtaaaggatagaggaggacttagcattacttaaaggagataaacgtgctgctggaaaagtaaagctggacttggg

SEQ ID NO: 43744 - DNA, 201 bp, Homo sapiens
aaacaggagatgatacaatctcacttaatctgggtttcattgacaagatcagaaaaggaatatctggatgtacacagggaaatagtgatggagattaaaaygaatacatacacttatttacatgaaacgtgtatatgggtaaagatccccttgttcaaatcgatgaagaccaaactctttctacagaaagagctaacataa

SEQ ID NO: 43745 - DNA, 201 bp, Homo sapiens
atttttcgttcctgtatatgcatacgaaaggcagagctgcccagtggaaatagccaaagatacataggttctaatgctatttctgacttttactagctttrtgacttgagcaagtgccttaactgaagagcaactcatttctttcacttgaaaaaataaaatacaaataacccttcccccactaatttattgtaaacgtcg

SEQ ID NO: 43746 - DNA, 201 bp, Homo sapiens
ataaatatttacagattgtgtctttcttttttacaatgtcattactccaagaagctcctggtataaggaagtgaaatatttcaattattgttttatgactyagtaatttgaaacttggaatgcattttcccaaagggaaggaaggtagaatggtatttttcgttcctgtatatgcatacgaaaggcagagctgcccagtgg

SEQ ID NO: 43747 - DNA, 201 bp, Homo sapiens
gtgagatgctatgatgtacaaagtatgtattcttcaggagctcacagttagttcgggaagagagagcccacagtgacagacttagagtaatggatgtctargtcctaatggaatgaggtctagaatgacttcccagggcacatgaagtgaaagcctaaatccaaaaaggctaaggacgttacccaagtgaagaggatggca

SEQ ID NO: 43748 - DNA, 201 bp, Homo sapiens
catttacctttgtgtattttataacttttgatgctgtttcaaatagcattatgtttaaattcaattatccatttgcttattggtgttgtataaaaatatamtttaatgttgaccttgcagcctatgatctggctaaacttactagttataatattttgaagattaatttcacatgattttactttgttgtctgtaaattcc

SEQ ID NO: 43749 - DNA, 201 bp, Homo sapiens
ttaattctaccaacaacctttgtaacaagcattttaatgatcattacagattaggaaattgaggctcagagagtaagcaatttgtctaaaaccacacaaarctaagtaatggagctggattaaaatgggagtcctcactccaaattctatttttattagtctacaaaccctacgtattggtgattttgttttatcatcaca

SEQ ID NO: 43750 - DNA, 201 bp, Homo sapiens
caactgagaaaaggatgaacagagttagagcattgaatttgatgccattactccagttgctagaattctgaaattatgatgatgttaccaatttaagtggdtgttacataaattcacctcacatacaaccttagatgtattcgaggcatcatatatctagttattttaattttctctacttgccgtgccactgaggtaatc

SEQ ID NO: 43751 - DNA, 201 bp, Homo sapiens
ctcttcaattaaaaaagtagaagaaaatggaggaaagacaatgatggagataaaagcaagaatttatttattagaagaaaggtatcagaagagttgataasttaatcaactctggttatttcaaacaaaacaagactgacccatagtgaatcaaatagtaagagtaaatatatataaagttataaatgttataaattaaaa

SEQ ID NO: 43752 - DNA, 201 bp, Homo sapiens
agatatacaaaagattatttgggactactgtgaagagctctatgcacacaaactagaaaatttagaggaaatgaattaattcctggaaacatacaaccccygctagcttgaatcaggaagaactagaaatcctgaagaggccaataagaagcagtgagatttaatcagtaatttagaaaaacaacaacaacaacaacaaca

SEQ ID NO: 43753 - DNA, 201 bp, Homo sapiens
agaccagcctgggcaacatggtgaaacccagtctccactaaaattaaaaaaaaaaaaaattagccgggtgtggcggcgtgcgcctgtagtcccagctactygggaggctgaggcaggagaattgcttgaacccgggaggcggaagttgcagtgagtcaagatggcaccactgcactccagcctgggcgacagggcgagact

SEQ ID NO: 43754 - DNA, 201 bp, Homo sapiens
cttattattaataaacaggtaagatggagcataaagaaggggttcaatttataatgatagaaagaataatgtaaaattgtattagttgcctgggtgcggcrgatcactcctgtaatctcagcacattgggaggccgaggcaggcagattgcctcagctcaggagttcgagaccagcctgggcaacatggtgaaacccagtc

SEQ ID NO: 43755 - DNA, 201 bp, Homo sapiens
ttagccttattattaataaacaggtaagatggagcataaagaaggggttcaatttataatgatagaaagaataatgtaaaattgtattagttgcctgggtrcggcagatcactcctgtaatctcagcacattgggaggccgaggcaggcagattgcctcagctcaggagttcgagaccagcctgggcaacatggtgaaacc

SEQ ID NO: 43756 - DNA, 201 bp, Homo sapiens
tttagccttattattaataaacaggtaagatggagcataaagaaggggttcaatttataatgatagaaagaataatgtaaaattgtattagttgcctgggygcggcagatcactcctgtaatctcagcacattgggaggccgaggcaggcagattgcctcagctcaggagttcgagaccagcctgggcaacatggtgaaac

SEQ ID NO: 43757 - DNA, 201 bp, Homo sapiens
aaatttttggcccatttacaaagctgtacacagtggcataattttagccttattattaataaacaggtaagatggagcataaagaaggggttcaatttatwatgatagaaagaataatgtaaaattgtattagttgcctgggtgcggcagatcactcctgtaatctcagcacattgggaggccgaggcaggcagattgcct

SEQ ID NO: 43758 - DNA, 201 bp, Homo sapiens
ttattttacactagtgtgtgttgggggatgaaacatgcacaggccaatgtttttgtatttttcataaatttgttaatcagaggaaatggtttaagaatgcrcttaaaaatttaggaggatatgaatgttttggttttgtatcactgaagaaaattaaagcacacagtgcagagataaagtgaatcttaccagtcatcataa

SEQ ID NO: 43759 - DNA, 201 bp, Homo sapiens
aatgcggcaactaagaactagagaattaaataacatatatacagtggtgtgggcatgattccagttcaacataaagatttttaaaaacttttgcaacactrgccacggaatattttgcaaatgttaaaaaaattcccagagaataaatatatgaaaagtttggccattaaacagtcataatcaacaactgtatcctcaaaa

SEQ ID NO: 43760 - DNA, 201 bp, Homo sapiens
tgtaatcccagctactcaggagttgaggcaggagaatcacttgaaccaggcagtcagaggttgcggtgagccatgatcacaccagtgcactcgagcctggygacagagcgagactccatctcaaaaaaaaaaaaaagtacaacttttaagttagattcaaagtttgcaccataataaatgctagaagaagtcacttatatg

SEQ ID NO: 43761 - DNA, 201 bp, Homo sapiens
tatatttttaattttaattttcacctgttattagtatatacaagtaaaatcgatttttgtatgtttatcttatatcctgcaaccctcctgaaatcacttaktagttcaggaattgttattattgtcgttttggtggattccttgggattttctacatagaaaattatgtcatgtatagatagtaggaatagttttatttct

SEQ ID NO: 43762 - DNA, 201 bp, Homo sapiens
tgaaaaaaaaatctgttaaaggcatccatttctcaccagttaataatgtaaaaaagactggattggcatgtttaaattaccagaatcatcagttaaggatwgattaaatgcctgatatcatcacttagaaaagtgtcttgaacttgatggagcttatggtaacaaagtttatatttaaaaaactcactctgcaataataga

SEQ ID NO: 43763 - DNA, 201 bp, Homo sapiens
ttgtttgttacataaaataaaactaggtcaaatggtagaaatgacaggaatatagtaagaatcaagaatcctggcatgaagtattagttctaacttggacraaatataagggtcctgagcctagtagagttcctaggtgggagctgatggtagaatgaagagtgattgttgtcttagatcatatacactagaacagacttg

SEQ ID NO: 43764 - DNA, 201 bp, Homo sapiens
tggattggcatgtttaaattaccagaatcatcagttaaggattgattaaatgcctgatatcatcacttagaaaagtgtcttgaacttgatggagcttatgrtaacaaagtttatatttaaaaaactcactctgcaataatagagggagtaggaaaattttaaaaataaaaattattatttatacctatataatttatacta

SEQ ID NO: 43765 - DNA, 201 bp, Homo sapiens
acaaaagggagtctatgagctctctcaatagcattttctattggtaatcataaggaaaaatttcattccatttttatcactcattctgaagattgataatrtagttgcttgagaaacattacttatgctgtgtgcttattatttctgctgctctcaacgtgaagcatagcatgtgtttttgtgaagaatgttggtacttga

SEQ ID NO: 43766 - DNA, 201 bp, Homo sapiens
aaataatctaattttaatacacttaatgtattgaaataaatcactgagtaaatgttctacatctttacagatttttttaaattccattttttatgtttaayatgaatgagtataatttaattaattttattttattgttttaatattttttatttattttatatatttaggaattataagtgcagatttcttacatgaata

SEQ ID NO: 43767 - DNA, 201 bp, Homo sapiens
atcttgctaatttagtttattgttcacattttgccttcttaaaattttttttatatctaaagcttctattctttagattaagtagaaatgcattaaaacargaaatatactagacaaaagggagtctatgagctctctcaatagcattttctattggtaatcataaggaaaaatttcattccatttttatcactcattctg

SEQ ID NO: 43768 - DNA, 201 bp, Homo sapiens
catacttttgcttggtattcgtagtagttaactagtgttttataatatcctgataagaaaagtctggagcggtgttcagtgatgggatttttcttgatggmattatgtattgttaaatttaaaggatatagtttatgctctttaatagcacatcccactgcataacgtcaatatctacttgaaaaatagtctagttatgta

SEQ ID NO: 43769 - DNA, 201 bp, Homo sapiens
atggtgccaggcaagagagcgtgttcacgggaactcccttttataaaaccatcagatctcgtgagacttattcactaccaggagaacagtatgggggaaaytgcccccatgattcatttatcttcacttggccctgtccttgacacatggggattattacaattcaaggtgagatttgggtggggacacagtcaaaccata

SEQ ID NO: 43770 - DNA, 201 bp, Homo sapiens
gctaaggtgtagacataaacaattaccagccattattctggaggtcacaagatttgcaactcccgcaattactcctgcagataacatcactattacagagmgagcctaagattggccttttgagatatcttttcaggtttttacatttctgaggacagtctacccctgcccatctgtcatgtggccccacccaaactgact

SEQ ID NO: 43771 - DNA, 201 bp, Homo sapiens
atacatttatttgtttatgcatctgtctttgctattggatgaattatatgagtagaggaataatgccttattcatatttatattgtcaccgcctagcaagktgccaggtacatagtaattgctttaaacatatttattgaaaaagcaatgaattgttgatatttcagaacctagtgtgaggttttaatgcatctaataaat

SEQ ID NO: 43772 - DNA, 201 bp, Homo sapiens
atatgaaattggtgaagcaagtgtgaaacgatgctacacaggtcagataagtaaggaaattcacatgccaatctaatttatgaaattagatgcaaaaattscaaacaaaatgtgaataaactgtttagcactagataaaaaagtcattatgacaaagttgaatttattccaggaatgtaatgttagttcaacattagaaca

SEQ ID NO: 43773 - DNA, 201 bp, Homo sapiens
taaatactctgttgggagtaagtctcattaaatgtttatagtgtggaatgtatcagagtgcttactcaacaaccatgctgaagcttttgttaaatttttcrttctggcccttggctgggtgtgagtatgaaacctgaaatttatgagtggagaaaatagaagttgaattggaacactatactggctaaatcaattgattta

SEQ ID NO: 43774 - DNA, 201 bp, Homo sapiens
attttattttattctttctatatgttttagctgtgatttttctacaaagaaaagctgtttcaatttctctctcactgttacagatgggattgatgaaatgrtttaatacattaacactactgaaatcattaatttttttagctaatttgtcccaaacatttttaggggagaacttttaaactagcttctctgtgtttttag

SEQ ID NO: 43775 - DNA, 201 bp, Homo sapiens
aatttagcatccattgatgattcttgctttaatcaattagtacattactggtagcaaaatagtgattttattttattctttctatatgttttagctgtgayttttctacaaagaaaagctgtttcaatttctctctcactgttacagatgggattgatgaaatgatttaatacattaacactactgaaatcattaattttt

SEQ ID NO: 43776 - DNA, 201 bp, Homo sapiens
ctatagtttgttatacatcatgaattgctgaaaacgatcagccattatcatttcaatgtttcttttgcttcattttcttttttctttcttctattacatgyaatgtatgttacaccttttctaattgttccacactccttggatgctctttattaagtaattttttttctcttcacatttcaatttgggaagtaggtaatg

SEQ ID NO: 43777 - DNA, 201 bp, Homo sapiens
aaaagatgcccaaactcagctcttagaagacagagtagaacctacaattcccagcccttcagctattattttccatgtttctaaaataatagctatgtttraaaataagctgctcttttgttctttagatcttttattattatcattatttgtaacaatgttttccagttttcaatttgaattcctctttctccttttgtt

SEQ ID NO: 43778 - DNA, 201 bp, Homo sapiens
aaaaggatgaacagagttagagcattgaatttgatgccattactccagttgctagaattctgaaattatgatgatgttaccaatttaagtggatgttacawaaattcacctcacatacaaccttagatgtattcgaggcatcatatatctagttattttaattttctctacttgccgtgccactgaggtaatcagacctat

SEQ ID NO: 43779 - DNA, 201 bp, Homo sapiens
tataatatgcttggctgtactttcttggtatttatcccgtttggtcttctctgaggttcatctatctatagtttgttatacatcatgaattgctgaaaacratcagccattatcatttcaatgtttcttttgcttcattttcttttttctttcttctattacatgtaatgtatgttacaccttttctaattgttccacact

SEQ ID NO: 43780 - DNA, 201 bp, Homo sapiens
atatacatcagcattaaatcaaatgttaaaatctgaagaacctctaaggcatgagctaattcaaaccctgtctccacaccccacctcagtgtatgcatacmtgtatttctgtgaaaataggtcctggagaggtaatatgactttttttatgggcataaaatcagtttaaagcaaagtgaaactttaacttgagcctcttgg

SEQ ID NO: 43781 - DNA, 201 bp, Homo sapiens
ttaaacattttctcagaaatttttctttctttctttctttttttttttttaatctgagacagagtcttctcactctattgccaggctagagtcaagtggcrtgatctaagctcactgcaacttccacctcctgggctcaagcaattctcatgcttcagcctcctgagcagctgggattacaggcatgcaccaccatgccag

SEQ ID NO: 43782 - DNA, 201 bp, Homo sapiens
ttcagcagcttgttgcaaagccaattcttttagatggtttatgaaacctttaaaacaagcataaaagcctgctttatttctggtagatttattaaacaagktattatgataccactccaaattgaggtacattccagggaagacatgccatagcagaatatatgatgtgaatatgattctatggccaagacactagcttca

SEQ ID NO: 43783 - DNA, 201 bp, Homo sapiens
aaggtgacataataaaatgagaaacaaatacatagtgtttataaattgacacataaaatgtaaattatggcaaattattcatgatacagttttaagaaaayttatttaaaagccaatcacaattcttttcacactctctttctaaatatcaatatacacaatggaaaaaattttaataatcatattatagggtcctaagaa

SEQ ID NO: 43784 - DNA, 201 bp, Homo sapiens
agctagcagaagaaaaggaataataaaaatcagagcagaactaaataaaattgaaacaaaaaaaatccaaaggaccaatgaaacaaaaaatagctccttcraaaagataaaattgttagaacactaggtagattaaaaccaagacaagaagagagaagatccaaataagactaattataaatgaaaatggagatattacaa

SEQ ID NO: 43785 - DNA, 201 bp, Homo sapiens
ctgaacacatttaatatgagttagtgtactttttgaatatgaatctgccctttctaccaatcccatagatggaggccaaattgtaaggtatttataagtastacctgtgccaaatgtcgagtagcatcatctgccttatatgaaactcttattggttatgtagatgaagaaggtgcataaagagtgatgagagcattgtaa

SEQ ID NO: 43786 - DNA, 201 bp, Homo sapiens
ctgaaagatcacaaattgacagcctaacaatacatctgaaggaaccagagaaataagaaaaaaacatacctaaagctagcagaagaaaaggaataataaaratcagagcagaactaaataaaattgaaacaaaaaaaatccaaaggaccaatgaaacaaaaaatagctccttcgaaaagataaaattgttagaacactagg

SEQ ID NO: 43787 - DNA, 201 bp, Homo sapiens
caatttttgtattaggaaatttttatttaatcccccactaaaaacaagtttattccagatataatggccagtacgttacaaattagtcttaacaatgtacytttaatggttctattagacaatgaaacacatttcatttccaactagcttttaaatagctatctatatataagataatcttaaaaagaaatctaatagtaa

SEQ ID NO: 43788 - DNA, 201 bp, Homo sapiens
ttgtataaactttagcaagtctctcagatatatatgtatacacatatgtatatattttatgtatatgtttgtgtctacacacacacacacaaacacacaamtgtactttccccaatcagacttagctcaatttttgtattaggaaatttttatttaatcccccactaaaaacaagtttattccagatataatggccagtac

SEQ ID NO: 43789 - DNA, 201 bp, Homo sapiens
tagatacttagtgtggcagattaatttattgagacattaatttgtattttgttcttactgctgttggaattacatttacctcctgtatcattaaaaataawttttttaaaagggaccccgtaatgtggtcttttacctcagaggcttttgtgctgcaggtttaaagcagaagttaccagatacccataagccaaataagtc

SEQ ID NO: 43790 - DNA, 201 bp, Homo sapiens
aaggtggaaatttaaaaaatttttgaaatgaataacaacagtgacacaagttatcaaaacctctgggatacagcaaaagcaaagctaagaggaaagtttayagtgcaaaatgccaacatcaataattctgaaagatcacaaattgacagcctaacaatacatctgaaggaaccagagaaataagaaaaaaacatacctaaa

SEQ ID NO: 43791 - DNA, 201 bp, Homo sapiens
ttcaggtctgggctcatttatgggatttatgatgcacagttcaagcaggagtatgggagttcttggatttctaggaaaggtgactaactagagacttttgwgggcttataccagattggttctaggtccttgagagagtggaggttgaaaagcagctctctgctccctcacaatgccctggggagcggtgtatctagtgaa

SEQ ID NO: 43792 - DNA, 201 bp, Homo sapiens
agtaaagtctcaccatgtctggtcactcttagggaaacaactttcaagatattaacaggactaaaacattaataccattttctttttaataaagtcccccrctcttgtttaataactcaaagcaacaaagagaaagagaaacacagtgacccacaattctgcactcaagacatgattccccaaatgatctgaatctggcca

SEQ ID NO: 43793 - DNA, 201 bp, Homo sapiens
aagggacactaaataccaatgttttggtctccagtaagtcaccatattttgtcaaaagtctcttttcctaaggttgacacttaagtgcagctggcaacatrtattcagcaggattcttgttcttcccaaatgtccagaatggagatactcctgccaactccctcccgccaaccaggatttgttcttttcctggtacttgtt

SEQ ID NO: 43794 - DNA, 201 bp, Homo sapiens
tgtattagtttatcctgaaggtctcttcagctctgaaaatctgaatttgtgttttcccagccgtcagtttagatgacttgtaaattgaaattacccatctyggcccagccttatataaattgctctgtgaggcctcccctcactcttgctggtatcagacgttttcttccatggtactcacaaagtactttggtaatgtct

SEQ ID NO: 43795 - DNA, 201 bp, Homo sapiens
aaaatgaagatgatagtgataagaatggtcatagtgatggtcgataagacttatatatcaggtgcgagactaggcattttatatgcaatgctgcgtaaaasctcacaacagccccacaacgtaggtataatgtaggtttgatgatgggtcaaaatgtcagctttattactggagctgcattggagagtgcaatgaattctg

SEQ ID NO: 43796 - DNA, 201 bp, Homo sapiens
gtagaacccagcaaaggccaaacactcatccaacctgttgtagaggaggaatccatgcattgtgtagtgaattgtattagtttatcctgaaggtctcttcmgctctgaaaatctgaatttgtgttttcccagccgtcagtttagatgacttgtaaattgaaattacccatctcggcccagccttatataaattgctctgtg

SEQ ID NO: 43797 - DNA, 201 bp, Homo sapiens
cacaaataaatactctcttcctttgaagagtgggagtaagaagtgaaagatgttttttggtgttttatgtttgtttgttttcttttatccagttacaaatygcatttgaatgctagtaacagacattccaaacagtagattaaccaatgtaattgttttatttttgtctaatgacaagaaatttataggtgtatggttggt

SEQ ID NO: 43798 - DNA, 201 bp, Homo sapiens
tcacaagggtattgattggggaagtgataagtgcccatgaaatcttcacaatttatgttcagagattgcagtaaggacaggtgtaagaaattataaaagtrttaatttggggaactaataaatgtccatgaaatcttcacaatttatgttcttctgccatggcttcagccagtccctccattcggggtccctgacttcccg

SEQ ID NO: 43799 - DNA, 201 bp, Homo sapiens
cacagggtcctgaggcgacatacatcctcctcagcttacgaagatgacgggattaagagactaaagtaaagacaggcataggaaatcacaagggtattgaytggggaagtgataagtgcccatgaaatcttcacaatttatgttcagagattgcagtaaggacaggtgtaagaaattataaaagtgttaatttggggaact

SEQ ID NO: 43800 - DNA, 201 bp, Homo sapiens
ggacagaaacccagaggagcatttacttaataacaaaatgctaatacacatggagtttttgagttgtttcagagagaaaacttgcatgctgaagataatgraaatgtatatagttattgtattattctgttttcacactgctgatgaagacatacctgagactgggtaatttataaagaaaaagatgtttaatggacccac

SEQ ID NO: 43801 - DNA, 201 bp, Homo sapiens
tgatttggtaaattaaatggttgcacttttcattatttacaggaagctgtattggtaaaggatccaaaataacctttgctctattttgctcctgcaaatayaatactatgaagtaaattgatgtagtaaatactctgttgggagtaagtctcattaaatgtttatagtgtggaatgtatcagagtgcttactcaacaacca

SEQ ID NO: 43802 - DNA, 201 bp, Homo sapiens
agaaaaccatctggggatggagatttcttttccaggagtttttatattatgaattccacttccttaataattatagagctatttaaattatctgttgcatrttgagttagttgtgatagcttttgcttttgaaggaattggtttatttcatctaacttgtcaaacttacatgttaaagttgtttgtataatcccttattgt

SEQ ID NO: 43803 - DNA, 201 bp, Homo sapiens
accattgttaaatcaagtcagggaccatctgtagtctgtatctggggagtgccgagtgtgatacattgaaatttgttagagtagatagataggatcatacrggttgagcatcccttatctgaaatgcttgggaccagaagtggtttggattttggaattttttggattttggaatatttgcatatacctaatgaattatct

SEQ ID NO: 43804 - DNA, 201 bp, Homo sapiens
gtctatagtatttttgagtatatatctttatatagctattttagtagtttatcgaggtatggcattatatacacataattatcataatttaataaagttgrcattttaccagtttgaggaaaatgtagaaccctttatgtaattttatctcactcatttattatataaatatattaaatatttgttttatgtatattgaga

SEQ ID NO: 43805 - DNA, 201 bp, Homo sapiens
ttcacaagggatccagaatatgacaaccccaccagaacctcaggcagcaaccctgggaagtgcccttgatgagctggaggtaagtcgggagaaagataaastgtgatctgatgtcctaatacagtaataataataataaaacagaagaagatccacatgttggcgtttagagcatgagaaaataaaaaatccagattagtc

SEQ ID NO: 43806 - DNA, 201 bp, Homo sapiens
taccagtttgaggaaaatgtagaaccctttatgtaattttatctcactcatttattatataaatatattaaatatttgttttatgtatattgagaaacacrtaagactgttttaatttttgcttcaactatcaaacataatttagaaaactgaagaaagaagtgtatttttattcatatttttacttttttgttatttctt

SEQ ID NO: 43807 - DNA, 201 bp, Homo sapiens
aatgcacttaataatgtgaatgccagagtattttagctacttataaggatttgactgacaaggacttgactgaatagtaatggatctttacacatctgctytacggggacctttacttattaactgtgtcattgtttatactgcagaatttttaacagaaactgaaagaatgtagaaataatagatgcccttgattataac

SEQ ID NO: 43808 - DNA, 201 bp, Homo sapiens
tagttcattgtttgtctgtaggccctttccccccaaaagaaagaagaacaaggtccttgtaggattttttcatatctgtacactggagtccagcacaaggrctagaatatgctaagtgctcagtaactaattgttgaataaatatcaaagaaagaatgatataggattaatttattagtatttctgaaaaagaaaaatagc

SEQ ID NO: 43809 - DNA, 201 bp, Homo sapiens
tatgtgtgtctctgcgtgtgagatgggtttcctgaatacagcacattgatgggtcttgactttatccagtttgccagtctgtgtcttttaattggagcatstagtccatttacatttaaagttaatagtgttatgtgtgaatttgatcctatcattgtgatgttagctggttattttgctcgttagttgatgcagtttctt

SEQ ID NO: 43810 - DNA, 201 bp, Homo sapiens
agattcttctccttattgtaatattcaccctggatgcaggtcctgtagccttcacacacatggctttagctcccaactgtgagctggtgtttcacatatcyctatttctggcccagactctcctctgaagtctagattcatgtgtattgtattttcatttggatcttgtgctgatatattacatttggcagattacaaaat

SEQ ID NO: 43811 - DNA, 201 bp, Homo sapiens
atttttaatcttgtagttttgacctgaggtttttgtatcagccttgttctaaaactgaattcaggaaaatgtttctaacttagttgtattagttacaacarttctttgtcaggaagatatgcctgaaatatatattctctattgggtcaccgcagatgggcagagttaaaggagagttttttgacaggctttaagagcaga

SEQ ID NO: 43812 - DNA, 201 bp, Homo sapiens
aataccgtaagaatagtgggctgaggggcactatcaggagctcaaattttgatacagaatgtctgagatgcctactagcaagccaactgactttcataccrgttttctggactagcttttacgtggtacatttagaaatgtgcatcttcctctctctgaagcatttcttaagcttttcatgctttccttataattcctatg

SEQ ID NO: 43813 - DNA, 201 bp, Homo sapiens
aattggctttgtgcagtgggcaggaagaacccattgggtcgtttccggactgtcatgtcagtttgattaatcagtagatcaacatactttgttttagatcycataaattcagctttcttattagtagctgtattagtctgttcttgcactgctatgaatacctgcgactgggaaatttataaagaaaacaggtttaattgg

SEQ ID NO: 43814 - DNA, 201 bp, Homo sapiens
ttatagtactctttgataagcaaaattttttagttttcatgaaatgtgatttatctatcttttcttttgctgtttgtgcttttgttgtcatatctaataarttgccatctaaaccaaaatcacaaagatttactcctatgttttcttctaagtgttttatagttttagctcttatattaaaacccatttatgcctgaggtt

SEQ ID NO: 43815 - DNA, 201 bp, Homo sapiens
ttccttacaagtactggtaagtcagttgccaataacagctgcacaatttctcttatttgaatctacatagctacgaatattcatacatgtgggaaagattytagtctgtgttgcttcttttgacatacattgctatacagtgcttgcacactttggttatgcgatttgaaatttatcactgagaagtaaatatattcattg

SEQ ID NO: 43816 - DNA, 201 bp, Homo sapiens
gttggtggcattaaaatatcagggcaaaggattttgtgattcttttagattttccctggaagctaagatatagctgcttaaacaattatgttcatattctrtgttctagaaaagcaaaaggcaaagtgttgcaaacaagtttagtttatccctacatcccatcccctatcttatatgaagagcttttctctgcatttctac

SEQ ID NO: 43817 - DNA, 201 bp, Homo sapiens
aacttcaagttccattaatatcccaccgtaacacaagcctaccagctttctggcgatataagaaatatcttcccagtttttcctcaggtgctttacactcrttcctctcttctgcctgacacatcccaggaaattttttcatctctaaccactcaacttcagtctcaaatcatataactctatggaatatctttcatctcc

SEQ ID NO: 43818 - DNA, 201 bp, Homo sapiens
atatagctgcttaaacaattatgttcatattctgtgttctagaaaagcaaaaggcaaagtgttgcaaacaagtttagtttatccctacatcccatcccctrtcttatatgaagagcttttctctgcatttctacccaaggacttctacgtacatcttactgaccaacatcacatggttatccctagctgaaaagtaggctt

SEQ ID NO: 43819 - DNA, 201 bp, Homo sapiens
ttttgaaaatatatgattaaatgtattcttaaaccagttttcaggaagtttctttccatgtatatagtcccataattttcccagaaattattttaaattgktattttatttattattctgtctcagcatttatgcccggcttgcaaggatggaaccagggggtggttatgtggaatctgtagatccgtctttttcaatgat

SEQ ID NO: 43820 - DNA, 201 bp, Homo sapiens
agcaagaccgtgaacccaccggaaggaagaaactctggacacatctaaaggaacaaactctggacacaacatctttaagagtggtaacactcaccacgagkgtctgtggcttcgttcttgaagtcagtgagatcaagaacccaccagaaggaaccaattctggacacactcttacctatatgcatgaaggcagagaattgg

SEQ ID NO: 43821 - DNA, 201 bp, Homo sapiens
ccttgtgccatatacaaaacttaactcaaaatgaatcaaagacttaaacatagtgactaaaaatatagaactcttagaagaaaacatagagtgacacttcrtgacatcagatttggcaatgtgcatatgacaccaaaagcacaaaaaatggaaaaaaaaattggacttcatcaaaatttaaaacttctgtatatcagagga

SEQ ID NO: 43822 - DNA, 201 bp, Homo sapiens
cagatttcatattgttcaaacacacatgctctacaaacaatttgtgcagttaacacaatcatcacagggtcctgaggcgacatacatcctcctcagcttaygaagatgacgggattaagagactaaagtaaagacaggcataggaaatcacaagggtattgattggggaagtgataagtgcccatgaaatcttcacaattt

SEQ ID NO: 43823 - DNA, 201 bp, Homo sapiens
agaccgtgaacccaccggaaggaagaaactctggacacatctaaaggaacaaactctggacacaacatctttaagagtggtaacactcaccacgagtgtcygtggcttcgttcttgaagtcagtgagatcaagaacccaccagaaggaaccaattctggacacactcttacctatatgcatgaaggcagagaattgggatg

SEQ ID NO: 43824 - DNA, 201 bp, Homo sapiens
agttcttttctgtattccctaagtgtcagccggtctgagaaataaagggacagagtacaaaagagataaattttaaagctgggtgtccgggggagacatcmtgtcggcaggttctgtgatgccccctgagccgtaaaaccagcaagtttttattagtgattttcaaaaggggagggagtgtatgaatagggtatgggtcac

SEQ ID NO: 43825 - DNA, 201 bp, Homo sapiens
agcatgagccgaagcagggtgaggcattgcctcacccgggaagcacaaggggtcagggaattccgtttcctagtcaaagaaaggggtgacagacggcacckggaaaatcgggtcactcccaccctaatactgcgcttttccaatggtcttagcaaatagcacaccaggagattatatcccgcacctgtcttggagggtcct

SEQ ID NO: 43826 - DNA, 201 bp, Homo sapiens
tagatatcttcctaatgtatgagagaatcctggtgtattgggtgaaattcacccccgatatttcacataagttcttttctgtattccctaagtgtcagccrgtctgagaaataaagggacagagtacaaaagagataaattttaaagctgggtgtccgggggagacatcctgtcggcaggttctgtgatgccccctgagcc

SEQ ID NO: 43827 - DNA, 201 bp, Homo sapiens
tcctccaacttgtgtttaatatgtaaataaaccattcagctactggaatctcttgagatgacattgattctgtcatgtgttgccctgaaataagaggaaamtaagcattttcccaattgacccttcagcaatttctccaggctttttttttttttcaggagcccctttccaatttcccatcatttttcaataagatgtggg

SEQ ID NO: 43828 - DNA, 201 bp, Homo sapiens
acatgttacaatccaattaggtggattatagttttccttaaagcagaaataggcaagtcaggtctgttcaagaatatactctagtatctccccaaaatggstttagagtatctcagataaacccagataaagtctcatattttcagaaaatatttgcaatatctcatattaagggttaatttacatataagtaaatgtcta

SEQ ID NO: 43829 - DNA, 201 bp, Homo sapiens
ttccctggttcaagtgattctcctgcctcagcctcccaagtagctgggaccacaggcacacgccactgtgcccagctaatttttgtatttttggcagagaygggatttcaccatgttgaccaggatggtctccatctcttgacctagtgatccacccgccttggccttccaaagtgctgggattacagtcatgagccacca

SEQ ID NO: 43830 - DNA, 201 bp, Homo sapiens
tattcttgtacaaaaaaaactctcaaacttgttactgcacatgtcatactctctggattttgaatctctttgggtatttttctcatggaaatgattacttytaaagatcatcctgataattcaattttcttaagattgcaactgtttcaaaatagaaaagttagcgtagttgtgaaatttgtgaatggctttggaaagaat

SEQ ID NO: 43831 - DNA, 201 bp, Homo sapiens
ataacattatcctgaaataaagtcaaatatttaaaatataaatgcaaggcaaacaacttttctctactaacctctaagaagccagtgatcattagatactrtctagaaataggtgatatggagcactggaaatagagttgtcctgaatcacaagacaggacaaccccaatgtcctaaccccaatgctctcattaactagtt

SEQ ID NO: 43832 - DNA, 201 bp, Homo sapiens
ttgccttacacctgggtgtgattctctctaactctctttatgctacttttagctagtgcaacttgccataggaaaaaaatactgaaaacctaaaatgaccrtaagagcaacaaactttctgatttctgtcattcttttaaccaagataattttgaaggtagctatctatgtgtttggatacttggttcctaattagtgacg

SEQ ID NO: 43833 - DNA, 201 bp, Homo sapiens
aatatttgtctttgtcttcactaataatttttaccttgaaatttgttttcctaatattatctagtattatttgttagcatttgctcccaatggcaaaaccractttgttacgtctgattggaccgaagacagccagagagatggaaaagcttaacagaccttctagtttgcatttctttttcatttggcaaacaagaaaat

SEQ ID NO: 43834 - DNA, 201 bp, Homo sapiens
ggataaatctacttgattctttgtagatttatttatgactatttataataaaattatttatatactaaaagaattagtatataattccttttatacataaytcaattagttttgttaacattttcttaaaaatcttggcatttatgttcgtaagaaatattgatctgtaattttcctttctttcaatgtctttggttttgg

SEQ ID NO: 43835 - DNA, 201 bp, Homo sapiens
cttttgttttctattatacctttcataaaatatttgtctttgtcttcactaataatttttaccttgaaatttgttttcctaatattatctagtattatttrttagcatttgctcccaatggcaaaaccaactttgttacgtctgattggaccgaagacagccagagagatggaaaagcttaacagaccttctagtttgcat

SEQ ID NO: 43836 - DNA, 201 bp, Homo sapiens
tgccatgaataatccctactaattactaatcgcagttccatgacactgcattcctttgtgcacatgtgtgtgcacgcacacacacacacacacacacacactgcatccatttttggcaacatagaaaaggaatatttttaaagttgtgagtgcagacattttaggattgactcttattgggagaaaaatagttgtgcaaaa

SEQ ID NO: 43837 - DNA, 201 bp, Homo sapiens
atgccatgaataatccctactaattactaatcgcagttccatgacactgcattcctttgtgcacatgtgtgtgcacgcacacacacacacacacacacacactgcatccatttttggcaacatagaaaaggaatatttttaaagttgtgagtgcagacattttaggattgactcttattgggagaaaaatagttgtgcaaa

SEQ ID NO: 43838 - DNA, 201 bp, Homo sapiens
gagccatgattacatcactgcactccagcccgggggacagagcaagaccctgtctcaaaaaaaaaaaaaaaaaaaaagatgtgatgaatatgagagtgcakatatctcttccagctactttttattttcttcatgtataaacccaaatgcgggattgctggatcatatagtatttttatttttaatttttttgaggaaatg

SEQ ID NO: 43839 - DNA, 201 bp, Homo sapiens
tccagctactttttattttcttcatgtataaacccaaatgcgggattgctggatcatatagtatttttatttttaatttttttgaggaaatgccatgctgytttccatagctgtgacatcattttacatttatatcaatagtgtacaagcattccttttccttcacatcctcctcaatatttgtgatctttttttgtttat

SEQ ID NO: 43840 - DNA, 201 bp, Homo sapiens
ccacagttgaatgaaactaaatattaaatattagtagcagaagaaaaactggaaaattcacaagtatgttgaaattaaacaatatactcttgcataaacarcaagttaaagaataaatctaaagcaattgaaaatattttgagactaatgaaattgaaaacaaagcacaccaagctcatggaatgcagcaaaaccagtact

SEQ ID NO: 43841 - DNA, 201 bp, Homo sapiens
ttttaccaaaatgctgataatgatatggacaatgaaatccaggctgaggtggtctcagatggagatgaggaacttgttgggaactggagcaaaggtgactyttgttatgttttagcaaagagactggcagcattttgcccctgccctagagagatttgtggaactttgaactttagagacataatttagggtatctggcag

SEQ ID NO: 43842 - DNA, 201 bp, Homo sapiens
catgaacatacttgtgtagattaatttgttacaggacctaagcccaggcagcatgacctcagggaacagttggggaatatcttctttctctgaaggtagaytttgtagcctggtcctctgagggctatggttgatatcaggaagaggtgctgaatacaagttttacctattccatgatttcataagtgttcttctttagaa

SEQ ID NO: 43843 - DNA, 201 bp, Homo sapiens
gtgaattgatattagctttaggtattttgggttttatccttattaatcctcttaacttcagagctttgtccatcagtaatatactaaatgtactgtgtgtrcactattgaggcacagccaagaattgcagtggcagaactttagtgaataggaacagaaaaggtttgagaagcaaacttttccattgagagagacctacac

SEQ ID NO: 43844 - DNA, 201 bp, Homo sapiens
attaattaaaagacaatcattatatgttttacttgtaaaactgggtgagttatgatgcatagaagttagatcattgaattgatagaacttgtgctaggtargcatattcactcagtgcataattactgagcatctactatgtgccagaaacatatttgagaggccgaatcagcaggacatagtgattgattgattgaacat

SEQ ID NO: 43845 - DNA, 201 bp, Homo sapiens
gcagaacagcccacaccagagtagttattcatcacaggcccaggtgactctgcttttggagtcctgttttctaaatcccccagtatatgaaaaccacattyccatgaccaacccacatgtaatttctggaatttgtggtcagtcttagacattttctgcggggagctaagaaagattagatctgagttatgactggaaggt

SEQ ID NO: 43846 - DNA, 201 bp, Homo sapiens
agtcaacaaaagaggtagaaagtataatagagcttactaggtactagggggaaggaagaatgggaagctattgtttaatgagtacagaatttcagtttgakgtgctaaaaagttctggagatggatagttgcacagctatgtgaatgtacttaatgccactgagttttataaatggttaacttagcgaattttatatatat

SEQ ID NO: 43847 - DNA, 201 bp, Homo sapiens
aagagacccccaatcaggaagtttgatgtcaagcctcaacataccacacattactgctttcacacgtgtaaatcactagcaaaataactggtacttagtamgtgatcagatgtttgtcttctcttatttccaaacgatcagatattatgatggacactgtcatataggttatcatattttgtaatcctgatctgaggcttt

SEQ ID NO: 43848 - DNA, 201 bp, Homo sapiens
atacatgttattattgtcaatccgcatgcaatgtacaacaccaggagaatatctttctttctttctttccttttcttttttttttttttttttttttttttgagttggagtttccctgtgttgcccaggctggagtgcagcggcacaatcttggctcactgcaacctctgcctcccgggttcaagtgattctcctgtctca

SEQ ID NO: 43849 - DNA, 201 bp, Homo sapiens
tagcaaaataactggtacttagtaagtgatcagatgtttgtcttctcttatttccaaacgatcagatattatgatggacactgtcatataggttatcataytttgtaatcctgatctgaggctttctgtctcaggaataaaatgcagctgatacaagtcactttcattttcacaagagaatatcaatttacatcattagca

SEQ ID NO: 43850 - DNA, 201 bp, Homo sapiens
aacttatgtccacactagaacctccacatggatgttcatagaagctttattcataattgccaaaacatgaaagcaatcaagatgtccttcagtaggtgaakgaataaataaaccggggtatatccagacaatgggaatattactcaacacaaaaaaatgagctaccaagccatgaaaagacatggaagaaactgaaatgca

SEQ ID NO: 43851 - DNA, 201 bp, Homo sapiens
ggtaagggaaaattttcctccagtgtttggaaatcattaatgagatccttatcattttgtgtctcagatactagcgtaaaagggtctttttctaacttgasaaagcttgccctttctagtcttgtttcagctgcagggctggtcaacactggggagactggaggaaatttgtagaatctgggagccttcaaacaggagaag

SEQ ID NO: 43852 - DNA, 201 bp, Homo sapiens
cctgataaacctgaatgaccatcctacaagaagtaactcactgttgacatcaatttcgaataatttgtgactcacttctgtcaaaagccatgttgagatcrtttattcatttatgcattgactttctctctagaattcaaatcaagacctatttctgtatgttatatcaggtaggtgcaaatcaaaactctagtactttaa

SEQ ID NO: 43853 - DNA, 201 bp, Homo sapiens
ataaacaggtaaaagacacagaatagccaactcaatattgaaagagaagtacaacattggaggactgacattacctgccttcaggccttattgtaaagctrtaatgattgaaccagtatggtatttgaacaaaaaaggtaaatagataaatagtatagaatagagagcatagaaatagacccacataaagacagtcaacca

SEQ ID NO: 43854 - DNA, 201 bp, Homo sapiens
atttgtgactcacttctgtcaaaagccatgttgagatcatttattcatttatgcattgactttctctctagaattcaaatcaagacctatttctgtatgtyatatcaggtaggtgcaaatcaaaactctagtactttaactctctgcagacgataatctgatattgtaaaaaataaatagtcttatgaagaatgcttttgc

SEQ ID NO: 43855 - DNA, 201 bp, Homo sapiens
ttttgtattgtttaaaagttgtttatgtatttagaatgcaagttttttattatttatgggatttataaatatgttctctatttctatggcttgtttttctratctcttcagagtatcttgtccatggcagaacatttaatttcaatgaaatcaaacttattaaatttactatatatggattatgcttttatgacttagata

SEQ ID NO: 43856 - DNA, 201 bp, Homo sapiens
attgtaaatggaattatttcttaattccattttcagatttttttattgcagtgtattgaaatataatttgttatttgtgtgtgtgtgtatatatatatatwttttcttttttttttgagatggagtttcattctttttgccgaggctagagtgcaatggtgcaatctcggctcactgaaacttctgcctcccaggttcaag

SEQ ID NO: 43857 - DNA, 201 bp, Homo sapiens
ctattgtaaatggaattatttcttaattccattttcagatttttttattgcagtgtattgaaatataatttgttatttgtgtgtgtgtgtatatatatatwtattttcttttttttttgagatggagtttcattctttttgccgaggctagagtgcaatggtgcaatctcggctcactgaaacttctgcctcccaggttca

SEQ ID NO: 43858 - DNA, 201 bp, Homo sapiens
tttcagtctgcacttatttcattaaatttattcagtaaattttattatcaataaattttattctatttgatgctattgtaaatggaattatttcttaattycattttcagatttttttattgcagtgtattgaaatataatttgttatttgtgtgtgtgtgtatatatatatatattttcttttttttttgagatggagtt

SEQ ID NO: 43859 - DNA, 201 bp, Homo sapiens
cacaatcagaagaaatatactctacctctttgaatcctagcatttaggaggagctaaataaaagtaaatggcaattgtgtatggttgtaattactgggtcytatgggaacttatatgcagattgaattagtttaggattaaacattccaattttgagaagtgggcttctaaactatgaactaaagagaatttgggggttaa

SEQ ID NO: 43860 - DNA, 201 bp, Homo sapiens
ctaatgaaattgaaaacaaagcacaccaagctcatggaatgcagcaaaaccagtactaagagggaagtttccatgactgttgacattcaaaaagaagaaakattttaagtaaataatctaactttgcatctcaaataagtagaaaaagaagaacaaattaagcccaaagttagtagaaggaaagaaatggtaaagattaga

SEQ ID NO: 43861 - DNA, 201 bp, Homo sapiens
ttcctaatagaagtatagactcgaagggcattttgttatgaatattcttcctaatctaaaatgcatttagagttgccactccctatcactcagccccctcycagccctaaggtggagacagaaaattcaaatgcttacagtaggttaccaagaagtaatgagtgaaagaaagggctcaggagcatgaggctgtgctgaaat

SEQ ID NO: 43862 - DNA, 201 bp, Homo sapiens
cctcctctttaagaccaataattcttagatttgccctttcgaggctattttctagatcttgaaggcatgctacattgctttttattctttttttttttgtsttctctcactgtatattttcttatagtctgttttcaagctcactgattctttcttctgattgaccagttctgctattaaggtattctgatgcattattca

SEQ ID NO: 43863 - DNA, 201 bp, Homo sapiens
acaacaaaaaccaaaacactgcaaacaaacaaaaacagtccaaggccaaatgaattcacagccaaattctaccagacatccaaagaattggtactaattcrattgaatctattccaaaagattgagaagaagagaatcctccctaatacattctacaagcccagtatcaccctggtaccaaagcaaaggaaagacttaaca

SEQ ID NO: 43864 - DNA, 201 bp, Homo sapiens
aggaggactatagaggtgggagccaagtagcattgcttgaaaatgaaatataaaggatttggacaagagatttggcagagcaaaccaagagacagtaatayactcttctcaccaaaaataaattttatggagaactatcaatggaagtctttttcctttatcagttaattcttggtaattccctcaattgatgattctttg

SEQ ID NO: 43865 - DNA, 201 bp, Homo sapiens
aacactgaaatacagttgtccagaacatcagtggttctccaaattttgagaaaaatatatcacactttagtgaactaggaggtttatatttcatgtgaacytgagccacagaaaataattctgttttctttaaacaatgtcaatatataagccatttcccctagatgcactgtttccattactctacctagggatgtagta

SEQ ID NO: 43866 - DNA, 201 bp, Homo sapiens
actgagtgtaacttttggcacatttcacacacactctcactttgagaagatactataagatattgaaggagattctgttgagaagtctttaaatactcatrccatgctcagtgtggaatttggggtcacagcacaagatgagtaaatggatttcttttttgttgttgctgtttctaaagagtaaatgcctttttagttctt

SEQ ID NO: 43867 - DNA, 201 bp, Homo sapiens
aattttaaataagtattagaagttaaatatagcaggtccttgaataatatcattttgttcaactcctgttgttataaacaatgatagggggagaaaatcarttcccacctgggccactgtctgtgtggaattcgcacattctctggtgtctataggggttttttcttggtactctggtttgctcccaaatccccaagatgt

SEQ ID NO: 43868 - DNA, 201 bp, Homo sapiens
gcaattgctggagatatacacctaccctcacagcccaaggcttgagagaaagacaaataataagtaatcaagtaaagaagttgctactcatgcaaacagtwgtaggaactatagctacgtggtcagagaaggcctctcagagtggatgacatttaggatgagagttaagaggagaaggagccagacactgtacaagctggg

SEQ ID NO: 43869 - DNA, 201 bp, Homo sapiens
gtggattttgcttatttaactcttagagtacaaacttattttaggtttgcctccgtcttcaaggaaattcccattctttggaatatctttgtaaccctatstaagtcatgtagtcttttaacttcagatttgcatttgtaaaatggggataacaaagatacctacgtaaggatggttcatcagagtttaaaagggttaatg

SEQ ID NO: 43870 - DNA, 201 bp, Homo sapiens
aaatcaaaggaacaagaataagttatatactcatttaaaagattaggttaatcattagtgctgtctatccaatattttattttctcctcttggttgaggtsatgagtggtcgtgtgacgtgttttgttaatgaaatgtgaaagtgacatttgtgactcctggctagaagatttaagagccaataaataattcaccacactc

SEQ ID NO: 43871 - DNA, 201 bp, Homo sapiens
cctcagtcacctgccttaagccgcctaatatttaaaaattgagattctttaagcaagagagaagggataagaaattatcgaatagatgacaaacaatctcytacaatatatttactactaaaggaggatagaaatttcaatcaaatactaattataccatttatgcctcactaaatttactgatcaaatgtaattttcagg

SEQ ID NO: 43872 - DNA, 201 bp, Homo sapiens
agtagcactacctctagactaagtctaatgccctgaagttcagatacaaactaatatgccagtgggattgatgtcaaagtgatagaattgcagaatagatyttagtgacaatttttcaggctagttctaattgattgagtagaattccaccactgcagttctgttgctgatgattattgttaaaaatgactgaaaacaaaa

SEQ ID NO: 43873 - DNA, 201 bp, Homo sapiens
catagtcatccctttcagttcctcagtcacctgccttaagccgcctaatatttaaaaattgagattctttaagcaagagagaagggataagaaattatcgmatagatgacaaacaatctcttacaatatatttactactaaaggaggatagaaatttcaatcaaatactaattataccatttatgcctcactaaatttact

SEQ ID NO: 43874 - DNA, 201 bp, Homo sapiens
attatctataaatggaagatgtgagattaaaataattttctccattcctggcattgaaagttctaaaaaccaaaggggagagttcttttatttgtttcatrcatgtaggtaatttgatggtgaatggaagaggctagttaaccagacatactgcaggagtggttattttatggcttttataggatgaaaataactttaaaa

SEQ ID NO: 43875 - DNA, 201 bp, Homo sapiens
tatttaatgaagcatacattattaaagcccactgtaagacgaaatttttgttctctatcttttgatagaggctactaattcttgtctcaaactggctaaayattctttcatttccaaacagtagcactacctctagactaagtctaatgccctgaagttcagatacaaactaatatgccagtgggattgatgtcaaagtga

SEQ ID NO: 43876 - DNA, 201 bp, Homo sapiens
agcatagtcatccctttcagttcctcagtcacctgccttaagccgcctaatatttaaaaattgagattctttaagcaagagagaagggataagaaattatygaatagatgacaaacaatctcttacaatatatttactactaaaggaggatagaaatttcaatcaaatactaattataccatttatgcctcactaaattta

SEQ ID NO: 43877 - DNA, 201 bp, Homo sapiens
caagtgtaatattgactaaaataagcaagaaataaagctgctgtttttgtaaatttcagaaagaaataaaattatactgtttagaaagggacatttatgcrgtaacattaaaaagaaaaattagcatataagggtgtgtaatttatgataatattcttttccacaacttgggtattggttataattatttgtaaagctata

SEQ ID NO: 43878 - DNA, 201 bp, Homo sapiens
tacccaaagttcttttgttgtcgtttgtttgtttgtttgtttgagacaagtctcaccctctgtcacccaggctggagtgcagtgacgtgatctaggctcayggcaacctctgcctcctggattcaagagattctcctgcctcagtctcccaagtagctgggattacaggtgcctgccaccacgcatggctaatttttgtat

SEQ ID NO: 43879 - DNA, 201 bp, Homo sapiens
agtcaagagttggatagttggaattatggctcagcacatttgcaaggatacggaggtcaagacaggagaaagaactacaattaggtgaagggtacctggaygccagtgtacaggtggaggaggagtagaaacataagcagagttaaaatttttaagagtcttcatgcatgtcaaagaaacatgaccttgctaaatggcgag

SEQ ID NO: 43880 - DNA, 201 bp, Homo sapiens
tggacaccttagaaacatgtttagcattgtcttctgaaatgaaaagttaatacactctgtgacccaaccattccactcccagacacataatctgaagacaytgatgcatataggaatgagaaaatattaatagcagcattaattgtaatttcctagaagcaatccaaatgtttgacagtagaatggatttgtgttatattt

SEQ ID NO: 43881 - DNA, 201 bp, Homo sapiens
atgaataaaggtacagtgctcattcctgtgttccaggaatactgtagaaaggaaatctagataggtaagttggcaggagcatgagatgggatagaggcagytgaacagccttaaatatttgattatcaggctgcacgggttagacttcctcttgtatagctggcagtaacatatctggagaactgtggtagcttctcacca

SEQ ID NO: 43882 - DNA, 201 bp, Homo sapiens
attggattggaatatagtaaagcaatacttggttagatttcatgtgatttaccttctgaatgaagtggaaatatgttaatgtgcaatatataaaacataartcacagaaaacaaccaatactgagatttgtattttgttctgacaaaattttatatccagggctgttttcacttcccctaatatgtttttaatttttttta

SEQ ID NO: 43883 - DNA, 201 bp, Homo sapiens
atatagaaaacagaataatctctttagttattggtaactccgaataaaaaacacaactgtattctctccagaatggctataatttaaaagattgacaataycaagtggtgaagatgtgaaatatcaaaaatactcatatgttgctgggagactacatcagtatggacaccttagaaacatgtttagcattgtcttctgaaa

SEQ ID NO: 43884 - DNA, 201 bp, Homo sapiens
aaaagtaggactaaacacaaagcagaaaatgaaatattaaaaaagtatgtgggtaataatttgaaaaacaagaagttctggggaattcaaaaaaacaaacrggaatgaggaggacagtggccgaagaatttggtctgaacatgcctgttccttggtggtgacacatctgaggtgtcccgctatactaataatacaggagga

SEQ ID NO: 43885 - DNA, 201 bp, Homo sapiens
ttacaatttcaattggccttagatgtaaataaagatatataacccaaaccaagctaattagagttggagctaatttccaggttattaaactaaatgagagkttgactcaaaaacctttgggcctcttcatagtcattgacattgttaatgaaacatttcaggataatttttaattaattgaattatttattatttatctgc

SEQ ID NO: 43886 - DNA, 201 bp, Homo sapiens
gtttgtaaaacaggaaagtaattatccaaatcatattttagaaagataatcctggataaattaaagaaagggaaacaactctatgagaccaatgggaggckatttcaatggttcatgtaaaaaggacattgatttgcattaattaggcagatgtaaagtcaaagaagggggtttacatttaagagctttaggagatacaat

SEQ ID NO: 43887 - DNA, 201 bp, Homo sapiens
aatagtctgtctaataatcagcacgtgaattagaatcacaccattcaatataacatctactgaaaaagagaactttcctaacatctttaacgtggatccayggggaggaggtttccaatgcagctagcatttgcgctataaactctctttctggatctcaatctccagaactagaagatgaaaggagtggatgaatgcatg

SEQ ID NO: 43888 - DNA, 201 bp, Homo sapiens
ttggaaactagagacatgggaatgcaccatgatttttggaacaggatagcatattgctgaaggagctgtgaagtgctgatagcttcccaggagagagataatagaacttactgtattatggatgtcaataacacaagtatatttaagagacagcctgaatggaggaatttctaatacaaataagatgacagtattcacaag

SEQ ID NO: 43889 - DNA, 201 bp, Homo sapiens
ccctttaaccttgctattttatcaactacctctatcttgcagagataaatactctaacacattttagaggctgggttctcccagtgctgctgctgctttcwtgatttctgctgtggttgcacatacacaaacaatgaaccagacaggaaaaatagcctcctaactggttaattaaatatgcagtttattacaaattatgga

SEQ ID NO: 43890 - DNA, 201 bp, Homo sapiens
aactcctgacctcgtgattcgcctgccttggcctcccaaagtgctgggattacaggcatgagccactgtgcctggcccgatattatgatctttaaagactygatattatataaacacaatgaattaatttttcagtgcagttttaaatctcagaaaatatctgctgactagagtaattgcctaattgtcattaataagctt

SEQ ID NO: 43891 - DNA, 201 bp, Homo sapiens
gttaataatactaaaaaatatacatagataggcagcttaatatattggaaagagctctgaaatggaaaccaagacttgtggctttgccattaaactaattrttgccttgaggtcaccctgaaatcctctactttcttgtttgtaaagtagggaaataattctatccacataggttgttgggggattaaattggatagtggg

SEQ ID NO: 43892 - DNA, 201 bp, Homo sapiens
tttgttttgatcaataattatgctagcagttgtttaaaattctaagatatttagaatgtcactaaatactgtgacatttagtattgctatttccactggaytcagtgtgtagacaagtgaggttatagactatcatacttagcacactcagagaataagcagtattaaatattttgatctgtttgatatttaatatacatg

SEQ ID NO: 43893 - DNA, 201 bp, Homo sapiens
aaattcgtgaccttatgcctgacttccctggtgtacttcctatagacagcaaacacattattcattcagttaaggtctcccctttgccttgtaaccccttrgcactctatactttgtcctaataagtgctcagtaaatattagttgccactagtaatttgcctttctgcatactaagcagaatccttccttggggatcttc

SEQ ID NO: 43894 - DNA, 201 bp, Homo sapiens
gactggaaaaaaaaagaaagaaaacaaggcagcagggcaatgattgatagacagggcttcacctgtcagaaagggctggaggtgctatttctgagtgagcrttttcaattctagaaagaacttaatgcctgagttcctcctttgaaagtgcctatatagaaatggagtatctggagactgtatgtatgttgtatatgtaat

SEQ ID NO: 43895 - DNA, 201 bp, Homo sapiens
ttatttgttcaacacgtaaaattaaattttagcctcgcctttgattatggtatgttttgaaactcaatttttaaggtttatagaatgttgaaattcatcarctgtattctgtcatgtcattttgttgttgttgtttcatgttatagagaagtagacatccccttattcatggttttgattttcatggtttcacttatctgt

SEQ ID NO: 43896 - DNA, 201 bp, Homo sapiens
ttaaaaaatgcccccactctgagaaattagaaggaatctctacttttctcttcagtatctgaaacttacacaacctgtagttcccagctcaaataaattcrtgaccttatgcctgacttccctggtgtacttcctatagacagcaaacacattattcattcagttaaggtctcccctttgccttgtaaccccttagcactc

SEQ ID NO: 43897 - DNA, 201 bp, Homo sapiens
tgctctgatcaccatacattataggcattgaaacatcactatgtactccataaatgtatataattattatatgtcaatgaaaatttttttaaaataagctmtttttatagagaaagaatagttagagcaaaaacatctcagaattcagcaacctgcaaaaaatttaaaacaatttatccccaaatttccagaccctgtact

SEQ ID NO: 43898 - DNA, 201 bp, Homo sapiens
atagtttgtttggggggtgtttcagaaaggagagcacatataattaggacaggcaaagtctctattggttctatcatgatccgatgtcaataccacaagtwtgaaggtggtaaaaaatatagggaagtgactgtaaaacacctgaaattacccactaaacacaaactaaatgtatcctcaactcaacttccccttagctgg

SEQ ID NO: 43899 - DNA, 201 bp, Homo sapiens
aggcgggtggatcacgaggtcaataaatcgtgaccatcctggccaacatggtgaaaccccatctctactaaaaatacaaaaattagccaggcatggtggcrcgcgcctgcagtcccagctcttcggggggctaagactggagaatcgcttgaacccgagaagcggaggttgcagtgagccgagactgcaccactgcactca

SEQ ID NO: 43900 - DNA, 201 bp, Homo sapiens
gttggtaaatcggtattagtgtttttccattatttgcatttattaatgtatttgccgtatctccacaattacaatcaaataactttgagtcaaggtactamcaatgttttgttttgtcttttccatctatttagaaagctaacacaagagtaaactgaaaagatataactacgcagtcccagtctaacatcccgttaaaat

SEQ ID NO: 43901 - DNA, 201 bp, Homo sapiens
ttataaacactgctggcagtatttctttaagattccagatattctaaagtctagtgttgattgtaggttatagtgatttaagaaaggttatacaaattccyttaccacatgcctcaaaatgcttatgtaaaaagaggaattaaagtatggatgttgataaaaaatgaaattatttttgagggaagaagaagtaagttaaaa

SEQ ID NO: 43902 - DNA, 201 bp, Homo sapiens
tctgaaccaatctagcttttgcaaacaaaatgtgctgctactttcagtctgttctctggactatagatttataaaattctactttggctgtagaaagccartgatttaacattttgttttcactgaattttgtttgttttctactttccctggggcaatagatttgacctttaaattctggctttaactgttgaaaactgg

SEQ ID NO: 43903 - DNA, 201 bp, Homo sapiens
attctcaagctagtttttgcttagatctttctgtgggatattatttaatttggaaaccaatcatcatagtcaaactcctgacaaacaaattctgtaagtasatagataagcaacaattaactcacacactaatgcattctatttgctttttagtttcatgtatgttgggtaaatgggaaagaaaaattactgtattcttgt

SEQ ID NO: 43904 - DNA, 201 bp, Homo sapiens
aattttgactattgtattgggcggaataaaagacaataaaatacaaagtgctttattttctggttactagattgtgaatcctttgcagacagggactgtastttatcttttatatcgtctacattttctaacatatattaagactttggaaagaagagacagaagaaaggatttaggaggtaaagaggaagaagggacttt

SEQ ID NO: 43905 - DNA, 201 bp, Homo sapiens
atctgtaaataatgtatgtaattgaatatttttattcctattttagaagctgaacagtgcttatttaaggtctaaaatggacttgacactgaatgtagaakgtttgaagaacatcctttattgttactattgatgaaccaatactgatacattattattatgtaaatcctaccgtttacagtaggcttcaccttgtgttgt

SEQ ID NO: 43906 - DNA, 201 bp, Homo sapiens
aaccatagcataacataaagctgaatgtgtgaacagtgggtcaattaaagaagaaagcaccactttttaaatgacattgtccacagagcatcggtgagctrtatgaattagatttgtagtccttacgcacctattctttcatctctaccaaggaggaaatcccagaaatcaactgtttgatgaggacttatttattattta

SEQ ID NO: 43907 - DNA, 201 bp, Homo sapiens
tccgtctcaaaaaaaaaaaaagaaaaagaaaaaaagacataactattatcaacagaagcaacaataacaaaaattaatccttactagcgcttgttatataycggaaaatgttttaagttctttatatattttactttatttaatctttataataattgtagcaatctctgttgttttaccacaactttgcaaattaaaacc

SEQ ID NO: 43908 - DNA, 201 bp, Homo sapiens
tgggactatttgtggtttgttttgggaagggtgatttgaaagccgagaaaaattgtctgctaattcatacaagaggacttaagaatcttcctttgccaacytttcagactttaaaggctttctcaagaagaaaggattttgctttagcaacaattcctagggacatttatagaagaggtatttgcctacatataaaaatgc

SEQ ID NO: 43909 - DNA, 201 bp, Homo sapiens
tctgtgcaaatattgggactatttgtggtttgttttgggaagggtgatttgaaagccgagaaaaattgtctgctaattcatacaagaggacttaagaatcytcctttgccaacctttcagactttaaaggctttctcaagaagaaaggattttgctttagcaacaattcctagggacatttatagaagaggtatttgccta

SEQ ID NO: 43910 - DNA, 201 bp, Homo sapiens
tcttagcctgaggcaggtgtgccaaagccacaatttaaaaaactggatgataaataaaactaatcagtcaaaggggaaagatcagaaagactgaaaattcrccaagcaactgcaactcagcttcaacagaaatcaaggggccatgttcattcaattaggaaagataggaaacagcaataattcagctattgaccaaaagag

SEQ ID NO: 43911 - DNA, 201 bp, Homo sapiens
tcctcttcagctttgcagtaagattgttttatttccaggcaccttaccacagtcaggttaaggaagacatggcaaggatgctgatgtccttttgatagggraagcaaaagctttaccgtctcattggccagaattctttcacatgccattctgagttgcaaagaaggctgggaaatcaaatgtcctgcctccatagcagag

SEQ ID NO: 43912 - DNA, 201 bp, Homo sapiens
ttattctgaggggaaaaaataaataaaaacttagtaaaatttaccaggttatcagcaactcatttattcttaattttatctgtacatttgcattctatctrtgcatttgcatttattgtactttatttgtttagggtttcttttctgctatatgtgtcatatacctctagggggttattttaaacagtactgggatttgct

SEQ ID NO: 43913 - DNA, 201 bp, Homo sapiens
caactcacggtacataatgcaatgatgtacacatgtggaaaaagtaagtatgtcattggaaaaataaatggtctagcattgtttacccatgtacattatgrcatttatcatgttccttggagtcatttctttagttgcttatttctacgactagactgtgagttcttttaaagcaaagacagtgagttatttatcttgaaa

SEQ ID NO: 43914 - DNA, 201 bp, Homo sapiens
tgttacctttcttcctgattttattatcactggcctcattacagtacgtccactggtttctcctactgtgatccttattatatggttgtgtgttctatgcrttactgtctttcatcatgtttgagtcctggcaagaatttcttctaaatacaataccatagatacattacactgatcccatgcaatcgttgtaactgctgg

SEQ ID NO: 43915 - DNA, 201 bp, Homo sapiens
aacatgattaaattcactacatataactattcattgaaaatataatgatattaggtcttatacagcaatgttttttagatgacagcatagatctgtatagwaggataaggaacaaaggaattttgcattttggctttgatagctgatgacagagtaagtgtgagaaaaatagtccagttcttatttagttcctttaatgtg

SEQ ID NO: 43916 - DNA, 201 bp, Homo sapiens
ttctcacacatgccaatatcgacagcttgaagtgcttagtgtgggtatattgatttcatttgccattaggcccctcagtcaataacccatttataatataygctcttcaaagctatccactggggcaaaagagcttgacaaagagaatatttaagttacataaaaagcaaatgataaaaattactaattatctcatgttcc

SEQ ID NO: 43917 - DNA, 201 bp, Homo sapiens
gtggtttcaagttagaaagatatataggattcttatattactcatatataagagaagaacattggatataaatgaatgcaaatggcaatgatgggggtcartgtacctcattttgagccaatcttaaaaaggaaacactgaaattagatgcactgtttaaagttagttgactacaatcatttagcactctattcgacatat

SEQ ID NO: 43918 - DNA, 201 bp, Homo sapiens
aaagcaaaccaccagaggaaaagttcaggagatgtttttgtggtttcaagttagaaagatatataggattcttatattactcatatataagagaagaacaytggatataaatgaatgcaaatggcaatgatgggggtcaatgtacctcattttgagccaatcttaaaaaggaaacactgaaattagatgcactgtttaaag

SEQ ID NO: 43919 - DNA, 201 bp, Homo sapiens
ttgcaaaacacattacataattagcataagagttaattgaacataatcacttatccatctagatacaaaaaaatgaggcagaacttattgatttatgtttkggcatagacaatattgagcagcttattgtgacattaatagactatcaggctcagttatttttatttttattatttatttatttttttatatggggtttca

SEQ ID NO: 43920 - DNA, 201 bp, Homo sapiens
tagaacaagtaccttggacaggaaaaagcttttcaatgaacataaaaacccccacagtattttgtattccattcttattctttgtggtggtgatgaaaaasagtgcctaaaaatgaagagatgaaagaatctcaatcatcacttcttcatcaaaccactgagttatgtttcatgcccattctaaatgatggtcctcaaaag

SEQ ID NO: 43921 - DNA, 201 bp, Homo sapiens
gatttaaagataaatgttatgtacttccatgtcctagaacctataatgtgatttgtttatggttcttctttgccttattgatatgtgtattgagacccagrttttaaaatttaaaaatgttttgttatgaaatagtcttaatctaaatgtctttaaatggtttggggcctataagggtgactgagtacttctatttgctct

SEQ ID NO: 43922 - DNA, 201 bp, Homo sapiens
agtagagagagaagtgagctaagaaatattaaatattgccaaatattatcaaaatggtagaatgatcgagattgaaagagttgaaaattataggtacgtgraaatatctgtggtctggaagctctgcatgggttgtaaaactaatgtcatttggtcttttagtttcacgcagcctagttgttccttgcttatggtcaagaa

SEQ ID NO: 43923 - DNA, 201 bp, Homo sapiens
tgcatttgagatccttatagcacatctaagtgtaaatttccaaaaggcaattggaaatatgataataatggaacccaaatgtcagagctgaagatgtggawttcttcagcgtatgaatgttcattggagttgtagacactgtccaacaaataatgtataattttattggcccaaatgagagtaatagggacttcaagacag

SEQ ID NO: 43924 - DNA, 201 bp, Homo sapiens
gtttgcttgtccagaaaagattttatttctcctgtactatgaagcttagtttggtggggtttgaaattcttgattggaatttcatttctttagggatgccraaaataggctcccaattttttcttgcttgaaaagtagaaacctactgagaagtctgctgttagcctgctggggttgccttttgaagtaatctgacccttt

SEQ ID NO: 43925 - DNA, 201 bp, Homo sapiens
atatacatctaatctgtggtgctctatagcagatctgtggatgcctgatacctggggtgggaaggatcttgactgataataggcttaaggaaaccagttgwcataaatagaacactgatgtaacaatactagaattcacattcctttctagtgtacctaaagcatatgatatttgattatacgtcataaacaaagcatcca

SEQ ID NO: 43926 - DNA, 201 bp, Homo sapiens
aagatggtggtggtaaatataaaaggaatggcctcttcaaatcatgcagctttctatttgttcctgttagcattttaatcatctgaaggcagatttagggrgtcctaggatctggttgatgtgctttttgttagaactcagacaatcactttttcccctggttgtccccgtacccgatcacacttctatcatcacacttag

SEQ ID NO: 43927 - DNA, 201 bp, Homo sapiens
tatgtaattaagcattcaagaatgagaaataattgatcttataaatgtgatttgattgaaagaaaacagttatgcaggttaccaattgaaaaatttcacayatatgttatatatttaacatgtatgtaatctattatatatttagtatctattatatattatataatacatctagcatacattacatattaatatataaga

SEQ ID NO: 43928 - DNA, 201 bp, Homo sapiens
tattgaaccaggaactccatgggtggggccttaatgggcctttctggtgattctgatgcatggtaaagtttgaaaactactgtgttataataaagtttacygagcaatgaatttactgtttgcacaggactacagccttgtaaaacttcagagaaaacacaatgcatataaaatgcaatgagaaaatgcaatcagggaaga

SEQ ID NO: 43929 - DNA, 201 bp, Homo sapiens
atagcattattcatgataactttcttcgagttaatacggatatgttctgaaattctaaaattaaaatatattcattttctttttcttttctttttgagatkgagtctctctctgttgcccaggctggagtgcagtggcgcgatctcggctcactgcaagctccgcctcccagattcaccccattctcctgtctcagcctcc

SEQ ID NO: 43930 - DNA, 201 bp, Homo sapiens
cttcataattctcaagagtattttagaatattaggcacaattccctcagcattcattaaaatagcattattcatgataactttcttcgagttaatacggayatgttctgaaattctaaaattaaaatatattcattttctttttcttttctttttgagatggagtctctctctgttgcccaggctggagtgcagtggcgcg

SEQ ID NO: 43931 - DNA, 201 bp, Homo sapiens
ccagacctagctctgaagtacattactcacatgtttttttttaaaaaatgatattccataatgtgatggatgtatttctcaaaaagagttttgattaaatrtagaagaaaatccctgaaggctttttcctatataaacctgcagtgcagattgagggcagagtccagtgcatatacagagtgttatgcagcaaaacataca

SEQ ID NO: 43932 - DNA, 201 bp, Homo sapiens
taatattttgatatacattaattttttttcttttcttgcatctaatatctgttttgaatttttttttttgagttctccccctgtcacccagactgaagtgyggtggtgtgatcatagctcactgaagcctcaaactcctgggctccagtgatcctctcaccccagcctcctgagtagctgggactacaggtgtgcaccacc

SEQ ID NO: 43933 - DNA, 201 bp, Homo sapiens
ataggaattatataataattgggaacagaatttaatattttgatatacattaattttttttcttttcttgcatctaatatctgttttgaatttttttttttgagttctccccctgtcacccagactgaagtgcggtggtgtgatcatagctcactgaagcctcaaactcctgggctccagtgatcctctcaccccagcctc

SEQ ID NO: 43934 - DNA, 201 bp, Homo sapiens
aaataaactgagttgttctgtgatgttgactgtagcctttatataaactttatctaatatcacttgctctcagactctcaaattcaaccaaactccctcayagatatctgagctattttggagaggcaaaattctacatatgagaagggcccttctacaaaaactaagggcagagaagccaagattcttattgaagttggt

SEQ ID NO: 43935 - DNA, 201 bp, Homo sapiens
agaatttttaatttttattttacttatctcatagatctacttaaatcacataaacaaaatcataaagcatattttatatattatatatatatatatatatwttttcaaaactgacttccagatggttaggtgctacgatccttagatttatttcaactggctgttctaaataaactgagttgttctgtgatgttgactgta

SEQ ID NO: 43936 - DNA, 201 bp, Homo sapiens
ataggtagatgtagagatagacatatagtttgtctaggtatgtatgcctgtttgtgtgtatatgtttgcttagattcatattcagatttttttttttttttaagacagagtctcctctgtcaaccaggctggagtgcagtggtgcgatcttggctcactgtaacctccgcctcccgggtttaagcgattctcctgcttcag

SEQ ID NO: 43937 - DNA, 201 bp, Homo sapiens
ctgatcctaccacttctctaagcagctttccctggcaactccaatgccatggtggttgaggaatttcatcctgccagtattccagaggcccaatgtgagartaggttgctgcttgcctgtaccttaatagaagttttttgtttgtttttgttttttgagacagagtttcactcttattgcccaggctggagtgcaatggca

SEQ ID NO: 43938 - DNA, 201 bp, Homo sapiens
tgagacagagtcttgctctgtcgctctgttgcccaggctggagtgcaatggcacaatcttggctcgctgcaagccaagtgcaatggcacaatcttggctcygcctcccgggatcaagcgattctcccgcctcagtctcccgagtagctgggattacaggcacgcgccgccacgcccagctgacttttgtatttttagtaga

SEQ ID NO: 43939 - DNA, 201 bp, Homo sapiens
aggttacatttggtacaacggttacatttttggacaaagatgaattcaccccaatgtatatggatctttttaggaggtttctcaaccaccacctatctctyaaccacactttgaaagtagagtttagtcagcatatatttgccttgtggctgagatatattgaagaaagtgctggcatgaagattttctttgagatggaat

SEQ ID NO: 43940 - DNA, 201 bp, Homo sapiens
tccacacttcaaattctttatctgtcatttccaagtttccactttgctggggaccatagctggagaactagtatggtatgttgatggtatcactacatttwgaattttcatggtgctagaattcttacactggttctttctcatcttgaagcattgatacttcaaatttttgtaattatatttgtgcagatataatttttc

SEQ ID NO: 43941 - DNA, 201 bp, Homo sapiens
aagatagaaggatactgaagagaatatttgtctactttataattttaacaagaccttgtgtgccaatgagaatgattaggtgccccttctgtcatgtggtygaggttttgtgactaaaatatgacatatactctatgaaaataaataaatggtttaatgaactataattttatagttgaaggagagaaaaaaggccaccat

SEQ ID NO: 43942 - DNA, 201 bp, Homo sapiens
tggcctgctcatatagaaaaagattagtatgaagaactctccaattgaaaaatatctctccattccagtgtataaattatatattcatttcagctaggttytatacactgttcttttaaaatgtttaatgtactcattagacatctgaattacagtcattgacattttagtgtgaatttctttaatccaaacattgattgc

SEQ ID NO: 43943 - DNA, 201 bp, Homo sapiens
gaatctcacaagtgtaatattgactaaaataagcaagaaataaagctgctgtttttgtaaatttcagaaagaaataaaattatactgtttagaaagggacrtttatgcagtaacattaaaaagaaaaattagcatataagggtgtgtaatttatgataatattcttttccacaacttgggtattggttataattatttgta

SEQ ID NO: 43944 - DNA, 201 bp, Homo sapiens
tcaaatattctagttcaacttaagccatcaggattctgtcaagaaaatgagatatgtgtggttgtggcctgctcatatagaaaaagattagtatgaagaaytctccaattgaaaaatatctctccattccagtgtataaattatatattcatttcagctaggttttatacactgttcttttaaaatgtttaatgtactcat

SEQ ID NO: 43945 - DNA, 201 bp, Homo sapiens
ggcagatcacgaggtcaggagatgcagagcatcctggctaacaaggtgaaaccctatctctactaaaaaatacaaaaaattagctgggcgtggtggcgggygcctgtactgtagtcccacctacttgggaggctgaggtaggagaatggcgtcaacccgggaaccggagcttgcagtgagcggagattgcgccactgtgct

SEQ ID NO: 43946 - DNA, 201 bp, Homo sapiens
taaaatttaatacatatatagatatgcacacatatctataattgtgcttatttcaatagatatatactgctatgaaatttataatatttagttgctataataacaaattttgtcatgaaaacttttaaaatatatagaaaaatatattattcatctcacattcattctgcatgaagaagtgttaccgaatactcaatagta

SEQ ID NO: 43947 - DNA, 201 bp, Homo sapiens
gagagatatgtagaatacccagaaaatgtcaatagaagtggacttgatagaaaaataatttggctgataggataactccagaaatttaataattttgtttyggtatactgtacctattagcaaaaaagtatgccaatgctctttgaagttatttcaaatattctagttcaacttaagccatcaggattctgtcaagaaaat

SEQ ID NO: 43948 - DNA, 201 bp, Homo sapiens
attttttttttttgggaacagttagaaaattctctgtagaattagattgaagaggatgagatgaggtgaagtgaaaattcagaaggcatgttaagtagacmaaaaacatgaagcaaagttagagcaatctaaattctcaaatcccaaaatttctctttgaccacttctcattgctcagactttcccaggaatttcccattg

SEQ ID NO: 43949 - DNA, 201 bp, Homo sapiens
cccagtctcgggtagtatctttgtagtagtgtgtaaatgaacgaatacaactttaaaaataactacattgagaagaaactctggagtcctaggatcaaatyctgttatttttgcaaaaccaagcaaacaaattgacttaattttattggagaataagaaaaaaaagtttggttaatcaggattgtatttatactgacacat

SEQ ID NO: 43950 - DNA, 201 bp, Homo sapiens
ctattgtatagttatggtctcactgccatcagagtatatccgttgagttctggatttcccaaagcatttccaatttaaaattccacaaaatcagacttgayaatagatgtcatattcatcatactgcaccactatgtttggctatatttattttattatgattatattatctctcctggtttccccacagtaactattgaa

SEQ ID NO: 43951 - DNA, 201 bp, Homo sapiens
gacctaactattaaaactataaaaatattatcgatcctgtcttgttttgtgtttaatacataaactaaatgtctctttagtaatttcagctagaagacaawgtgacctattgtatagttatggtctcactgccatcagagtatatccgttgagttctggatttcccaaagcatttccaatttaaaattccacaaaatcaga

SEQ ID NO: 43952 - DNA, 201 bp, Homo sapiens
tcagaagttaaccaggttaaaggtagaaacaggaaggttcaggaagagggaaaggcatacaagaagtcccatggatgatgaaatgagagcatggacgctakcaagaggaggctagagaaacagatgaggaaggccatgactggtgaagtccttgtactatgggtgtggcctggaagattctcactggcccagaaagggaaa

SEQ ID NO: 43953 - DNA, 201 bp, Homo sapiens
gtttattgcttgcttttagcacagattacttaatcagaataacagtggagcaagccaggccactgaaggagtagaaaacgcaactggtagggagagagaaytgggaaaggtctagggcacttggtgcttcctgagtatggagatttcccagagcagaactggcagtatcagaacactctaaaagacttccttaggagaaaa

SEQ ID NO: 43954 - DNA, 201 bp, Homo sapiens
acttctttcacttagcataaagcatttgagattcatccctttgttgcatgtatcaatagtttatttatctttattgttggatactatttcacactatgggygtatcaccatttttaaaaacacatgtctatttgaggggaatgcaggttatttacagcttttggtaattatgaataatgcatatatatatatatatatata

SEQ ID NO: 43955 - DNA, 201 bp, Homo sapiens
ctattttcgatacttcatataggtggaatcatgcagtatttgtcctttgatgactggcttttttcacttagcacaatttcctcagtcatctctggtgtcayatattgcagaatttccttctttttaaaggctgaataatattccattgtatatagatacaacattttctttattcattcatttgttgatggacatttagat

SEQ ID NO: 43956 - DNA, 201 bp, Homo sapiens
aatgctaattgctctttgaagtcctgatctcagttcttttggataaatacccagagtgggactgctgaatcatatggtagttctatttttaatttttaaaraaacttcatgttgttttccatagcggccataccattttgcatttccactgacagtgtgcaaaggttccagtttctccatatccttgacaacacttatctt

SEQ ID NO: 43957 - DNA, 201 bp, Homo sapiens
tttctgtgcctggcttatttcacttaacataatgacctcaagttccatacatgttactgtgaatgacatgattttcttttatggctgaataatattccatygtgtatatatacgacattttttttatccattcgtctgttgatggacacttaggttggttccttgcctaatatattttatgtgtccttgataaccttcttt

SEQ ID NO: 43958 - DNA, 201 bp, Homo sapiens
gaagttcttttgcctgataaacctgaatgaccatcctacaagaagtaactcactgttgacatcaatttcgaataatttgtgactcacttctgtcaaaagcyatgttgagatcatttattcatttatgcattgactttctctctagaattcaaatcaagacctatttctgtatgttatatcaggtaggtgcaaatcaaaact

SEQ ID NO: 43959 - DNA, 201 bp, Homo sapiens
ctactattgttgctatatatatatctaccattgtgtgtgtgtgtgtgtgtgtgtgtatatatatatatatatgtatgtatgtatgtatgtatctaccattgtgtgtgtgtgtgtgtataaatatatatatatatatatcaggcaatatgctctagctaaggctatagaacactatgcatttaggtatcaagcatatatata

SEQ ID NO: 43960 - DNA, 201 bp, Homo sapiens
ctctactattgttgctatatatatatctaccattgtgtgtgtgtgtgtgtgtgtgtgtatatatatatatatatgtatgtatgtatgtatgtatctaccattgtgtgtgtgtgtgtgtataaatatatatatatatatatcaggcaatatgctctagctaaggctatagaacactatgcatttaggtatcaagcatatata

SEQ ID NO: 43961 - DNA, 201 bp, Homo sapiens
agcagcagcagatggatcgggtttaatcaaggagctgacaatggcttttgttttgctcaatataaaccaggtaaggaagccctgagaggcaagtagacagyctttccagcagaaaactgtgggaatcttatgcttgggaagctgtagcgttgtttaacccccatttgaaagagtgggaatgtcagagagaatcacacaaga

SEQ ID NO: 43962 - DNA, 201 bp, Homo sapiens
tgtttctctactattgttgctatatatatatctaccattgtgtgtgtgtgtgtgtgtgtgtgtatatatatatatatatgtatgtatgtatgtatgtatcyaccattgtgtgtgtgtgtgtgtataaatatatatatatatatatcaggcaatatgctctagctaaggctatagaacactatgcatttaggtatcaagcat

SEQ ID NO: 43963 - DNA, 201 bp, Homo sapiens
cagtccaaccatttaccttctgtgtttctctactattgttgctatatatatatctaccattgtgtgtgtgtgtgtgtgtgtgtgtatatatatatatatatgtatgtatgtatgtatgtatctaccattgtgtgtgtgtgtgtgtataaatatatatatatatatatcaggcaatatgctctagctaaggctatagaacac

SEQ ID NO: 43964 - DNA, 201 bp, Homo sapiens
tcagtccaaccatttaccttctgtgtttctctactattgttgctatatatatatctaccattgtgtgtgtgtgtgtgtgtgtgtgtatatatatatatatatgtatgtatgtatgtatgtatctaccattgtgtgtgtgtgtgtgtataaatatatatatatatatatcaggcaatatgctctagctaaggctatagaaca

SEQ ID NO: 43965 - DNA, 201 bp, Homo sapiens
atcagtccaaccatttaccttctgtgtttctctactattgttgctatatatatatctaccattgtgtgtgtgtgtgtgtgtgtgtgtatatatatatatatatgtatgtatgtatgtatgtatctaccattgtgtgtgtgtgtgtgtataaatatatatatatatatatcaggcaatatgctctagctaaggctatagaac

SEQ ID NO: 43966 - DNA, 201 bp, Homo sapiens
aatcagtccaaccatttaccttctgtgtttctctactattgttgctatatatatatctaccattgtgtgtgtgtgtgtgtgtgtgtgtatatatatatatatatgtatgtatgtatgtatgtatctaccattgtgtgtgtgtgtgtgtataaatatatatatatatatatcaggcaatatgctctagctaaggctatagaa

SEQ ID NO: 43967 - DNA, 201 bp, Homo sapiens
tgttgtgacacaaaagatttactctcattgtgaagcggggattatgctcagctgaaagactatatttttgttatgtcagagatacaaggaaacacatgaarttagtaccaccattcttttattccctgccatctgtgtcaacctaacaaaatacaagctccaggagtcacccatattcattaatgaacttatcattatact

SEQ ID NO: 43968 - DNA, 201 bp, Homo sapiens
taatgactggtaaaaaaaccaaccaaacaaaaaaacccagatgaacagataaccaaacaaaaaataccctctcaaatcagaacagcagtgttgtttagcakaaaagttaaaagcttcaaaggaatatgattgaaggctaaataaaaaataaaggaaaagttaaaatgaccttgttctccaaatcttgtttatgaatactag

SEQ ID NO: 43969 - DNA, 201 bp, Homo sapiens
gaaggcaggagagccccgtaccgcgcacacgctcagctcacttctgcagactgtcattctgaaagctgctcggactgttgctttggtttcagtgaatgcartcttatgtaaagctgcccccagtggtgaagaacattatgggcatgtgcagaaatgtctctcttttatcttgcaaatgagcaggctctctgctggaaaatg

SEQ ID NO: 43970 - DNA, 201 bp, Homo sapiens
ggttcaggaagagggaaaggcatacaagaagtcccatggatgatgaaatgagagcatggacgctatcaagaggaggctagagaaacagatgaggaaggccrtgactggtgaagtccttgtactatgggtgtggcctggaagattctcactggcccagaaagggaaaaaaaggaaccttttaggcaggagttaggttttata

SEQ ID NO: 43971 - DNA, 201 bp, Homo sapiens
atattaacatgtctttcttaattttcaaacactgttagcaaataggacattattattttcaaattgacagaagaaattgaagttgagagaagctaaatatktgttgaatgttgaaattcaaattaatctaatcacagctttgccagttacatattatgccatcttgggtaattcacttcactctttagatctctatactct

SEQ ID NO: 43972 - DNA, 201 bp, Homo sapiens
ggcatttacaattagcaaaatgaaagaagtgggttttcattggtgaaattagtggcctgttaattagtataatggattttagaagtgggctctcactggtraaataagtggaattcaaggtatatagattagttagactatcgcaaagatagccttgcctaggctttatctctaactcatctatgtccatgcatgagggag

SEQ ID NO: 43973 - DNA, 201 bp, Homo sapiens
tcaggggctacatttccaagtaggacactttcttttttttttttttttttgtttatttgtttcactttttctctatagctctcgccaatggcacaattatrtataaatatatataatttattgtgaatttcttcatttttcaatattgaaaatgctctgatcattttctaaacttcttgcaaatgaaacgcctactatata

SEQ ID NO: 43974 - DNA, 201 bp, Homo sapiens
aacataacttgctttatattatttttcttaatattctggtctatactttaagaatcaatgattttaccaaagatgtgaggaaaaaatgtgaacacaggacrcattatttactcaaggcctactttatgccagaaaaataattttaggcatattaacatgtctttcttaattttcaaacactgttagcaaataggacattat

SEQ ID NO: 43975 - DNA, 201 bp, Homo sapiens
gttcggagatcatagattttggatatttcaacatctttactgattctatcactgtttaaagaatttaactaagtgacctaaacatgctccttcggacagcyaacaacaaataagaatttcttgatttgcttcaaaattaaaatcgctattttctctattatagtataatagttatacgtttagtaaatgcttgttgattaa

SEQ ID NO: 43976 - DNA, 201 bp, Homo sapiens
tgacttcaagaatatattggattttttcactttaaaaagtttagaaggaaaaatatcactgttgaattctacttcttggttatttcaaattatttcaaatrggaagccccctgtaaaagtgtccagacttactataaatgcattatagttctcatctattggtttataaataaaagcatccttgaacgttttccaaaagag

SEQ ID NO: 43977 - DNA, 201 bp, Homo sapiens
atgtttttcattcctcacgtttttgtttcctgtcttactcagcttagatttcatgttctattgtgataattactcttgtacttggatccacaattttgccrtaggaaacttctaggcccaaagttataccctttcaagtgatggctttcatcagcgactgacggagatggggataggtcatctccttgccccaatttggta

SEQ ID NO: 43978 - DNA, 201 bp, Homo sapiens
ctctcttttaagatgctattttctgaccaccactttattatctttctgattatgtattctctaatccttcatgccaaattagctttttatcttgctggaayatcgaatgcatgtttttcattcctcacgtttttgtttcctgtcttactcagcttagatttcatgttctattgtgataattactcttgtacttggatccac

SEQ ID NO: 43979 - DNA, 201 bp, Homo sapiens
ataataaattgtttgaagagggaagattatccatgaggctagttgagaaatccaaaacaaaataatgtgattctaagccacactgaatacttgaggctgcrgaagttactgcaaagacatagagtagtccctcaagagaaaaagaaaagactgtgttctaaaagattttagtaatttgcctgtatactttttaaaagtttt

SEQ ID NO: 43980 - DNA, 201 bp, Homo sapiens
caactgacattcactcttgctttgcagataagaaaataattacgtaagagtttaacaaaagtaatcatgaaacttcattttttcattgtttttcttctctwatactagactttttcttttagcataaagagttagtaggctagtgatattttgaaactgaatcacatactcaaagaaagagggcattactactgagaaaga

SEQ ID NO: 43981 - DNA, 201 bp, Homo sapiens
aatttatctgtgaagatttaatgcacagaaaatattgtcctatattcttttctgtatctccccatttgatattttaaaagtcttttttggcaaacaaagtkgtacctattgttgattgtggatatttaaacgtgggaaattgtgatcagacataaatctctcaaggaaagaccttgtgtcctctctgttattaagaatcca

SEQ ID NO: 43982 - DNA, 201 bp, Homo sapiens
ctgagaataatatctcaaatgacatttaaatgttttgctctgtgagattggattagcagatttactatttttttattttaaagctttttattatgttgtcrtattattgaataactaccttccatatggtccaataataattaagatgttggattgatagattgaatcagcaagaggcttaaagcaagtgaggcttaacct

SEQ ID NO: 43983 - DNA, 201 bp, Homo sapiens
ctttacatttggcttcttagtttttccgttgcctatataattaatttcttgtgttaaattccatgtttgaagcacctacagtagtttctgttttttttttktttttttttttttttttttactgagctctgactgatacactcaccaaaaggattgtgattaaccgagctgacctcacactattttgaaaagtgtgtgaag

SEQ ID NO: 43984 - DNA, 201 bp, Homo sapiens
ctgcacttgtccttcatagcactgtggcagctgcagtttcaggtttgtttgcgtgaaccttggctaaagtatttcttcctactagactgtaagccaaatgraggcagaagtaggaatagtgtctgtttctggttccctagcatggattccagcacagagttttacatatttgttgaatgaataacataaatgaacgaataa

SEQ ID NO: 43985 - DNA, 201 bp, Homo sapiens
atgatggggaaacctgggctaggctggcttatcttcaggcccccagatggcatgtacaggcactggccatggtagtcaggagcggggtgatccccaagtcrttgtggaatgcttgagtgggaggctatagtagctgccctgctgccctgccagtgggggttgagggtggtaccagcttcagtgatgatggcctaggacagc

SEQ ID NO: 43986 - DNA, 201 bp, Homo sapiens
ttagattgtgtaggataatgtatgctattgtaaattcccaagttttgcagtaaatttaacattacaataaaatattgtccattaatagccgtagcaaaacrtccgttggtatagtttactgcatcattgcgtttttgcaaatctgaagtggagaataggatagtaatgactagcatcagaaattgttgctaatttcctaat

SEQ ID NO: 43987 - DNA, 201 bp, Homo sapiens
tcattatgaaatatatgaatacatatatgattaaataatgttatgtttataaatacatttaaattttaactatatataattaatttaatatatatatatakatagatagatagatagatagatagggcctcactctattacccaggctggagtgtagtggcatgatcaaagctcactgtagcctcaaactcctgggctcaa

SEQ ID NO: 43988 - DNA, 201 bp, Homo sapiens
taaaaaaaaattctcagctgaaacatggcctaggtgcttggccaagctgggtggtacgatgtttccttgggatactgccatggtaaatcctataaaaattktaaacccttttaattggaattatcaaatgttaacctgacagtagtatgttagaagtgaatatagtgttgtgaaatattagtagtcttggtttttaaatca

SEQ ID NO: 43989 - DNA, 201 bp, Homo sapiens
acatagcattatgtgtgaaccagccgaggcagtaaaacacagttctctttattatcacatctgaattctaaatgcaaaaacaaaataacatttgtttttcrtaaaagtgaaatgccatggagctctaaccatacaaatgtgttcttctcttagaatttaattgtcctgaatccactcacagtaactgaggaggaaatacga

SEQ ID NO: 43990 - DNA, 201 bp, Homo sapiens
gctaaaaagcactccttttagaaagctccttctaggttgaaaaattcttctagaaggatttacatatgatatggataatttttgctctccttaattttttrtcttccttactttcaatttctggtggccatgtagctttggaaaccagtcgtgaatttcacggtgaaaatgacatgtttttaaaggctgcgaaggttcacc

SEQ ID NO: 43991 - DNA, 201 bp, Homo sapiens
gctgccatttgaaccctctggttgaaaggaataatttttagaagaggagtgctgtacgacaagacaatgtctactttaaatagctttattttaatgagcaygtatgtgagttgtgtcagggacagtgctgggcacttattagccattgtttcagaagagagaaaataaacaaatgctaaaactgattaagaaatatttgat

SEQ ID NO: 43992 - DNA, 201 bp, Homo sapiens
aattgcttgaatccgggaaggggagaggttgcagtaactccatcttaaaactccatcttaaaaaataaaaataggccgggtatggtggctcgtgcctgtgrtcccagcactttgggaggctgaggcgagcggatcatgaggtcaggaaagcgagaccatcctggctaacacagtgaaaccctgtctgtactacaaatacaa

SEQ ID NO: 43993 - DNA, 201 bp, Homo sapiens
agcagcagatggatcgggtttaatcaaggagctgacaatggcttttgttttgctcaatataaaccaggtaaggaagccctgagaggcaagtagacagtctytccagcagaaaactgtgggaatcttatgcttgggaagctgtagcgttgtttaacccccatttgaaagagtgggaatgtcagagagaatcacacaagaggc

SEQ ID NO: 43994 - DNA, 201 bp, Homo sapiens
cctgacctcaggtgatccacctgccttggcctttgactcaaagtgctgggattacaggcatgagccaccgcgcctggcccagataaatcttttgtgaaagraagagtcaatcgatgcagcaaactccattgttgtttcattttcaaaaattgccacagccacccctaaccttcagcaaccaccatcctggtcagtcagcaa

SEQ ID NO: 43995 - DNA, 201 bp, Homo sapiens
gtctttccagcagaaaactgtgggaatcttatgcttgggaagctgtagcgttgtttaacccccatttgaaagagtgggaatgtcagagagaatcacacaakaggccctctaggatttattagagctctgcagagagaagatagctgaaatatttgccctggtgcttcttccacttggtgtcatcggcattctaaatgcagt

SEQ ID NO: 43996 - DNA, 201 bp, Homo sapiens
cattcctccagctttctccttctccttgggcctccttattccctgtgaaacaacaatattgaaattaggccaagtaataaccctacagtgccctctaagtrttcaatgaaaggaagagccgcacgtctctttaaatcaaaagctagaaatgcttaagcttagttaggaaggcatgttgaaagcttacgcaggccaaaaact

SEQ ID NO: 43997 - DNA, 201 bp, Homo sapiens
gctgtagcgttgtttaacccccatttgaaagagtgggaatgtcagagagaatcacacaagaggccctctaggatttattagagctctgcagagagaagatrgctgaaatatttgccctggtgcttcttccacttggtgtcatcggcattctaaatgcagttggagcttttcctacccactttaactttgctttttctcttt

SEQ ID NO: 43998 - DNA, 201 bp, Homo sapiens
ttcatttaaaagactacaaattgcaatttgaacagggtcaatttatgattttttaaacttagcaaggagaaagatttaaatgtagaaagaggtggatgtayagtcatgtgttgcttaacagtggggatgttttgagaaaagtgtcctttggcaattttgtcattgtgtgaacattatagaggggacttacacaaacctgca

SEQ ID NO: 43999 - DNA, 201 bp, Homo sapiens
gtttattccattgtttttaaagtgaaagactataaaaatggatgatactcagcttaatttaatttataaagaactgtaattttaataatctgaaaaagatrcataagaatgtaaactacaaactaattttacttatgattaagaatgctaccattctaaataaagtaaaagtatatcaaattttacagtgcaataagaata

SEQ ID NO: 44000 - DNA, 201 bp, Homo sapiens
ctaaatgttcaatctatacagcttcaatattagcaaactgctatgaaagtaatgtttacacatttttttcacatttttgtaattttgagttcaatgttgamccaaaatttcctgggactagaaaaaaaagagcctgattatgagaaaagaagagcaaaacaacagaagacaaatacaattgtagtgtaaaatgtactattt

SEQ ID NO: 44001 - DNA, 201 bp, Homo sapiens
cgtttactttgaaaaatatattttatgtcaggcccctgcttttcttgcctttcacattacctgagtgttgttaacaatggtcacagtggagggctgaattwggatgttgaatttagccataagacaatttatactttgaagattagatttaagctttatttttcattatttaatatgctgaagataagaggagccaaaatg

SEQ ID NO: 44002 - DNA, 201 bp, Homo sapiens
ggagtgcagtggcgcaatctcggctcactgcaagctccgcctcccgggttcacgccattttcctgcctcagcctcccgagaagctgggactacaggcgccygtcaccacgctgggctaattttttgtatttttagtagagacggggtttcaccgtgttagccaggatggtctcaatctcctgacctcatgatctgcccgcc

SEQ ID NO: 44003 - DNA, 201 bp, Homo sapiens
atttaccattacaaataaatacaagggcctgatacttttatggtttaattttttttgctataataatgagatagtttattccattgtttttaaagtgaaakactataaaaatggatgatactcagcttaatttaatttataaagaactgtaattttaataatctgaaaaagatgcataagaatgtaaactacaaactaatt

SEQ ID NO: 44004 - DNA, 201 bp, Homo sapiens
aacaaataaactacttggtatttaagcaaatggccaaaataaagtcatattctgattaaaattagtgtttctgtacatgctgattcattcatatttatttwtttcctacatacagcatatgtcttaagtatattcaaggtaattcatttcagacaaattaaaagtagatattgaagtaccttatatgtgaggtttgcaaat

SEQ ID NO: 44005 - DNA, 201 bp, Homo sapiens
ttgtggattagaaagattatgaaataataatccaagtccattgttaactcaaggacatttagaaaccataaagaaggaaaagaaaaacttttattgaagtktggaaaaacatattgaagaatatttaccattacaaataaatacaagggcctgatacttttatggtttaattttttttgctataataatgagatagtttat

SEQ ID NO: 44006 - DNA, 201 bp, Homo sapiens
ttggaggactctgtaaagtaatggcagactggagaggaaatcagagtttgaaggataaccccatacaataatatgttccctggactcccctttttttccccatatttcctggcttagactcttctgcaagctgaatctgggaagtgcacaccaagcatggacaaaaaacctccaagcaaaacactttctcaggccagagga

SEQ ID NO: 44007 - DNA, 201 bp, Homo sapiens
atttcatctaattgcattatgaaataaatccacatttatagattactaattatgacactaaacgtaatgtatgcttttcccaatttattgatttctatcartggtgttatctttctcccagtgtaacgggcacataatttttaggtcaactttgattcatcttctcttatttcttaaatacaaaaaagtacctaatttggc

SEQ ID NO: 44008 - DNA, 201 bp, Homo sapiens
aaatattacatgtagcccataaatatgtatgactattatatatctataaaaattaaaaataaaaaaatagaaaaaaattaagctatttttttaaaagaccrtaatagatatattttggcaaacaccattgtattagtctgctttcacactgctgataaagacatacccgagacgggcaatttccaaaagtagaggcttaag

SEQ ID NO: 44009 - DNA, 201 bp, Homo sapiens
gcatgcaattacatcacaattagaagatcactttaaccttcattgaactatactgatgcacaagcactgtacctatcaaataatgaataaagacaaaatarataagacataattctttctctcaagaagaatgaatgtttgggggggatgacagatgtgaacctttaatgcaaaacagaacagaggtatgcatgtatctcc

SEQ ID NO: 44010 - DNA, 201 bp, Homo sapiens
actttattcaagatgatacacttagcctctcacacctctgtatgtacttgttctctaatctgcctccagaatcaatataaatgcttttattcatgccccarataatctccaacctgaccccagtttgtctcctctactacttacctcctgcaccagccttctgattgttcttttattttatttattaatttaatttaatgt

SEQ ID NO: 44011 - DNA, 201 bp, Homo sapiens
aacaagtgtatcatagccttaagagaccaggatgctgataatttagaccgtgctgcgggtgctatcagaggccgggcagcaagagttgctcacatcgtcaygggtgaaatggacagttacgagccaggggcttacacggaaggtgtaatgagaaatgttaacttccttacaagtactggtaagtcagttgccaataacagc

SEQ ID NO: 44012 - DNA, 201 bp, Homo sapiens
aaggataacaaagtttcagtagggcactttagaaggctggaaaatgtagtcaaagctcatggtagtgtacagcattgccagaagaggtgataataggaaaragtcatactttcttttttatttcaaaaatgctcttgagggtcataggcatagtttgcacagcattttgaaaattaccaagaatcttagtttaaaaactta

SEQ ID NO: 44013 - DNA, 201 bp, Homo sapiens
gcccgaccaacatgctgaaaccccgtctctactaaaaacaaaaaaaaattagccaggtgtggtggcatgcacctgtaatcccagctactcaggaggcttargcaggagaatagcttgaacttgggaggcagaggttgcagtgagcagagatcaagccactgcactacagcctggatgacagagggagacccatctcaaaaa

SEQ ID NO: 44014 - DNA, 201 bp, Homo sapiens
ttattttatttattaatttaatttaatgtattgagacaaagtctcactctattacccaggctgcagtgcagtggcatgatcttggctcactgcaacctccrcctcccgggttcaagtgattctcatgtctcagcctcctgagtagctgggattacaggtgtgcaccaccacactgggctaatttttgtattttaatacaga

SEQ ID NO: 44015 - DNA, 201 bp, Homo sapiens
tctttggaggaatattagagaatgcagaaataatgacttggatacaatacagactggcttcacattcaaagaaaaaatatatgattaacagagtccaaccytgagacgacccagatgttgaaatttcagataaagactataaatcagccaataaatctatgcttaataaaataaacttaataaataaataggaaatctcag

SEQ ID NO: 44016 - DNA, 201 bp, Homo sapiens
tttaaacagttctgccatgggagtgccagaaaatttataatacctcgtggctcctacccaataccctacaattaccattcagtgtgagttcttggtagatrtgtacataacacattttatattttgtagagtcaaataaaatacgtgtttcaaatattaagtctcaattttgcaataaggtattcaaccagttgtcattag

SEQ ID NO: 44017 - DNA, 201 bp, Homo sapiens
aacagcctactggtaacatagacataaacagtagtcctctaaattaatacgtaattacgaatggagtagaaatgaaagaaatatacagggtgctaaaaaaragaaacaatttgaatttaaagggaaagaggtgatgtagaaaacctctctatgttagaggccaaaaggataaggtagatgttatccaggagaagtaggagg

SEQ ID NO: 44018 - DNA, 201 bp, Homo sapiens
taatactgggaggcattgatgaatatggccatttattattcatttgaaaatgcttaagttttatgataagctttagaattctttgtcatttcataagtcaycatctttatatgcatttcatctaattgcattatgaaataaatccacatttatagattactaattatgacactaaacgtaatgtatgcttttcccaattta

SEQ ID NO: 44019 - DNA, 201 bp, Homo sapiens
ctagagcttctgctctttacctctcttccttagtatccagttaattcattcatttgataaatatttattgagcttctgttatgcacctggcattgtaaaagtgctgaggatatattaatgaactaaagagacatgcttcttgttcttgggaagccaacagcctactggtaacatagacataaacagtagtcctctaaatta

SEQ ID NO: 44020 - DNA, 201 bp, Homo sapiens
tgacattaacttttgtgtatggtgtgagatgagaatctagatgatgtttttctcatacatatatccacttgacctagtgcaatgtattaagatggtcctcygctccccacagcaccaaagcttcatattattgttgttgctgtagatcaggaacgtgtgtgggtttgtttctggacttttttccattgatcagtttgccat

SEQ ID NO: 44021 - DNA, 201 bp, Homo sapiens
agatgccacctgtacttattacaatgattatttgtaattgctttattattacttaactctggtatatttttaaataaactatagtcaaattagtcgtatataagaggaagtataggtgcataattttcttaaatcctccatgtttaactaaaagttggtccatgccaattcagtcagacataatcaaacatctgacggtaa

SEQ ID NO: 44022 - DNA, 201 bp, Homo sapiens
gtgttctccttttttctaccttgggtttaagggatttgtaattattaatttcaaggggttgtagcttccactcatacaggaggggctgccttctccctttyggaactaaacaggacctttttcaccttttttaaagtagtctagatgacacaagaccagtaattacacatgtttgcacatgagcttaattcatggcagata

SEQ ID NO: 44023 - DNA, 201 bp, Homo sapiens
acttgacatttttattgtttgtttattgtctgtttccctaactagattgcaaacatcttgaagagatggtgttggcattgctcactgcttatttcctagcwtctataattgtacttggcacacagaaagcattgaataaatattttaaattaactttctaattttaactgtatattcacctgtgaatttaagaagtaatag

SEQ ID NO: 44024 - DNA, 201 bp, Homo sapiens
agagggagcccgtatcaaccactaggatgggcaatctaacgctgaacgcatacatatgaacagataataaagtattacccgtcattggagagaatagggakaaagctgggaattagaacaaatgaaatatagatattacaggtagacaaaagataatgatttagaattctaattgatgtcctcattgatatttgggaggtt

SEQ ID NO: 44025 - DNA, 201 bp, Homo sapiens
aggttcaggaagagggaaaggcatacaagaagtcccatggatgatgaaatgagagcatggacgctatcaagaggaggctagagaaacagatgaggaaggcsatgactggtgaagtccttgtactatgggtgtggcctggaagattctcactggcccagaaagggaaaaaaaggaaccttttaggcaggagttaggttttat

SEQ ID NO: 44026 - DNA, 201 bp, Homo sapiens
atacaatgtctggaatctgtgaataacatcgatttttaagttatgagttgatttttaactactgggtttaggccaggcaggcccaggcctggtttcaggcstggctctgggctgcctgtctttggttttacttccttgttgttttttttaaaaacaggtactgagtataaaacaatataaaacaatatgagagggtctctc

SEQ ID NO: 44027 - DNA, 201 bp, Homo sapiens
aatgcttcacaagggatccagaatatgacaaccccaccagaacctcaggcagcaaccctgggaagtgcccttgatgagctggaggtaagtcgggagaaagrtaaagtgtgatctgatgtcctaatacagtaataataataataaaacagaagaagatccacatgttggcgtttagagcatgagaaaataaaaaatccagat

SEQ ID NO: 44028 - DNA, 201 bp, Homo sapiens
agggttgtgattgatttgagcaagcaaggggtacacgacaggggctgcatgcgctggcggtcagagagaaacagaacagggcagggagtttcacagtgttsttctatacaatgtctggaatctgtgaataacatcgatttttaagttatgagttgatttttaactactgggtttaggccaggcaggcccaggcctggtttc

SEQ ID NO: 44029 - DNA, 201 bp, Homo sapiens
tttggagtcatacccaagaaattattgccaatccaatgtcatgaagtttttcccctatttttttctaagaattttacagtttcaggtcttatgtttaagtctttaatccattttcagatgatttttgtatatgttgtaaggtaaaggtccaaattaattcttttgtatatggatattcagttttcccagcatcatttgttg

SEQ ID NO: 44030 - DNA, 201 bp, Homo sapiens
atctcctggttttgatttcattttcctgatgactagtgatgttgcacattttttcatatactctgagtatctgtattttttctcttgagaaatgtctattygggtcctttgccattttttttattgggttatttgttttcttgctattgagctgcttgaattactgatctgttttagatattaactccttatcagatagat

SEQ ID NO: 44031 - DNA, 201 bp, Homo sapiens
taatgaagatatacaaatgattagatatgagagtaacttttattcatagatttcctctttcccaaacaggtggaaacccttattttcaatgtacagatatygaataatgtaaagctacatgatagagggatgagaaattgactgagtttaaaaaaaaaaaagttcagtgtttttatatatagatataatgctttaaaagtt

SEQ ID NO: 44032 - DNA, 201 bp, Homo sapiens
ttttctcttttgcagattttcctgttgtctttcaataatcaattttctattttgatttgattgtgcgcagagaacacactctttgtgactaatttttttttacatatattgaggctattttatggcccaggatatggtctatcttaatatagtttaatgggcacttaaaaataatatgtatttacccttattgtcctttgc

SEQ ID NO: 44033 - DNA, 201 bp, Homo sapiens
taaaaaagcaataatatttttaaatttcttaattgtgttagcagctgttctccaatttataatcatattatttataatcataatgctttaaaaattttcayataacttactactgcaaacttcacagtgccttgagatacaataaatccattttgcagaataaggaatctagactctaaaagttaacaaaaaaagacataa

SEQ ID NO: 44034 - DNA, 201 bp, Homo sapiens
gattactgatgtgagatattttctgtttctctgcctctttttttaaaaactcaagcccagtgagagctggaatgttttctcttttgcagattttcctgttrtctttcaataatcaattttctattttgatttgattgtgcgcagagaacacactctttgtgactaatttttttttacatatattgaggctattttatggcc

SEQ ID NO: 44035 - DNA, 201 bp, Homo sapiens
agaaaagaaaatcccattttctgaggagaaatgcaagccagctgcagaaatttgcgtaagtaatgaggagccaaatgttaagcaccaagacaatggggatratgtctccagggtatgtcagaggtcttcatgggagccccttccatcacaggcctggaggcctaggaggacaaagtggtttcgtgggccaggcccagggtc

SEQ ID NO: 44036 - DNA, 201 bp, Homo sapiens
agcaacacgtggcataggctttgaggaagaataatgttctctgcttctgtaccaagattagagtttgtttcagatatagctgatgagtaatggatgaattstacaaaaaaaaacaaacaaacaaaagacttaggctgtcattaactgtattcagcacaagggaaaagctcttcagaaggatggttggactttaatctactt

SEQ ID NO: 44037 - DNA, 201 bp, Homo sapiens
tagaaatgaagcagaaatagagccaaacatatatgatcaatttatttttgacagcaattccaagattatttaaaaagaaaagaaaatcattttgactaaawgatgcttgaacaatatctgtatatgaaaaaaatgtactgcacattactccatatacaaaaattaatacaaagtaagcataatcataaacataaatctcta

SEQ ID NO: 44038 - DNA, 201 bp, Homo sapiens
tgtttcagaaacctgaatttgctaaacagcagctgtcataggcatagcaaagaaaaaaatacttaaaatatattgaggtttctaggtgtagaataagcacmaactaatggctgaccagatttaagagatggaaaagaggaacaaggcattcttcattgagatagttaatacaaagagaaaaaatagttgaataggtgagta

SEQ ID NO: 44039 - DNA, 201 bp, Homo sapiens
taaaattgctgctttataaggtacctgccatgtgaatactgtatttactcaccttgatctaactattatttattctgctgtatctatttttatctttgatkcatatttagtgcccagatccatcttgtaaacaggacttgttggcctacctggaacagattaagttctactcccaccaactgaaaatctgcagtcaagtta

SEQ ID NO: 44040 - DNA, 201 bp, Homo sapiens
attgcttgatttacatctttaatccattttgagttgatttttacatatggtgtgtgaaaagggtctaatttcatcttctgcatgtagatatccattttccycaacaaaatttattgaagagacttatcttttccacattttctattcttggcaccctcatcagagattagttgatcatatatacatgggttcatttttgga

SEQ ID NO: 44041 - DNA, 201 bp, Homo sapiens
tcagggttctccaaccaaccccagttcactctgtttctgttaatactttatctttcaatcacagctcatcttttcctcaatgaattcagactgattccatwgatacccacttctaacttagctttaggatataattgttctcttataaactgattgtgtgggcagccaggtgatgcagactgataagccaagatacacctg

SEQ ID NO: 44042 - DNA, 201 bp, Homo sapiens
cttgggacccttagcctgccatgcaggagcactgccccccaacccccctccccacgcaaggcccgagcctccccgatgggcgctgcccccttctctgcggygcccagtcccattgaccccccaagggctgaggagtgcggcacttggtgtgggactggcaggcagctcagcccagggatcctgcacgtgatccactagagg

SEQ ID NO: 44043 - DNA, 201 bp, Homo sapiens
ttatgtgtttgacacgtaaatctctttgctttgttatgccatctgtgtggcacagagggctggtggaattggagagggatctacatgtgctttgttactgyccctcaatagttcggagtaatggcttatgttagcagtggttgtttatctaacaaacaaacaaaaccctaaattatatttttaaaaaggttatggttattt

SEQ ID NO: 44044 - DNA, 201 bp, Homo sapiens
tttacattttccttaaaaattatggatagttctgactttagatttcccaaatgcaatatattttataaaaactgacaggtgacattccctctaaaaagaakaaattgtgcttcctcaaggaaacctaccaaaatatcttacagattaaatattactaaatatttagataattgtggcagcttcaaaatatattcaatctgt

SEQ ID NO: 44045 - DNA, 201 bp, Homo sapiens
tcactgcaacctctgcctcctgggttcaagtgattctccttcctcagcctcctgagtagctgggactacaggcatgtgccaccacacccggctaatttttrtatttttagtagagacagggttttgccatgttggccaggctggtcttgaactcctgacctcaaatgatccacctgcctcggcctcccagagttctgggat

SEQ ID NO: 44046 - DNA, 201 bp, Homo sapiens
caatttattcaatgtatatgagcattctttggatcttatagacaatgataaatggacattaaaataaaacataatctgaaatcttgctaaatctggccctycatttgtcagattaatagctttgttcatttttatcataactatctgggtatttgcctttcacactccaatatcggatatgttcatggcggatctattttc

SEQ ID NO: 44047 - DNA, 201 bp, Homo sapiens
tggcctcccaaagtgctgggattacaggcacccacgtagttttggcagctcttaatctttttcaaatgtgacagtgtctagttttttttttttttttttttgaagttttagctatcagaaatattgtaaatgtctaaatttagggcaaaaatatttgtttcaaagtccattttgtttcactgtatttatacatatatatga

SEQ ID NO: 44048 - DNA, 201 bp, Homo sapiens
ttcactctaatcaaacttcagtcgcattctccactgaaatcattgcaatgtttgcaagtattgttcaatcattcctcctttaaacactcttttcttctggmacctattatgccacactctcctgattttccttctacctctctggccatttcctatgaatctactttgtgggtgtttttctactgcctatgttagcgttcc

SEQ ID NO: 44049 - DNA, 201 bp, Homo sapiens
tttattcaatgtatatgagcattctttggatcttatagacaatgataaatggacattaaaataaaacataatctgaaatcttgctaaatctggccctacawttgtcagattaatagctttgttcatttttatcataactatctgggtatttgcctttcacactccaatatcggatatgttcatggcggatctattttctta

SEQ ID NO: 44050 - DNA, 201 bp, Homo sapiens
cagttgatatatgatatcatcctcttgaaaccttttcttctcctggtctccatgacatcacagtattgtgggcaacctttcttatctctggccactttttstaagtctcattgaaggagtaacctcatgtttctgcctaataaatattaatatcttatatacctccaagaactctttctcctcacataatcatatctaatt

SEQ ID NO: 44051 - DNA, 201 bp, Homo sapiens
cttatctatttctttgccttaacaacccagctatatgcagatggatctcaaatacacatctcccatctgtaatgatttttctcctgaatttccaacctgtrtataaaccactatgtaatatatatacccaaaaatcagcatatctaaaggagaacttctgtcctcatctaattccgctgccacgcctgtacttttttctcc

SEQ ID NO: 44052 - DNA, 201 bp, Homo sapiens
agggaaacaacaggcactggtgcctaatagagggtggagggtgggaggagggagaggttcaggaaaataatgaatgagtattaggcttaatacctggtgasaaaataatctgtaaaacaaaccctcatgacacaagtttacctatataacaaacctgcacaggtactccgacttaaaaggtttaggaaaattatgtttagt

SEQ ID NO: 44053 - DNA, 201 bp, Homo sapiens
tttttctcctgaatttccaacctgtgtataaaccactatgtaatatatatacccaaaaatcagcatatctaaaggagaacttctgtcctcatctaattccrctgccacgcctgtacttttttctccattacctctcgatgaattgtatttatgttcatctggtttcccaaacaaaagtctgggaatcatctttgatttttt

SEQ ID NO: 44054 - DNA, 201 bp, Homo sapiens
aatgaacatctatagtgccttctctttgtaaataaatactatatatttcaccatttttcctctatcctatatatgagcttttgagaagactggcattaggrctcattgggtttttagaaatgatgactaaccaacaccatataaatatttagcacatactattttcttttgttttttataatttcagcttttattttggat

SEQ ID NO: 44055 - DNA, 201 bp, Homo sapiens
aaatagacatattaataaagtcatttaatttaaaaagtaataagtaagttttaatcaaatgccaacaatacaatttgtagatggaacctgagtggtcctgwgaccaagctattaaatatccattcctcttccctactgtctttgaaacttgtttctttcttacgcttatttgtaaaaaaaaaaaaaaaattggaaagtgac

SEQ ID NO: 44056 - DNA, 201 bp, Homo sapiens
atatcttttcaggtttttacatttctgaggacagtctacccctgcccatctgtcatgtggccccacccaaactgactccttgtcccaccaaactatccttgaaaaaccctagcctctgaattttcaaggagattaatttggtaataactccatctctcacatggcatagctgaccttgtgtctattaaaatctttattgca

SEQ ID NO: 44057 - DNA, 201 bp, Homo sapiens
aaggagaacttctgtcctcatctaattccgctgccacgcctgtacttttttctccattacctctcgatgaattgtatttatgttcatctggtttcccaaacaaaagtctgggaatcatctttgatttttttacaatcattttttcttgtatgtagctagaatatttcttataatgtgcaaatcttaatttgtcaatgttct

SEQ ID NO: 44058 - DNA, 201 bp, Homo sapiens
ttaaatttccaagaataccagtggtgttttctgtggctatttttttttttttttttgagacagagtcttgctctgtcacccaggctggagtgcagtggcaygatctcggctcactgcaacctctgcctcctgggttcaagcaagtctctgcctcagcttcccgagtagctgagattacaggcgcctgccaccaggcccagc

SEQ ID NO: 44059 - DNA, 201 bp, Homo sapiens
ttttcttgtatgtagctagaatatttcttataatgtgcaaatcttaatttgtcaatgttcttcagaaaacattttagtgtctccccattactgtttgtatraattaaggatcacttgtccccggtctttaggtaggattcgcatattcgactcttttttagagatcatggctacaattcatagctatcttgggcaaattcc

SEQ ID NO: 44060 - DNA, 201 bp, Homo sapiens
ttcactcaggttaataatttcatcatgatctgactgttctcttagccttttccagcttcctcctgattttaatcccatgagatgtctgcttctcagaggayatagattaacaaagtaataaagtagatcaacttgtttttgatgtctctttaaataactttctaccttgccaaaaattaaagtaaaataatattataaaca

SEQ ID NO: 44061 - DNA, 201 bp, Homo sapiens
atattgtggaaaagattgagttgatccagtagcattaaacctagcaggaggaagagtagttgctgaataacaactacatttagattctttagttgaaaaawttagacttattatgatcttactggaaataattttagttgaaattttccattgtaaaataatacatgttcattggaaaaaactgaaacaaagtttaaagtt

SEQ ID NO: 44062 - DNA, 201 bp, Homo sapiens
agctattttcattccgctctttaagtcttcaactgtctagtttttatttttgcaataccattttaaatttccaagaataccagtggtgttttctgtggctwtttttttttttttttttgagacagagtcttgctctgtcacccaggctggagtgcagtggcacgatctcggctcactgcaacctctgcctcctgggttcaa

SEQ ID NO: 44063 - DNA, 201 bp, Homo sapiens
gctttgttcatttttatcataactatctgggtatttgcctttcacactccaatatcggatatgttcatggcggatctattttcttatttacttgcttccartttaactaaatatgtgaccaaactacttagaactatccacgaaaattctacaaatatacttaaaattagttgactcttctttggaatgtgaaactagtca

SEQ ID NO: 44064 - DNA, 201 bp, Homo sapiens
catcttctctgatctatataactagactaagccttttatatgcagttttccctacttggtgccttttttcttcaaagccctatctcagtttgtgatattcrtttctttgcatattgtgtatatctctctttccaagtaaacactaagtctgtaaggattttatctgtttggatctgcattgtatctccattttttcaaaac

SEQ ID NO: 44065 - DNA, 201 bp, Homo sapiens
acagttttcagataatcttgttttccctaggtagacaattttgagacctgggaataaatatagttatttgttaacaatatttgcatctattgcttttttttattcatttagatttactagaaccttgagtaaaatattgattaacctcacttatagtgggaatgcttatcttaatcttgaattttgagcatgacacttgct

SEQ ID NO: 44066 - DNA, 201 bp, Homo sapiens
aatgttcaatcatccttcacacacatatcttgaatccagcaatattttccaggcatgtgtgtgtttggctgtatgtgaatgtgtttgtctgtgtgtatgtktgtatcttcaactctaaggagcacaggagtcctgctgtttagtagggggagacagattcttgttgaagaaccatacctgatttatgaccaaatatatata

SEQ ID NO: 44067 - DNA, 201 bp, Homo sapiens
ttttttggagatagagtcttcctctgtcgcccaggttggagtgcagtggctccatctcggctcactgcaatctctgcctctcaggttcaagtgattctcgygccttgtcctcccaagtagctgggattataggtgcctgccaccacacctgctaatttttgtatttttagtagagactaggtttcaccatgttggctgggg

SEQ ID NO: 44068 - DNA, 201 bp, Homo sapiens
gaactaaggaagaaaatcagcattaccactttacaagttcatatttgtaatctagctgaatagagagcttatgtttaaaagttgagatcttatttttttttaatgaggctggccgccaacttcagaaaaattctccattccaattagcctgtaagagacaaattgttaattccagtttaataatcttattttcctgaggtg

SEQ ID NO: 44069 - DNA, 201 bp, Homo sapiens
aaatttaatacatatatagatatgcacacatatctataattgtgcttatttcaatagatatatactgctatgaaatttataatatttagttgctataataacaaattttgtcatgaaaacttttaaaatatatagaaaaatatattattcatctcacattcattctgcatgaagaagtgttaccgaatactcaatagtaat

SEQ ID NO: 44070 - DNA, 201 bp, Homo sapiens
attcaactatgacattttgtttagtaaagattcatccattttccttactggaaaagcattctaagtttttaacaattattaataatgctgctatgaacatycttatacatgtgctttaacacacatttaagtacattttcaattccacctgggagaagagttcttagatcatcatcaagtataacatatttagctttagaa

SEQ ID NO: 44071 - DNA, 201 bp, Homo sapiens
ttacaaactttacaaggacttacacatattatggttccttattttctttcaggtcattgtgagatatttcttttttttggagatagagtcttcctctgtcrcccaggttggagtgcagtggctccatctcggctcactgcaatctctgcctctcaggttcaagtgattctcgcgccttgtcctcccaagtagctgggatta

SEQ ID NO: 44072 - DNA, 201 bp, Homo sapiens
aaaatttaatacatatatagatatgcacacatatctataattgtgcttatttcaatagatatatactgctatgaaatttataatatttagttgctataataacaaattttgtcatgaaaacttttaaaatatatagaaaaatatattattcatctcacattcattctgcatgaagaagtgttaccgaatactcaatagtaa

SEQ ID NO: 44073 - DNA, 201 bp, Homo sapiens
tcacaaatacatgtgcgcacacgtatgtgtgtgcacacatgcacacagacatcaactgaacttgttttaaagccggtgctatggccacaatgaaagggctmtgcagatttctttacaattataatgattatcaccaattacgtttcctgaaatacagaaaataaaactgttcacattttatgattaatctccagctgactg

SEQ ID NO: 44074 - DNA, 201 bp, Homo sapiens
aaactaagtcagaggggtctccagcagtcagatcatgaggaatttataggtcacgttatggattttcaatgacttactgtgatgagaggtccttgcagggrtgaaagtatattggtcggagttctccggggaaacagaaccaatagattgtgtgtgtgtgtgtgtgtgtgtgtgtgtgtgtgtgtgtgtgtgtgtataggt

SEQ ID NO: 44075 - DNA, 201 bp, Homo sapiens
tcatttaattgtataattatactctttcacaaatacatgtgcgcacacgtatgtgtgtgcacacatgcacacagacatcaactgaacttgttttaaagccrgtgctatggccacaatgaaagggctctgcagatttctttacaattataatgattatcaccaattacgtttcctgaaatacagaaaataaaactgttcaca

SEQ ID NO: 44076 - DNA, 201 bp, Homo sapiens
cctactatagctgtattctttatgaatcattgtaaaaataagaaagatataataatactagatatgcattgatatatgttgtaagacatagatatacattrtaaaaatatgatagagataatactagaaataaagtgtcaaattattagaagcattctagaatttttaattgactttataattacaaaaaatgctactttt

SEQ ID NO: 44077 - DNA, 201 bp, Homo sapiens
cttttctttactttcagaccatcaactgtcacattctcttaagaatctttttacttcttcatttaattgtataattatactctttcacaaatacatgtgcrcacacgtatgtgtgtgcacacatgcacacagacatcaactgaacttgttttaaagccggtgctatggccacaatgaaagggctctgcagatttctttaca

SEQ ID NO: 44078 - DNA, 201 bp, Homo sapiens
atggttgaaaggtctcagaaaactataatcatggcagaaggcaaaggggcagcaaggaccttcttcacatgtcggcaggagagagaagcatgaggagcaargcaggaagaacctcttataaaaccatcagatctcatgataactcactcactatcacaagaacagcatgggagaactgcccccatgatccagttacctccc

SEQ ID NO: 44079 - DNA, 201 bp, Homo sapiens
acatataagtgagatcctgcaatagttttctttctatgtctagcttattccacttagcatgatgttcttcactttcatccatgttgtggcaaatgacaggwtctccttttttcctttgtatatatagaccaatttctttatcgattcatctgttgatggatgcttaggttgttttcatatcttgactattgtgaataatga

SEQ ID NO: 44080 - DNA, 201 bp, Homo sapiens
ttaatgggtgcagcacaccaacttggcacatgtatacatgtgtaacaaacctgcacattgtgcacatgtatcctaaaacttaaagtataataataaaaaargaaagaaatacctgagactggataatttataaaggaaagaggtttaattgactcacagtttcacatggttgaaaggtctcagaaaactataatcatggca

SEQ ID NO: 44081 - DNA, 201 bp, Homo sapiens
gctcacgagaggatctcctgatccacggattacaaagatccgtgggaaaagcgtggttttccaggtggggtctcacaatcacttactgctttacttggctsagggtgggggttcatttggctccgtgctgctcccaggtggaccatcgccccaccctgcttttctttgttcttcgtgggtcaaattgtttgcctagtcagc

SEQ ID NO: 44082 - DNA, 201 bp, Homo sapiens
gaaaccctgctttaatggaatatacccagaaatggtcatttatctaaattgttaagcattctcttactatcttttctcctttctcgtttatcaatttcatytcaagattgttggtacaatctttttattttaaagaccattctccttgggagacaagatgaaagcaaagtaaaaatattgttattttgctttctctctatt

SEQ ID NO: 44083 - DNA, 201 bp, Homo sapiens
tatttaagatgaagttgctctggttcaaaggcctctgacactaccatgctgccaaggagattctttacactttagtcttctcaggactaagaagcattcaycttccccagcttctgactacctttcctctaggttatcattatccaactttaggtttcttttccctctattttacctaataatctcctatctttattcaaa

SEQ ID NO: 44084 - DNA, 201 bp, Homo sapiens
ctttcctctaggttatcattatccaactttaggtttcttttccctctattttacctaataatctcctatctttattcaaactgcatacaaccacccatcartgtgctcagccaataaaggacctttctggtgtactgggagccagttgcatcagaaggcagtgggcattgaacaaataaccacagggattgccatggtaga

SEQ ID NO: 44085 - DNA, 201 bp, Homo sapiens
gatcagagacaaaggtaaaatattaaaaaattataatataaatacaaaatgtttagaacaaaataggaaaaaatattcgggatctagggctaggcagagtycttgataccacaatcatgaagtgtgaatttaaaaaattgatgaattagacttcatcaaaatgtaaaatgctaactttgtgaaaaccatgtgagaataaaa

SEQ ID NO: 44086 - DNA, 201 bp, Homo sapiens
tagggctaggcagagtccttgataccacaatcatgaagtgtgaatttaaaaaattgatgaattagacttcatcaaaatgtaaaatgctaactttgtgaaarccatgtgagaataaaattacaagctaaagaatgggagaacatatttgtattgtacatatataccatggaatactactcagcaataaaaaggaataaactg

SEQ ID NO: 44087 - DNA, 201 bp, Homo sapiens
aatttaaaaaattgatgaattagacttcatcaaaatgtaaaatgctaactttgtgaaaaccatgtgagaataaaattacaagctaaagaatgggagaacayatttgtattgtacatatataccatggaatactactcagcaataaaaaggaataaactgttgataaacaccttaggttgaataaatctccaagaattatgt

SEQ ID NO: 44088 - DNA, 201 bp, Homo sapiens
cctagtgggaaactgttgtattttgtaaaaggagacttgctataaagaaataactattgttatattctagcctgtatatatgaaaaaggaaattcaggaayaaaaatcaattcattagaatgtttttaaactcttaaaattaccctttccccaaatgtcatgcttttgggtcagcatttttttggtactgctcaagactga

SEQ ID NO: 44089 - DNA, 201 bp, Homo sapiens
aaaacagggatttcttcttggtttggatccattgctggtgaggtagtgtgctttttgggggtgctaaagagccttgttttgtcatattaccagattttttyttctggttccttcttatttgtgtaggctctgttagagggaaggtctagggctgaaggctgtttttcagattcttttgtcccaaggggtgttcccttgatg

SEQ ID NO: 44090 - DNA, 201 bp, Homo sapiens
ctagtttatctgcataaaggtgttcacagtagccttgaatgatcttttgtatttcagtggtatcagttgtaatatctcctgtttctttctattttttttttgagatggagtttcactcttgttgcccaggctggagtgcagtggcacgatctcagcccactgcaacttccaccttccggtttcaagcgattctcctgcctc

SEQ ID NO: 44091 - DNA, 201 bp, Homo sapiens
ttttgggttcttggtgatgaaatctttgcctaagccaatgttatcgtatagagtttttataatttcaggtcttagatttaagtccttaatccatcttgagwtgatttttgtataaggtgagagatgaggattcagtttcattctcctgcatgtggctagtcagttatcccagcaccatttgttgaaaagggtgtcctttcc

SEQ ID NO: 44092 - DNA, 201 bp, Homo sapiens
tattgcattattgctacttgaaaggaagatttgactatttggttaatttgtttcttcttttacctaaatgctttatctattcaaacactttatgaacttaraagcagtgtctgactcacacaagtcttgaaggcattcaaaattaactaccttttgtttcgagaagttaaggcaagatatgagaagtatttccctggggcc

SEQ ID NO: 44093 - DNA, 201 bp, Homo sapiens
attcttaatcctgagttctagtttgcttgcactgtggtctgagagatagtttgttataatttctgttcttttacatttgctgaggagagctttacttccamgtatgtggtcaattttggaataggtgtggtgtggtgctgaaaaaaatgtatattctgtcgatttggggtggagagttctgtagatgtctattaggtccgc

SEQ ID NO: 44094 - DNA, 201 bp, Homo sapiens
taccaataaccaaattgaatatagtttaaaaaagtaataatcaaaaatgtttcttatttaacaaatagttggaatgtttacattatgcatagattttttarttacccatcgatgttctaaaggcactttttatcaaaatggcctacttctgactagattctgggtaaatcacagaatatttaaaacatgtatataggtacc

SEQ ID NO: 44095 - DNA, 201 bp, Homo sapiens
tttattgagagtttttagcatgaaggttgttgaattttgtcaaaggccttttctgcatctgttgagataatcatgtggtttttgtctttgcttctgtttawatgctggattacatttattgatttgcgtatattgaaccagctttgcatcccagggatgaagcccacttgatcatggtggataagctttttgatgtgctgc

SEQ ID NO: 44096 - DNA, 201 bp, Homo sapiens
taataatgctgctatgaacattcttatacatgtgctttaacacacatttaagtacattttcaattccacctgggagaagagttcttagatcatcatcaagyataacatatttagctttagaagatacggcaagttccaaagttttatatatatgtttaatccaccagaagtgaaatagtattgctttttaagttggtccac

SEQ ID NO: 44097 - DNA, 201 bp, Homo sapiens
caaaattatgaaaagaaatatgcctgccttaaactaaattttaccaataaccaaattgaatatagtttaaaaaagtaataatcaaaaatgtttcttatttracaaatagttggaatgtttacattatgcatagattttttaattacccatcgatgttctaaaggcactttttatcaaaatggcctacttctgactagattc

SEQ ID NO: 44098 - DNA, 201 bp, Homo sapiens
attcagtatgatattggctgtgggtttgtcatagatagtgcttattattttgaaatacgccccatcaatacctaatttattgagagtttttagcatgaagrttgttgaattttgtcaaaggccttttctgcatctgttgagataatcatgtggtttttgtctttgcttctgtttaaatgctggattacatttattgatttg

SEQ ID NO: 44099 - DNA, 201 bp, Homo sapiens
tctgtggataattggataataattgctagtctatttagttttgcatttagcttctctagtaaagagggaggataaaataaagtaactttattaatttaaartatatacccattcccagatattttattttgttttccctttaccctgaaatgaatgtgctgactaaaaccactaattacattgtataaagctatcttagtg

SEQ ID NO: 44100 - DNA, 201 bp, Homo sapiens
acagtattccaaccagggtgctgatattgatacaattaagatacaggcgattttcatcaccataaagattgctcctattgaccctttatagccacatatamttccctccaactcccaacccttcctcaaccagtgtcaaccattaaagtattctctctacaatttttcatacagtatatagcctttttggattgacttttt

SEQ ID NO: 44101 - DNA, 201 bp, Homo sapiens
tttttatttttttattttttatttattattattatactttaaggtttagggtacatgtgcacaatgtgcaggttagttacatatgtatacatgtgccatgytggcgcgccacacccactaacttgtcatctagcattaggtatatctcccaatgctatccctccccaccccccccaccccacaacagtccccagagtgtga

SEQ ID NO: 44102 - DNA, 201 bp, Homo sapiens
acactcattccccagaatccaagagccacctgcccagggctttccatcaccatcagggaccctgcttcatccaaaatggggccatcacaagactgtgcacrctctccataaacttgaggactgtcccatgaggagcctgtcaccaccacaggcaatcttgacccctccacaggcaacgtgactgtgcacctctgtgggctc

SEQ ID NO: 44103 - DNA, 201 bp, Homo sapiens
atagaacattgtattgatgtgaacacaggaatgaaactgtatcttaaaaatattttagattacaagcatattatattttgtctttcttattaccacagcartataagtttcccgtagaaaaacttaaaaatttaaatgaaaaatggaaaaaaaatctcaaaaacctagaagagctttcctttgtgattgcctttatggaga

SEQ ID NO: 44104 - DNA, 201 bp, Homo sapiens
tcaaaactttcttttacctgaagcctactgttgtttcaccatcttatatccttcagctcagttaagactaagtttccatttcctaatttaagttggccaaraacattaaattagcaggtgtttgtgttattttgtttcctaatagaacatgaagctgcccaatgaccagtgaagcaattggtatgcagcatcttggcagag

SEQ ID NO: 44105 - DNA, 201 bp, Homo sapiens
ctggataaatctttgttgaacgcttcctacttgtattagtcagagttctccagagaaagagaaccagtaggagattgtttatatatatgaagatttattamgagaaattggcttacatgggagctggtggtgtaaatcagttggagtttgaggacctgagaaccaggggagtcaatggagtaaatcctactcccagtgtct

SEQ ID NO: 44106 - DNA, 201 bp, Homo sapiens
ataattgttaattatgctttagaggaaaaattttctgacctatggatttttttttttttgaaacagtctcactctgtcacctaggctagagggcagtggcrtgatcttggctcactgcaacctctgtctccaaggttcaagtgattcttatgcctcagcctcccgagtagctgggattactggtgcacaccaccatgccca

SEQ ID NO: 44107 - DNA, 201 bp, Homo sapiens
taacatacttaggtagtttaaaaatgctaaacttcctttctcctgcttggcattattctttagacatgtagagttttattccttacttattttccctcgtytatattaacttttcctaatgtccagaaacattacaaacaaaatattgtccaaaagatgcatttcagggatgttcttaaaggtcagcttaaggaaattata

SEQ ID NO: 44108 - DNA, 201 bp, Homo sapiens
cacacattggaatgccgtattttgaagtacatgggtcttggcataatcagtcttaggaaccacatgagatgttcttatttagaaataaatgtatccggccrggcgcggtggctcacgcctgtaatcccagcactttgggaggccgaggcgggcggatcacgagatcaggagatcgagaccatcctggctaacatggtgaaa

SEQ ID NO: 44109 - DNA, 201 bp, Homo sapiens
cttaccttagtctttcttaaatgtatgtgtggctcacatttatttcaatgtttaatattagaaatgttttggtctttatttacaagctcggtaatacatacggtagaaagttaacccttgtttatatcaattagcctatagtaaattgattttgttacattgttttgcttaaagtcacagttcccaagaaccaatcaaaaa

SEQ ID NO: 44110 - DNA, 201 bp, Homo sapiens
ataaaattgtataccataaaaataaaatttaggtaagtttaactacattaaagttaaaattttctctttttttgtttttgagacagagtcttgctctgccrcccaagctggagatcagtggtgcaatcttggctcactgcaacctctgcctcccaggttcaagtgattttcctgcctcagcctcctgagtagctgggatta

SEQ ID NO: 44111 - DNA, 201 bp, Homo sapiens
aatacataatgataagaggtttgatttgacaggatgatataacaattttatatctgtactgataagcacaacattggctaaaagtatacaaaggaaatacrgaattaaaagattaagcattgtcacgttgttccaatgagaacagtctgaaataatagagtccaggaaaagactttcatatctatggaaacgtgatttata

SEQ ID NO: 44112 - DNA, 201 bp, Homo sapiens
ttgctgtgtatgcttgagtaacaaataacacaaaacttagcttcttaaggaatctggcagtgtcttagctagttgagtttggcttagggtctcttaaaagrttacagttgaagtgtttgctagagttgtagtctctgaaggcttaactggggctgaacgattcactttcaagtttgctcatgtggtttttgcagaaggctt

SEQ ID NO: 44113 - DNA, 201 bp, Homo sapiens
acttaccttagtctttcttaaatgtatgtgtggctcacatttatttcaatgtttaatattagaaatgttttggtctttatttacaagctcggtaatacatacggtagaaagttaacccttgtttatatcaattagcctatagtaaattgattttgttacattgttttgcttaaagtcacagttcccaagaaccaatcaaaa

SEQ ID NO: 44114 - DNA, 201 bp, Homo sapiens
agtaatgatattaactctactagaaataagaagatgcccttaagtagtcttccatttagagcttatgatgccaatatagctatgctcacaaagatttcagkttctaaaataaatgttgacagggagtagattttattaaggaatgaagattttaagtagattaataacatgcttccagtcacaaacatggtcttcagttac

SEQ ID NO: 44115 - DNA, 201 bp, Homo sapiens
tacttaccttagtctttcttaaatgtatgtgtggctcacatttatttcaatgtttaatattagaaatgttttggtctttatttacaagctcggtaatacatacggtagaaagttaacccttgtttatatcaattagcctatagtaaattgattttgttacattgttttgcttaaagtcacagttcccaagaaccaatcaaa

SEQ ID NO: 44116 - DNA, 201 bp, Homo sapiens
gatgccaatatagctatgctcacaaagatttcagtttctaaaataaatgttgacagggagtagattttattaaggaatgaagattttaagtagattaatarcatgcttccagtcacaaacatggtcttcagttacccagcagagccaagttgctattttcatgtacaagatacattgaattcagatcagtatacaattaaa

SEQ ID NO: 44117 - DNA, 201 bp, Homo sapiens
atacttaccttagtctttcttaaatgtatgtgtggctcacatttatttcaatgtttaatattagaaatgttttggtctttatttacaagctcggtaatacatacggtagaaagttaacccttgtttatatcaattagcctatagtaaattgattttgttacattgttttgcttaaagtcacagttcccaagaaccaatcaa

SEQ ID NO: 44118 - DNA, 201 bp, Homo sapiens
gtaggagagcaagcttctctgtgaataaaatacattactgaaatcttgatattttcagacagattcctgatgtaaagttttatgtctttctgtcatttttsgtgcagtattattatatagatttttttcaaatgcattgttttcatgaattcatttataacttttaatagctcatttcaatattttgttacttatggaggt

SEQ ID NO: 44119 - DNA, 201 bp, Homo sapiens
agaaatgagtgaaagttttatttcctccacatccttgccaacaagtgttattgattatgggcatttttatcatagccatcttagtgggcgtgaagtgatawctcactgtggttttatttgcatttctctgatggctactatgttgaatatctttcatgcatatgtgatctatttgtatagagatggccctccatatgcgct

SEQ ID NO: 44120 - DNA, 201 bp, Homo sapiens
tttaagaacccactgcttgcaatatcttagaaccaaaaagaggagtaagatggtttctgtcttcaaggatttcacaatttaaccttgtgcaaatagaattmatatgttggtttgctctaattatggaaggttagtatacaagatcccttcttactcctccctcctcccttctagaactactaggaaccataaataatatat

SEQ ID NO: 44121 - DNA, 201 bp, Homo sapiens
aatattgcaagctggctactgttctagaaaaaaacaggttcttgtcatatggcccagaaaatttaggcatgcggacacattgcagggtgagtaggacaggyttattaggtgaaaagaaaaaaggaaagaggaactttcagcaaagtgagagactcctgttggcaggtctcctgcctcacagattgaatcccaggccaccac

SEQ ID NO: 44122 - DNA, 201 bp, Homo sapiens
tggccttggtattgtgctttgttctgccagtcatggttcatcatcaccatcgtttttcatttatgatttcctttggtgttgctgcattggaggaaactgcrgggaacagctacaatctcccatggtattggcattgccggttacctcctgactctgcattctctactcccaacagttgaatcccctgatggcctccattat

SEQ ID NO: 44123 - DNA, 201 bp, Homo sapiens
ttatgttagttttttaaaaatccagttaatttgttatgatgcttggtagtaaaaacaaaacaaaacaaaaaccttttatgctgttctgcaatagctagatmtgtgcaaatttatccccaaagtctaaggaggctaagaggccaaaggaagaggctgacatatccagttcctcagaaagaaacatttactatggatttccaa

SEQ ID NO: 44124 - DNA, 201 bp, Homo sapiens
gtagaatggatttgtgttatatttatataatgaaaaaaggaacaacaaaataaatgatttataggtacatatagcaatctggatgaatctcacaagtgtartattgactaaaataagcaagaaataaagctgctgtttttgtaaatttcagaaagaaataaaattatactgtttagaaagggacatttatgcagtaacatt

SEQ ID NO: 44125 - DNA, 201 bp, Homo sapiens
cttctgcatattatttgactaagatacaattagagaattttggagttgtaatagattttagaaattattgtagttttttaaattaattaattaatttattwatttatttatttatttttgagatggagttttgctcttgttgcccaggctggagtgcaatggcattatctcagctcactgcaacctctgcctccctggttc

SEQ ID NO: 44126 - DNA, 201 bp, Homo sapiens
gattttctatattttctgtctctttatttctaagtctttgttttgtgagacttacttccataattttctttgaacatattcaaaattgcttaaagtctttrtttagtaagtccaatgtatgagcttccttagggacagtttctattcactgctttttttctccctgtgaatggccctttatttgtttttctcataattcct

SEQ ID NO: 44127 - DNA, 201 bp, Homo sapiens
cagatccaggtcttatataccacagtactgttgatcttgatttgtagacctgtaaactaaagatataagttgtctcttcccgcataaccaacatacaaagrtcggattgaagttgacagatttccaagggaaaagcaagaatgctatgtaaatttgcctaaggacaggatttatggtcaaggatgtttggcctaagggcag

SEQ ID NO: 44128 - DNA, 201 bp, Homo sapiens
ccagaagataaatatattatatttaaatatataatatataatgtacatacataattttatgtagataaaacatacgtatatgtttgtagatatagatatayaaaatatacaaagacagaagctaaccacttgggaatgggcaagtgacttaaatatactaataacaaatgacaaaacccaaatatctaatgaacatataga

SEQ ID NO: 44129 - DNA, 201 bp, Homo sapiens
tttccttctgcatattatttgactaagatacaattagagaattttggagttgtaatagattttagaaattattgtagttttttaaattaattaattaattwatttatttatttatttatttttgagatggagttttgctcttgttgcccaggctggagtgcaatggcattatctcagctcactgcaacctctgcctccctg

SEQ ID NO: 44130 - DNA, 201 bp, Homo sapiens
gtatcttttaggtttctggggcactctgttcattttcctttattctttttacttctgttgtcaggttaaataacctcaattgatctgtcttcatgtttgckgattcttttttctctccatttaaatctggtttggggcacctctagttaattttcaagcttagtgatagtatttctcaactccaaaatttctagttggtga

SEQ ID NO: 44131 - DNA, 201 bp, Homo sapiens
aatctctaagcttcaaaggtcttagtgtaatctagtccagtttggtgatagagaaaataatataatttaagggtctaagaattttaaaggagagaaatccktttttttttgctgctgttcttattgtctcttttatctgttatatatactctatatctattatatttaagtgattatttctctggtggtgctggttttcag

SEQ ID NO: 44132 - DNA, 201 bp, Homo sapiens
ctcaaaaatatgtatataagttcttagatttagaacctctgggtccttctttgttagtgtcaaaatgctcttttgaatgtaaagtcctgtccacctgcctyttgtcacatcacactagaaagtataatattctgacttgatccagaaatctcactttttgcattcaatataacatgaataattctggattaatgatcatct

SEQ ID NO: 44133 - DNA, 201 bp, Homo sapiens
cgtaattccaaatttgataatttataagacaatatcaaaaggaattactaatgtaacaatacaagaaacaagagagtgactggagcagaagttgaggaaayagtggtcttaaatttttttgaattgatggaagtcttaagtttatagcatcaagaagctcagcaaaccccaaacagtataaccaaagaaaaccatagacac

SEQ ID NO: 44134 - DNA, 201 bp, Homo sapiens
gtttttcagaaaacctttcagatatattcacaaaaatttacacaaaacctcaattctttattctattttatattatctgtaatattattttccattattgkttttaattaaagaaaaaatttggtttttcttatccaacttgtcaaaaaaaccaaaacaaaaatgacgcaagacaaaacaagaccaaaaaaacatgcacga

SEQ ID NO: 44135 - DNA, 201 bp, Homo sapiens
tttgaagcatttagaattcttctgatatgaatattcttgctaagaacatccaattgctttgtgtgtgtatgtgtgtgtagctaagaaacaattatagatckatatttttacacacaaatggcagttctttaaaatattaatttatagttcactactgtggcaatggctaacatgtgttcacccagcaggatgttgcttttt

SEQ ID NO: 44136 - DNA, 201 bp, Homo sapiens
agctccaaaacagtacatcaaacctactgagagctaaactgaaatttaatccctatcattctcagaaggtaaaacagaacttacaaacggaacttgagttraatgcctactaaaataaaaatatcaacattcttcagagtattacaagatccacatgttacaaagtattttatcaaacacacacaagacgtaattccaaat

SEQ ID NO: 44137 - DNA, 201 bp, Homo sapiens
ttttgaagagggattgcatatgtagaaggaacaaggaaaggacttatccttgttaatctgaaacccaggtgactggcagattgtctgacacacacattaggcccttaataaatgttgggagtataaatgatttcatgaactcttgggcaagaagtcagttttgttaaactttgtgatgatgtaaggagagtctaaacagct

SEQ ID NO: 44138 - DNA, 201 bp, Homo sapiens
ccccattcttttaataactacatagaatttttatgtaaacattatattattttcttttaataatttcctcgtttgaagcatttagaattcttctgatatgmatattcttgctaagaacatccaattgctttgtgtgtgtatgtgtgtgtagctaagaaacaattatagatcgatatttttacacacaaatggcagttcttt

SEQ ID NO: 44139 - DNA, 201 bp, Homo sapiens
gttggtaagcataggtctttctgtatcaccttaagcctggaggcttacatgaagctggtgtttgtcttaggaagaacagcgcaccataaaacagctggccyttactagtcttgcttttatttccataatccctggacctcaaatgaaactaaaattctttgtgacatgtttttgagaatttctacttaaggacattcttct

SEQ ID NO: 44140 - DNA, 201 bp, Homo sapiens
tataatttgagatgtattgtcatatttctcttcaagaagttcatatcagtttataccccttcaacagtgtatactaagagcttatgttcctaacacttaamcagcactgatgataccatatcaaaaattttcaattttggctgcttggtgaaaataatatcttgttttatttgatttgcatttaattaattataagtatag

SEQ ID NO: 44141 - DNA, 201 bp, Homo sapiens
agccttggacaaaacaaacaaacaaaaaaacaaggtgaccccagaccagctgtctttagcataaggcccatatctggaccatgaaaaatgctcaaatgttrgaattcattcacatctttttctgcttattcatcagcaagtagccgacctcctttcactagttagatttcttgggagagagttcacaagtgtccactgaat

SEQ ID NO: 44142 - DNA, 201 bp, Homo sapiens
tcatgtggccccacccaaactgactccttgtcccaccaaactatccttgaaaaaccctagcctctgaattttcaaggagattaatttggtaataactccayctctcacatggcatagctgaccttgtgtctattaaaatctttattgcaatgctgtggtcttagtgaattggctttgtgcagtgggcaggaagaacccatt

SEQ ID NO: 44143 - DNA, 201 bp, Homo sapiens
gtggccccacccaaactgactccttgtcccaccaaactatccttgaaaaaccctagcctctgaattttcaaggagattaatttggtaataactccatctcycacatggcatagctgaccttgtgtctattaaaatctttattgcaatgctgtggtcttagtgaattggctttgtgcagtgggcaggaagaacccattgggt

SEQ ID NO: 44144 - DNA, 201 bp, Homo sapiens
gcagcatataccttccatcttttcttaagaggctgtagattatctcgacttctattacctgaagatatgtctaatggaaaccttaaaaataccgtgtcagkttctaatagctggaaatagctggaagttataatagatcaacaggaagaagcagttttgttttaaattaaataattaaaattcagaatttactttgatatg

SEQ ID NO: 44145 - DNA, 201 bp, Homo sapiens
tctcccatatataactcaaattaacagtaggaattatcactgtggacattatactttgcatttatacataattttaagtaaataatttttttttttgagayggagtcttgctctgttgcccaggctggagtgcagtggcaggatctcggctcactgcaagctctgccttctgggttcacgccattctcctgccttagcctc

SEQ ID NO: 44146 - DNA, 201 bp, Homo sapiens
aagggcatagcacgttgcttgggttggctcaaacactgaaaaaatagtaactcaatatcccagcatctatttcttcccctgctgatgttcccttcagattkgatcatgcacgtgttgcttcctacaccgcctcctggtggcatccagtgtccacagttgagccacatcttttgaatattttcacctctcattggaaaccat

SEQ ID NO: 44147 - DNA, 201 bp, Homo sapiens
tgaacccaggaggcagaggttgcagtgagccgagattgagccactgcactccaggctgggcaacaagagtgaaactccacctcaaaaaaacaaaaaaaaaacaaaaaaacaaaacaaaacagtgaaagtcacgtagcatgttatgattcaatgttatttatacctgcaatgcttgcatttcaaggacggcattattggtag

SEQ ID NO: 44148 - DNA, 201 bp, Homo sapiens
gcaggtagctcattcaagctttttttgtacttgcagagaaatcttagttcagggttagggaactgcttcccagtcttccttttttgttatactcacagcakagctctctctaaaataattgcttcaaggatgctgcccatatctgctgtccccatatctggagccctttagagcttttgtgtgacaaaggttgaagtgtaa

SEQ ID NO: 44149 - DNA, 201 bp, Homo sapiens
gctggcactacaggcatgagccgccgctaacggctgattttttatttatttatttaatttaatttaatttaatttaatttaatttaatttaatttaatttwtttttgtagagatgggagtctttctatgttacctagtctggtatcaaactcctggcgtcaatcaatcctcctgccttcgcctcccaaaatactgacttta

SEQ ID NO: 44150 - DNA, 201 bp, Homo sapiens
tcagtagcttcatcttctctgagtcctcttaaacagttttctagaggataacactctgaaatactcaagtgtatgaatctatgggtgatattatcactggraaatttatttcatgagtgttgtcccacgaaattaggccattcccgttcactcatttattctgtagacacatatacatgatctctacaagatagctgctta

SEQ ID NO: 44151 - DNA, 201 bp, Homo sapiens
ttcagcaaccaatatatatttgtaagttttggggggttttgtttgagttaggtagaaagcaatcttgagtataatcagtgtaaggacagcatgggaaagcrttttatttatcacccagaattgaatagtcaaacaacaataaaaacaaccaaaatttaaaatgacttctgagcatgtcttaagttggagcattttcacggt

SEQ ID NO: 44152 - DNA, 201 bp, Homo sapiens
cttttgtagaattttaccagagcatagcaattggaacacaaaataaacattaacagacttttctttgtgcttgcgtttggttataaggaaaagtttttttytttgctgcttttatccttttaaaaagtgcttttaaaataagaggaattatgtttattttaaaagagcaacatgtcaagatgcgaatagatgtgcctatcc

SEQ ID NO: 44153 - DNA, 201 bp, Homo sapiens
ttcaagttggtaagcataggtctttctgtatcaccttaagcctggaggcttacatgaagctggtgtttgtcttaggaagaacagcgcaccataaaacagckggcctttactagtcttgcttttatttccataatccctggacctcaaatgaaactaaaattctttgtgacatgtttttgagaatttctacttaaggacatt

SEQ ID NO: 44154 - DNA, 201 bp, Homo sapiens
aggacatgagaaaaatatctagatttcttgctaatttgacaccaaacacaaatatcaatgaaataacacaaagaaaaatctgccactctaaggagtcattratatcaaactagttagagaataatcaattctaaggatgcttaagattagacatagcagaagacagcttcaaatgttctgatatttttcagctcatttatg

SEQ ID NO: 44155 - DNA, 201 bp, Homo sapiens
aaactcttgacctcaggagattcacccacctcagcctcccaaagtgccgggattacagacgtgagccaccgtacccagcccattccccatttttataaaayttatttgccagcctttcatatattcttccagatgcacattaaaatttacctaagttcagtatagctctataaatttaatagacaaattttatgagagata

SEQ ID NO: 44156 - DNA, 201 bp, Homo sapiens
agaatgagaggaaaagtatgagggattttgtattctacaagatgggataactagtgggaagggaaagaaactatgtgacaagaataacgaatgggcgggggagaaaagagaaaagaatgatagttcagagcccagaaatcaacaaaggtaggtcaactgtgattcctggagataccagaaagtaccagctgtgatcacagc

SEQ ID NO: 44157 - DNA, 201 bp, Homo sapiens
gcattttatttaatatttctgctgtgtacctaagtgatactcatctatgtttttattttcttgttttcttcttgtctggttttgctacaaggactacaccrattcaccaaattaatcaggtagattcctcttataattaatcttccatgaaagaatttgcaaaactaagggttgtccttccgatagtttcagatgacagat

SEQ ID NO: 44158 - DNA, 201 bp, Homo sapiens
ttggttccaagtctttgctattgtgaatagtgcagcaataaacatacgtgtgcatgtgtctttattgtagcatgatttataatcctttgtatatatacccrgtaatgggattgctgggtcaaatggtaattctagttctagatccttgaggaatcgccacaatatcttccacaatggttgaaccaatttacacacccacca

SEQ ID NO: 44159 - DNA, 201 bp, Homo sapiens
acccagcccattccccatttttataaaatttatttgccagcctttcatatattcttccagatgcacattaaaatttacctaagttcagtatagctctatamatttaatagacaaattttatgagagataacattatattttgcaatactgagtttttccatccaggaatctgatatttctcactattcattccattctctt

SEQ ID NO: 44160 - DNA, 201 bp, Homo sapiens
agatcttgaaataataaaatgtttttttcaaaactatcttaaatactcactgtaactcataatatttaactggagaagcaattataattgatttctttttctatggttcaactaatgtaccatagcctttgaggcttttccctcatgaatttgtggctcccaaaacagtgatttcaggtacacttactgcattatagcaaa

SEQ ID NO: 44161 - DNA, 201 bp, Homo sapiens
atttatttagccaaaacttggtgattgacacaagaggaggctaccgtctgtttacaattccatttaggttttagttcacggtgtactgagaaacctttagsctgaacttgatttaacagtgttgaggggagattgtatggaactgtgaaataaaagcaatgtaggatgtttgaaataaaagagagtacataaatgttaaac

SEQ ID NO: 44162 - DNA, 201 bp, Homo sapiens
accaagttttcttttctggatttttaaaatgctggatttctattgagcaacaaattatgtcttcaggtctccgtgaagggactttttgcattaataatacwgtagtttggcccagcgcagtggctcacgcctgtaatcccagcactttgggaggtcgaggcgggtggatcacctgaggtcaggagttcgagaccagcctgg

SEQ ID NO: 44163 - DNA, 201 bp, Homo sapiens
cattatattttgcaatactgagtttttccatccaggaatctgatatttctcactattcattccattctctttttatatcattaagtaaaatttaatacatvtatagatatgcacacatatctataattgtgcttatttcaatagatatatactgctatgaaatttataatatttagttgctataataacaaattttgtcat

SEQ ID NO: 44164 - DNA, 201 bp, Homo sapiens
atggccactgtaactaggatgcagatcttgaaataataaaatgtttttttcaaaactatcttaaatactcactgtaactcataatatttaactggagaagmaattataattgatttctttttctatggttcaactaatgtaccatagcctttgaggcttttccctcatgaatttgtggctcccaaaacagtgatttcaggt

SEQ ID NO: 44165 - DNA, 201 bp, Homo sapiens
ttttataatgaaattcatttagtctttatattgttctctaaatggggattgacttggattctttactgattcatctaacgtcattaatgatttcccctttstgttctgaagcatcttattgaccttttcaagtgtggccataatgcttgtttctcattaatggttggatcttctatcagaaaacagtgatggacatagatc

SEQ ID NO: 44166 - DNA, 201 bp, Homo sapiens
ccttccagtgggctgaactctgagcactacatctagttgttaatttcctatagaagtaaagatgtcctaaggtatcaatatgcagtaattcatggatggtscctagcaaactgattggctggtcagggagttggaaagaaaatatttgtgaagttggtgacaaagaggatctggaggacacctcttggaactgtcatggag

SEQ ID NO: 44167 - DNA, 201 bp, Homo sapiens
acattccatagtcttaaaagtgctataatagaagtatgaatggatgtaagtacaagggaggaagtggtcacctttgggtcactaagagcacagggatactmgtcatttataggtgccaggagatagtattaattcctatgaggagatacacgtctggagctgaaggctggggcagaatcttggaggacatttgtagcatgc

SEQ ID NO: 44168 - DNA, 201 bp, Homo sapiens
attcactgacatccagaccaactaccctacaatcccccataaccttataatttaatcaacttcagagactttcagttgtaggtgaaacatagttttcaggyacagttgtaatactgtatgtggaaaatggtcatgggaggaaagaaaaatacgtcctttttgtgtatctaaataatttgacatggcaacattaaattccca

SEQ ID NO: 44169 - DNA, 201 bp, Homo sapiens
cacagtgttgcatagtgacttctaaataaatacttcaagttttatctttttactggagaatatgaaagagtggagagttagaaggatttaaagttatattwttgagtcatactctaaaatatgtgatgtgtttccactaactggacatatttgaggggaccacaaatatgaatccctttgggttagtcatcttcatggaag

SEQ ID NO: 44170 - DNA, 201 bp, Homo sapiens
gacattagtaattccagcaggaataagctgtagttcctgtactcagactagtaagaggagacagacatttaaactgataaattccattctacattccatartcttaaaagtgctataatagaagtatgaatggatgtaagtacaagggaggaagtggtcacctttgggtcactaagagcacagggatactcgtcatttata

SEQ ID NO: 44171 - DNA, 201 bp, Homo sapiens
acactgatttttaagacaaattttatctcaaaatttattactttcttttttattgatattgatagattcttagcttaattctgtggattggtaataaagcrcagtcttcatttctgccattaattatataataatatgtgccattagttatgtatgtgtttcttcatttgtcaaatgcatattgggcttccaccaggtgcc

SEQ ID NO: 44172 - DNA, 201 bp, Homo sapiens
ttaaaagagtatgctcatacaatacttctgggaatgtaaattgttacaatctcagtgaagaacaaaataacaatatgtggcacctgggttatgttgccagraatccccctctaggtttattgaagaaacttgtgcacatattcataaggaaaacccggtacaagtatgatcattatagagttttttttttccatcaatggg

SEQ ID NO: 44173 - DNA, 201 bp, Homo sapiens
caacaactattttccatttaaaaagcagtttttctggcttgcttctggaccctacatgaccgcaggatgcaaagtatgtgacctgacctgtccataatgarcaaggtgttatcgaatccagtgaaccttaaaataggatgtgcctaagagcattccagtagtaatcagatgtggcatattaagagcagcctgagagaccca

SEQ ID NO: 44174 - DNA, 201 bp, Homo sapiens
aaaaactggaagcattccctttgaaaactggcacaagacagggatgccctctctcaccacttctattcaatatagtgttggaaattctggccagggcaatyaggcaggagaaggaaataaagggtattcaattaggaaaagaggaagtcaaattgtccctgtttgcagatgacatgattgtatatgtagaaaccccattgt

SEQ ID NO: 44175 - DNA, 201 bp, Homo sapiens
agaaaaatactaatctaaatgctggggtcatgagaagataggctgatttggatttcttaaatcattatttgtaggtgaaatgttttctacaaagtgcaacytaaagcaatttgccttatagcaaaatattgcctaagctttagctattaaattatattttatatgctgggtaatgtttaatacaaccagatttcagtaaaa

SEQ ID NO: 44176 - DNA, 201 bp, Homo sapiens
ctacatcaggattggtactgagcttaaaaagtcaacagatggcttcatatagggtcctgaacttccataggaaaaggcaagtgctgtggtttggacattcracccctccaaatattacgttgaaactggatccccagtgttgaatgcagtgcctaatgggaggtgtttaggccttgggtgtggatccttcatgaacagctt

SEQ ID NO: 44177 - DNA, 201 bp, Homo sapiens
actgcccgtataatttgatcagttattagatactgctttctgctagttgacaagttgatttcctttacttttctataagacactgaagagagaaccgaaaatgtagcaatagaatccatttgcatttttttgcatttattaattatttaatcaacataataaaagatatttttttccatactttcctgatgaggaaaatga

SEQ ID NO: 44178 - DNA, 201 bp, Homo sapiens
tcactaatgttttcagcaagttcttggaaactgtgactttagtggccctcaaataatgttgttttattcaacattgttttcttacaatgttgatgattttwaaaaaatgggtgtcatcatacattgtttcaattaaagtcacagtttccaagaactatggaagaatttaaataaggacttactgtactatagaaattaaac

SEQ ID NO: 44179 - DNA, 201 bp, Homo sapiens
ttttagatgacagcatagatctgtatagtaggataaggaacaaaggaattttgcattttggctttgatagctgatgacagagtaagtgtgagaaaaatagtccagttcttatttagttcctttaatgtgattttataatatatagcatcttcacttcacacgcatataccacagaataaattaggatggaatgtagggtgc

SEQ ID NO: 44180 - DNA, 201 bp, Homo sapiens
aatccacattattatcaaaatagtggtgtgtataatgaaaaattacaaaatatagtacagcaagttctcactaatgttttcagcaagttcttggaaactgygactttagtggccctcaaataatgttgttttattcaacattgttttcttacaatgttgatgattttaaaaaaatgggtgtcatcatacattgtttcaatt

SEQ ID NO: 44181 - DNA, 201 bp, Homo sapiens
gatcaaaataaaataatttagagcacacctagtaaaaggactaaatttctcacttctcacttctaagtaatatttatgtaacaaaagtacttctcttatarttgagtatatccactaaatttttggtcaaattagagggtaatgatattgctgatttttctggagtgtaacaaggtttaaattgacataatgtggttagtt

SEQ ID NO: 44182 - DNA, 201 bp, Homo sapiens
ttctaccagtcaagataggctagtctatgctgcactgtcaaaaacaatttaaaaaaactagttaaagtcatagcttaaaacaaaaatgtatttctttttcmtgtcatatatgtacacaaccatttgtactgggagacacacctagttttaaggaccatagtcactcaggaacctaggctgacagaggcaccacagttttct

SEQ ID NO: 44183 - DNA, 201 bp, Homo sapiens
tagttttaaggaccatagtcactcaggaacctaggctgacagaggcaccacagttttctagctacatcatctggaatgatgcctagactcctcactggccrtggtagaagaagagagagagagagagacaggaacccatggtaaagaaagagaaactgccaacagcacatgagatttttgctaccttaacccagaagtgac

SEQ ID NO: 44184 - DNA, 201 bp, Homo sapiens
ttggactccctacctcacaactacttaaaagaagtattggtgaacagtttgggttactgagttggtaccattaagagagataagatctctccccaaagacrcctagaaaattgagaagtgttgtacttcgattgtatagaaacaagagtaagtggtgccagatctcattcttagtgcctctcccactttgtgacattgttt

SEQ ID NO: 44185 - DNA, 201 bp, Homo sapiens
tataaaaatgttcttcaagtctgccagaaaataagaattactagagatactcttaaaaaaattccaacttcttctatctcacctcagatcaatggaatcakatttttccagtaatgtcctgcaaatttgtatttgtatttgtatagtgttctaagattagcgtatttggaaaacactgcatcctagtgtgtaggtagcctt

SEQ ID NO: 44186 - DNA, 201 bp, Homo sapiens
aatcccaacactttgggaggctgaggtggacagatcatgaggtcaaaagatcaagaccatctcaggtcatgaggtcaaaagatcgagaccatctcctgatygaggcaggagaatcgcttgaacctggaaggcggaggttgcagtgagccgagattgcaccactgcactccagcctcggtgacagggtgagactccgtcacc

SEQ ID NO: 44187 - DNA, 201 bp, Homo sapiens
tgccgtatgaattaagactgtagcccaaggttgaaaatgggagctgaagatctttgtaaaagtgagatgctgtcctcctttgttatccatatcctccaatstattttgcactagtgtcattttaaggtctcttactatgtactcatttcttttttctttttctttttttttttttttttttttttttttgagacggagtct

SEQ ID NO: 44188 - DNA, 201 bp, Homo sapiens
atcgaggcaggagaatcgcttgaacctggaaggcggaggttgcagtgagccgagattgcaccactgcactccagcctcggtgacagggtgagactccgtcmccaaaaaaaaaaaagaaaaaagaaaaaagaaaaaagatgtgtaaggaaattagatagcatttcttggcttattagctgttaaaatgtccaagggaaaata

SEQ ID NO: 44189 - DNA, 201 bp, Homo sapiens
acacatatctataattgtgcttatttcaatagatatatactgctatgaaatttataatatttagttgctataataacaaattttgtcatgaaaacttttawaatatatagaaaaatatattattcatctcacattcattctgcatgaagaagtgttaccgaatactcaatagtaataacagttttcagataatcttgtttt

SEQ ID NO: 44190 - DNA, 201 bp, Homo sapiens
tgctgagctctgatattcatcactatgtttgtaccctggccatgctctctgagggctgttcacagacaatgactgagcacagcaggagttctaaggtacayttgttcctgagactcatggacccctctcattgacccctgtgacttgaggactcccaaatggctttattaaccttctttagaatgtgaattctaggaggct

SEQ ID NO: 44191 - DNA, 201 bp, Homo sapiens
atttagttgctataataacaaattttgtcatgaaaacttttaaaatatatagaaaaatatattattcatctcacattcattctgcatgaagaagtgttacygaatactcaatagtaataacagttttcagataatcttgttttccctaggtagacaattttgagacctgggaataaatatagttatttgttaacaatattt

SEQ ID NO: 44192 - DNA, 201 bp, Homo sapiens
tttagacttgccacaaacatcagccaggagatgctgctgtaagatgacatagtatttcacttgatgatggtgagtgagtagtataatttttttacttggtwaatttatgtaagcaagcactcaagaaaaagtttgtgcatatttttttcaaactgagtcacaataaaggaagtgagagattttgtggctcttgtgacagcc

SEQ ID NO: 44193 - DNA, 201 bp, Homo sapiens
ataaacaacattgtcttgctttattattattttttattacacagttgaattaaattggctaatatttcatctacaaattcatgtttaaattaataggaacrttgcctgatagctcttctcctttgtctaatttctgtctaattttgttatcagttacataagcagtaaaacaaaattattgaaatggaaagaggtctagaa

SEQ ID NO: 44194 - DNA, 201 bp, Homo sapiens
tattcttactttactcatgtaaagtgtccttcaacaggacatgagatttggttttctcagaagccacctaaggggccaggtgatgtaacctgaaagtgagrgagttagttcctgagttaatcctaatgtgaatcagtaagggagggaagaagacatctagagttagcaaataaattccattcctttacttcctctgatata

SEQ ID NO: 44195 - DNA, 201 bp, Homo sapiens
gcttgaaccccggaggcagaggctgcagtgagccgagattgtgccactgcactccagcctgggtgacagagcgagactctgtctcaaaaaaaaaaaaaaaagtaatttaaatgtatatattttttcacaagccttgcagacttaacactttaaaaaatcagctcggtgtggtgtgattgtagtgaggtgaggtggtacgtg

SEQ ID NO: 44196 - DNA, 201 bp, Homo sapiens
caaagttcaagagaatatgaatttcctaagtaataatttgtctccatgtaacactcttactacagtcatctctatgaagttcacctacctctatcttcttrtagtatttggagacagagttttagtttttgatcctttcacgtgtccctttaaatagattgtgcttgttgggattcactttcattgattttgacttctatc

SEQ ID NO: 44197 - DNA, 201 bp, Homo sapiens
tggtaagccaattattattttattatcttctgtctgtcatatttagcaaaaacatgtgtggtgactggattaattaaaatactttattaaagcatgatatwtatttatactatcactatttcactaaataaatttataatttgctagtatcaattttttttggtttgaatagctgaattttttatggatttataataaata

SEQ ID NO: 44198 - DNA, 201 bp, Homo sapiens
ttaaaattattcaatgactctctgttgccttcattagagtcacatgactggtgatttcacatgccttgtatacttcagtgatttgcccaactttgagaaaygctaaagtttattttattattattattattatttttttttttgagacggattctcgctctgtcgcccaggctggagtgcagtggcgcgatctcagctcgc

SEQ ID NO: 44199 - DNA, 201 bp, Homo sapiens
aataggtgcataatcaatatttgttagttgatgaaattgtttccctgcaatttgctatgtgcttttacagcacagttatattagttaaatattctacagarcccataattcataatcatttcttattactaccaagggaagcagagcagcgctgcttcactaggagaaagagaagggctgacttgttagccagaggtcatt

SEQ ID NO: 44200 - DNA, 201 bp, Homo sapiens
tgagagggctttgcacattgttttttgattctgacaggattcagttaacagtaataacaactttttcttcctctcccctccctcatatgttctgcacataytcaaagattggctctgttctcagagttggctttttctaatttcctctttaaaatttctttaactttccatgtttttcatttttaaaggaggccgtgagac

SEQ ID NO: 44201 - DNA, 201 bp, Homo sapiens
cccataattcataatcatttcttattactaccaagggaagcagagcagcgctgcttcactaggagaaagagaagggctgacttgttagccagaggtcattyggtgccaacatggggagatcacagctctttctgcaattatcagaagcagagcatatattacattctgaaatagacaatgaagctcttggatttgtcgatg

SEQ ID NO: 44202 - DNA, 201 bp, Homo sapiens
aaaagcaaaaattgacaaatgggacctaattaaattaaagagcttctgcacagaaaaggaagctatcaaaagagtcaacagacaacctaaagaatgggagrcaattttagcaaactatgcatctgtcaaaggtctaacatccaacatttataaggagcttaaacaaatttacaagaaaaaaacaaccccattaaaaagtgg

SEQ ID NO: 44203 - DNA, 201 bp, Homo sapiens
tgccacacttgccaacatttggcatccagcttgggccctttaagagttactttacttgattaaaaataaataaattaaaagctaaattgggacctattcartagttccatatttgatatcttaagtgaaggtaaaacttgaaagaagctgccccccaagccttgttaaggatgatggccagactagaagaaaaacaagtac

SEQ ID NO: 44204 - DNA, 201 bp, Homo sapiens
tagaattcttttcgtttctctttcccttgtttgagtagctacaaaattactaagtcctgtacaatctccctctctctctgtctacttaattcttaccccgsagatgagaaaccaagatcattagtcgttcttcaccttttcctgagcctcatctattgcctaggaatcttgaaactataagtgggttggaaaattgagccc

SEQ ID NO: 44205 - DNA, 201 bp, Homo sapiens
ccatgatcatgaaagaatgtctcagaatctgagtgtctaggctaagtcaggaatagagatatacatgggtgctacaggagtttttttttttttttcaagtyatacagttcacattgaaatacaaatgtgggcagtgccaatctttgaacagcactgcacagcagaggctgctagtaatgacggaagtacacctatgggact

SEQ ID NO: 44206 - DNA, 201 bp, Homo sapiens
actattccaaacaaaagtgagaaggagggtcttctttctacctcatctatgaggccagcatcatcctgataccaaaatctggcaagacaaaaaaaaaaaarggagaaaatttcagactaatatccttgaagaacattgatgcaaaaatcctcaacaaaatactggtaaactgaatccagcagcacatcaaaaatattatcc

SEQ ID NO: 44207 - DNA, 201 bp, Homo sapiens
tcccttaaaacccatttttcttctatttgtcatctcatgttcatcaagaagatgatacattctcaagcatactgattcaggcattcatgcattcattcacyccccaaagaactatttatagactgtctactgtgtgtcaggtactggcactgtaggctgaatgatgagcaaatacaggggtggtccctgcttttataaatc

SEQ ID NO: 44208 - DNA, 201 bp, Homo sapiens
tctcagagtagcagagcattctcaggtctaaaagactactcttccaacagacacacactttcgtttccatcagttgaattatatgtcaactaagattcaayactgttcccctggatgaagaattcttgtttgacaggtttgtttttatttctctgccccaggactttgaccttgtcatctcattgtattcctgcctctatg

SEQ ID NO: 44209 - DNA, 201 bp, Homo sapiens
ctcttctaaactccgctttcagtgatgtcacattaatagctggaagtaggccattgtgcagtaattacattgcaagaattggcaaatgctacacatcagarcatggtttatgatactgattgtcagaaagtgatggagaaaagtgttaataatgtagactaaacttatattttgctgtgtgtataacaattaccttgtaac

SEQ ID NO: 44210 - DNA, 201 bp, Homo sapiens
caacaaggacacattaccattgaccccacagaaatacaaataacaatcagagagtattatgaagacctctaagcacataaactagaaaatctggaagaaayagataaattcctagacacatacaacctcccaagactgaaccaggaagaactgaatctctgaattgatcaataatgagttctgaaattgagccgtaataaa

SEQ ID NO: 44211 - DNA, 201 bp, Homo sapiens
agtattcttaggatggttttggtgggatgcaatggggtacattgaagtggaggagactaaagctatccactccagtgtcccctgggccctttggtgactargatggaagaaatcctcatgttattaaaacagtggtacttatgtgagaatgtggagtgggtgaagtatatctgcggctgagggctgagggctggtggtggt

SEQ ID NO: 44212 - DNA, 201 bp, Homo sapiens
ctctcttctagctattttgaaatacacattagttcagactatagttaccttactgtgcagttaaacactagaacttattcctcctaactataactttgtayccattgaacatatatatttttatatgtgtgtatgtgtgtacatatccgtgtatatatatgtgtatgtgtatatatatatagagagagagtgtgtgtgatg

SEQ ID NO: 44213 - DNA, 201 bp, Homo sapiens
tgtgtatttaaaggtcccatgggggaaaacagtacaatcattagattatactatgacatattttaaacttataattgagttattaataaagcagccatccktttaattaagcacctaaatcaagattacatttttacattagaaatgtcatatggtttaaagttttaagataaatcagactctgaaaattgtaacatatat

SEQ ID NO: 44214 - DNA, 201 bp, Homo sapiens
agagaaccaggagcaaacaaatcccaaagctagcagaagataagaaataaccaaaatcagagctgaactgaaggagattgagacacgagaaagcatttaaagatcaatgaatccaggaaccatttctttgaaaaaattaataaaatagaccactagctagactaataaagaaggaaagagagaagattcaaataaacataa

SEQ ID NO: 44215 - DNA, 201 bp, Homo sapiens
atctcacatgcagagacacacataaattcaaaataaagggatagagaaaaatataccaagcaaatggaaaacagataaaagcaggggttgcaatcctagtrtctgacaaaacagatgttaagccagccaacaaagatcaaaaaatgcaaagaagggcattacataatagtaaaggggtcaagtcaacaagaagatcctaaa

SEQ ID NO: 44216 - DNA, 201 bp, Homo sapiens
aggttagatatagccagctcattagaagatggggatagtattggaggacttttaaaaaatatgcatttgcataaaaatatactatattgtatttatacatrgtatattttactataaatataccataaaatatatactcattttacttggattgagtattcttaggatggttttggtgggatgcaatggggtacattgaag

SEQ ID NO: 44217 - DNA, 201 bp, Homo sapiens
atcccaggtatcgtctgaggaaggtttggggagtgatctgtatgtttagattttctgcctaactttattaatgtggtatgaataaggagctttttttttttagaaaatgacactttatacaagtcagttcctctctattttctttatggacggtactggggtggcagcaggactcaccatgaaaactgtagtggtaactct

SEQ ID NO: 44218 - DNA, 201 bp, Homo sapiens
ccatcatgtttgagttctaagataacaccaagcatggatatttttctgggactgggttgaaatcatattgttgtagttgggttggatgtgttagataggtracatataattattagtaaagttaatattcaggtgatacatgactataggggattattagaactgagtgagagataatgctgctagagtaaacaagtcaga

SEQ ID NO: 44219 - DNA, 201 bp, Homo sapiens
ttcaataaataaatatttgttgttgtgggggctgatttgtgggactccccaacctctgcaaataatgtgatttgtgctgtcaccatggcaaataaagaatmatttgtgctacgtatgtaagtaatccaaacaaaactttgcataaatattttaagaaactgaaatatcagaatagatgagccattgaataaaaatcaacat

SEQ ID NO: 44220 - DNA, 201 bp, Homo sapiens
catttctgctttcaatctgagaggaagtcagtaaattccttttgctgttacaaaagtagtttaaattccatgcaggacacgagtctgggcaatcacatcascctcagcgtaccaaagagcctagagagacagcagaacaatgtctcccactcgagctacagagggaaggtggtcttaggttttgctgcagtaactggaagc

SEQ ID NO: 44221 - DNA, 201 bp, Homo sapiens
ctcaggccattttcataccattcatcatctgtgggatgttgccatatctggtgttcttggcacacttcaagtatgtgagctatagggagaaaagttggaartggacccagatcttattgcacagaaaaaaaaaaaaaaaaagaaagaaagtgagccttgaggcatgaaatctcccaagagctagccctcacacctgcaggt

SEQ ID NO: 44222 - DNA, 201 bp, Homo sapiens
ttgttctctctccatcacaaaatttcatgctatttatctgtgagaaaatgcctgaggactttcacacagtaattcatcttatctggaacccttaggatcasatgtagaccgagcaaatgtcaagttcacagagaacacctgtgtcttcagaacattaaagggcaccattagagcttgtttcccttcacttaacatgcacat

SEQ ID NO: 44223 - DNA, 201 bp, Homo sapiens
ctaatatgctttatgacagattggtgggttggctatctccaaaacttctaagacatagaaattcagattgaggtcataggtattcagattaatctgtaackgtcttggaagattattatataacatagcaatcaataattatcttttaaacaaagcagtgctgatttctgaagcagtggactaagcaagtagatctaaaca

SEQ ID NO: 44224 - DNA, 201 bp, Homo sapiens
taacactttgcctcagagagaaagccttatacaaatagaacttgatttcaaaatagctcaaaattcaagaggacttgaagatcatatatttgaaagcaatratctctaaaattaaaatcagtcggtttccttcaatttatttttgttaaaatagttcttttaagaatttcgagtttccaaaatcctcctggaaaaaaatag

SEQ ID NO: 44225 - DNA, 201 bp, Homo sapiens
agaattctgagattaaaaagtaattgctaaagttattgttactattgataaagactggaattagaatgccattattgcatggggataagcatgttttgtgkcccaataaaagaggctgctcaaaatgacctctgatctgtccttcttgattcaggattttatgatcttgtgacattgcagaactctaagaacagagtaatt

SEQ ID NO: 44226 - DNA, 201 bp, Homo sapiens
gtttgagttcaataaacttaagactattgtgaaacttatagaggggataaattgttagactctgtaagtgaacagagatgaatcctacatagcttaacttmcaattgagataagttacaatatccctgctgccatccattcataagagaagataataaaagctcagaagggacatattattaagaatggttatgaatataa

SEQ ID NO: 44227 - DNA, 201 bp, Homo sapiens
atgtttattacagcactattctcaatagccagggtatggaatgaacctaaatgtccattaacagatgaataaataaagaaaatgtaatatatatatatatwcacaacagaatattgttcagctatttaaaaaatgaaatattgtcgttggtaacatggatgagcctggaggacattatgttaagtaaaataagtcagacgt

SEQ ID NO: 44228 - DNA, 201 bp, Homo sapiens
aatatacattgaaaaaaatgacaccctcttcaacaaatggtgctctgaaaactggatattcatatgcagaagattgaaactagaagaccatctctcactayattaaaaaatcaactcaaaatggattagagaattaaatatcagactgaaactataaaactagtaaaaaaagataaaggaaatgttgcaggacactgatcc

SEQ ID NO: 44229 - DNA, 201 bp, Homo sapiens
aacctttcttatctctggccactttttctaagtctcattgaaggagtaacctcatgtttctgcctaataaatattaatatcttatatacctccaagaactytttctcctcacataatcatatctaattaccatcaataaactagtaacttcttaattaatatctctactgtagaccccctcttaactacacatctaactat

SEQ ID NO: 44230 - DNA, 201 bp, Homo sapiens
aatccactcggggcagttaagtttaataacctaaggactttcttttctcaggtgtttccccccataacctaaagcaataattcttacctttatattcatayggtacagaattaggatcatttttattaggaaggagtggaagaaaggacacagcttccaacgaacaaattaagttgtacacaggactttaaaaaatagaat

SEQ ID NO: 44231 - DNA, 201 bp, Homo sapiens
atttatttaaaatagaatatctttaccagattagaacaaagtaatgatgaaaagcagacttaacctatagtatggtagatcttttttaaagggtcattgaraaaattttccatctcaaaatatctgtttcattgccgtccctggctctaccactggtgactcatccttttgtttcaagcctgatcatcctcctgaccttga

SEQ ID NO: 44232 - DNA, 201 bp, Homo sapiens
ggtgggaggtgtttggatcatgggggcaggtccctcggtccctcataaatggcttggtgtactccccttagtgatgagggagttcttgctttgagttcatrtgagatctgattgtttaaaagtatatggcacctccccccacaccttgctcatgctgtcaccatgtgacaagccagcttccctttccttctgccatgactg

SEQ ID NO: 44233 - DNA, 201 bp, Homo sapiens
acaaagtaatgatgaaaagcagacttaacctatagtatggtagatcttttttaaagggtcattgaaaaaattttccatctcaaaatatctgtttcattgcygtccctggctctaccactggtgactcatccttttgtttcaagcctgatcatcctcctgaccttgatagagagtgagggacagaactagcctaggtgtcag

SEQ ID NO: 44234 - DNA, 201 bp, Homo sapiens
ggcagttttttgcattcaaaccatgtctatggagataccaaagagcttcaggaaagaccagataaatttcacaagattttttattttttacttcattttttcttcataaatttgagaagattttaacattatttttcttacctttgacttttattttggaatattctggtaatattatttaaacataattttaaatgaaat

SEQ ID NO: 44235 - DNA, 201 bp, Homo sapiens
ctatagtatggtagatcttttttaaagggtcattgaaaaaattttccatctcaaaatatctgtttcattgccgtccctggctctaccactggtgactcatycttttgtttcaagcctgatcatcctcctgaccttgatagagagtgagggacagaactagcctaggtgtcaggattctacaaggccaggctccacaacagg

SEQ ID NO: 44236 - DNA, 201 bp, Homo sapiens
ggagaataaaaacccaggtaattcaccatcatgctgttccttgggtcccaagatgcctgaccagtctaacttctgtctacctttcagagtttcagcatacrtaatctattctggtggatgtgtaatggtatagcatgactttaatttgataactaattaacttgaagtcttcttaaaatatactattttggccatttggat

SEQ ID NO: 44237 - DNA, 201 bp, Homo sapiens
acccgggaggcggagcttgccgtgagccgagaccgcgcctttgcactccagcctgggcgacagagtgagactctgtctaaaaaaaaaaaaaaaaaaaaaaagaagaaaaataaataaattaaaagaataaaaaatatatactgggaaactacgaatcaaaagaaaactggaatagctatgttagaatagatggagtttgag

SEQ ID NO: 44238 - DNA, 201 bp, Homo sapiens
gtaaataaaatgaacttgaactaggaaccagaaggaagggaacaaacattaacatgattgttcagctgaggaattgtctggctaggcattctcatctacartgttttttagagcccaaatagggcaataaggtcagccatgtttaaagggcctagaatataccatacattttagagggcagaaggaatggtgggaaggaaa

SEQ ID NO: 44239 - DNA, 201 bp, Homo sapiens
gtttatttaatttggtggcacaagtataacacagatactgattttccagttgagtaggacagcagaaattccataatttgtatctctcgccaagtgtcttmgtcacttggcttatggaatcactgaaataatgagttctcatatcaatacctaggaagttactgttaagatacaagagttaagttgcctttaagatgcaag

SEQ ID NO: 44240 - DNA, 201 bp, Homo sapiens
aaaagaacaacactgagattttggctgtctccctccataggcacacaaagtatgtaatttgagcctaaccaattaattgccttctaatataaaaatagtawctttctttggaggaatattagagaatgcagaaataatgacttggatacaatacagactggcttcacattcaaagaaaaaatatatgattaacagagtcca

SEQ ID NO: 44241 - DNA, 201 bp, Homo sapiens
gcactctgtaaaatggaccaatcagcaggacatgggcggggacaaataagggaataaaagctggccactccagccagcagtggcaacctggtagggtccgyttccttgctgtggaagtgttgttctttcacgcttcaaaataaatcttgctactgctcactctttgggtccatgccatctttaagagctgcaacactcact

SEQ ID NO: 44242 - DNA, 201 bp, Homo sapiens
aatctttcataaaaatgaaagaacattttgtcccaggtttttcttttcaataaatgtgtaaatttaaataactaccttttgtcccatttatttaagataakttagattctgctttttgtagacttggttaaggatgtagcaaaataccaataaaaagtctggtcaatcatttcaatgccagaatgcttttcaagactttct

SEQ ID NO: 44243 - DNA, 201 bp, Homo sapiens
ctagatagagcaatcagacaagagaaaaaataaagagcatccaattggaaaggaagaagtgaaattatgcttgtttgcagattatatcatcttatatttgsaaaaatctaaatattctgccaaaaaactgttagaactgataaacaaattcagtaaagctgtaggatgcaaaatcaacatacaaaaatcagtagcatttct

SEQ ID NO: 44244 - DNA, 201 bp, Homo sapiens
tctacaaaacctctgagagtatgaaatttctttttttcttttctttttctttccattagttgagagatagattaaatggaaggcaattcatacatggtgarggccaccaggcttcagactctccccatacattatctcgtttaattctcaaagcatcccagtgaggtcatcattatcatactcattttataggtgacaaaa

SEQ ID NO: 44245 - DNA, 201 bp, Homo sapiens
atataaaatacacatgtaaaatatactatatgtaaaatatatataatatatgtaaagtattattttatatatatatatatatagagagagagagacagacagacagacagacagacagacagacagagagaccaagtctcttattccgtcactcaggctagtgtgcagtagcatgatcatggcttactgaagcctcaacct

SEQ ID NO: 44246 - DNA, 201 bp, Homo sapiens
gctgtatattttctaagtgttccctcttatcaaataaatcagttattgagctagctatcaattgcagaatcacatgataatttgcttagattgaagcaggmtttttgaaatgatgaaatgccgattttaaatgggactaaagaatgacccttttggtcagctacaaaatggcgagtcttaatggagtctaaaataccagat

SEQ ID NO: 44247 - DNA, 201 bp, Homo sapiens
acatggtgagggccaccaggcttcagactctccccatacattatctcgtttaattctcaaagcatcccagtgaggtcatcattatcatactcattttatargtgacaaaacaaggtcaaataatttaatatcttgctcataatcagaagcttattaactgtaggaactgggttcaaacccaaatctgtttgtctccaaaaa

SEQ ID NO: 44248 - DNA, 201 bp, Homo sapiens
aatataaaatacacatgtaaaatatactatatgtaaaatatatataatatatgtaaagtattattttatatatatatatatatagagagagagagacagacagacagacagacagacagacagacagagagaccaagtctcttattccgtcactcaggctagtgtgcagtagcatgatcatggcttactgaagcctcaacc

SEQ ID NO: 44249 - DNA, 201 bp, Homo sapiens
taacagcatagattttggcacctagattccaactcctggctacaatttaccagctatgtaaccttaagcgcgttacttaccttccctatgcctcagttttytcatctgcaaaacgggcataaaaacaaaaactcacttcatgttttgagaattaagtcattttaatatctgtatgttacttagaacagtgtgttgcatgca

SEQ ID NO: 44250 - DNA, 201 bp, Homo sapiens
taaaatataaaatacacatgtaaaatatactatatgtaaaatatatataatatatgtaaagtattattttatatatatatatatatagagagagagagacagacagacagacagacagacagacagacagagagaccaagtctcttattccgtcactcaggctagtgtgcagtagcatgatcatggcttactgaagcctca

SEQ ID NO: 44251 - DNA, 201 bp, Homo sapiens
aaaataaaaaatataaactttatttctcatcataaactccatcaagttgaagacacttttgtaaataatgatactagccatttagttcatccctaaagaaytgaatgtcctggaatttaaccgtgccaatgcagtcttttttacattatcaactgaagaaaaatgagtgccctttaaatattttttgagatttggaaacaa

SEQ ID NO: 44252 - DNA, 201 bp, Homo sapiens
atatgtaaaatataaaatacacatgtaaaatatactatatgtaaaatatatataatatatgtaaagtattattttatatatatatatatatagagagagasagacagacagacagacagacagacagacagacagagagaccaagtctcttattccgtcactcaggctagtgtgcagtagcatgatcatggcttactgaag

SEQ ID NO: 44253 - DNA, 201 bp, Homo sapiens
tttatcatgtactttgacttttgtattccacttctgccatagccaggtgggagacaagctgttgctttggttagggttgccagataaaataatacagaatkcccagttaaatttgaatttcatatcaatgatgaataattttctagtagaattatgtctcaaatattgcatggggcacacttatgctaataaaaatattta

SEQ ID NO: 44254 - DNA, 201 bp, Homo sapiens
taaacttctattctaacaatgaaaaacctgactcccatcaccatcatttgtttacctaactgtttaatttcagtacactagtataacattatgagaatcawtaacctgtacccttatggaaagtagctttatcaagtgcagcatattgcttactggtaattccttttgacttcagtcttatggattacattaattttcaaa

SEQ ID NO: 44255 - DNA, 201 bp, Homo sapiens
aaaatatatatatgtaaaatataaaatacacatgtaaaatatactatatgtaaaatatatataatatatgtaaagtattattttatatatatatatatatagagagagagagacagacagacagacagacagacagacagacagagagaccaagtctcttattccgtcactcaggctagtgtgcagtagcatgatcatggc

SEQ ID NO: 44256 - DNA, 201 bp, Homo sapiens
ttcttaattcttgatgggttagtctgtctttctgaggcagcccaattaggccaaatagaatggaaaatatttaatccctagaaaatttcgagagggtaacstatttagtagcttgttctagaacacacaaatagtaaatggcagcatcaggtttttgcaggtccaaatagcctccacaatacacattcaaaatttaaaaag

SEQ ID NO: 44257 - DNA, 201 bp, Homo sapiens
ttactctttgtgctgtaaatttctatggcttttgacaaaggtatgtcatgtatccaccattaatatatacaaaattgatttaccagtcaaaaaaggcctgygcttcacctattcaatcctcctcctctcgccttgaatcattggcagtctctcattgttttactgttcctctagttttgttcttttcaacatactgttcaa

SEQ ID NO: 44258 - DNA, 201 bp, Homo sapiens
caaaatatatatatgtaaaatataaaatacacatgtaaaatatactatatgtaaaatatatataatatatgtaaagtattattttatatatatatatatakagagagagagagacagacagacagacagacagacagacagacagagagaccaagtctcttattccgtcactcaggctagtgtgcagtagcatgatcatgg

SEQ ID NO: 44259 - DNA, 201 bp, Homo sapiens
cagcaactttcaaattataaagcaattaaaaaaaccctcagttttcttcttcagtggaatccatagtgattgtatgaagcatttcatctggtttggatagytgggtttcagcatctattttgagatcccagagtcacaaaaagtatgctatccttaaacttagttttctcttgtgcccagaataatcctgtattctgaatc

SEQ ID NO: 44260 - DNA, 201 bp, Homo sapiens
gaagtacttgttctataaatctaggtgctctactgttgagtctgtatatatttaggatatttaagtcttgttgaatcaaaccttttatcgttgtgtaatamccttctttgtcttcttttactgtagttggttttatctgataaaagaataccaactcccgccgtttttttgttttctgtttacatgatagatcttttccca

SEQ ID NO: 44261 - DNA, 201 bp, Homo sapiens
atgctcaaatcctttctgtggaggagttcagcatttggggtatggcaaacattgttggttggctgagtcgaaagctcttgctaacactcttctttcttgcmtggctatacaaaagcattggaaaattcctagcagctactgatatgtgagcagaaacttgctggaagtgatagtggtggtggcggtggtaaagatgcttct

SEQ ID NO: 44262 - DNA, 201 bp, Homo sapiens
tctaaatccaacaagcttgtaagagccagacaaatgaatggggctatcctagaccatcaatccccttcaaaactggcagatgacttcagagatgagccagrccagccccgatgagaattgccttgctaactcacacaattatgaacaaatacattattgttcttataagtaaaaaaaaattgaatagccaccctgtaaaaa

SEQ ID NO: 44263 - DNA, 201 bp, Homo sapiens
tttttttttaaaaatactatttttattaatatattcagtatggaatagaacctttctactatacttatttgtaataaattatggattttaaaatggtgggwaatgttgagtggtctttgaaggctgtaacatttacagggaaacactggcaagggtttcagaaaaaagcctttaccttatgttttcaggttttccctttta

SEQ ID NO: 44264 - DNA, 201 bp, Homo sapiens
ttttgccactgcactccagcctgggcaacagagcgagactccatctcaaaagaaaaaaaaaatttaagactgtaattttgaggaaataaagagaacaaatrtatcaaacagaatttgaacattcaaagatatttattttaaatatttcaccattaaaatgtttacatcttatagtgtgctgatggcatcataattactcaa

SEQ ID NO: 44265 - DNA, 201 bp, Homo sapiens
gctgaataatttcaaaataaataatcaaaaaaatcatggagtaggttgggtgcgatggctcacgcttgtaatcccagcattttgggaggccaaggcaggcrggtcacctgagaacaggagtttgagaccagcctagccaacatggtgataccctgcctctactaaaaatagaaaaattagccaggcatagtggcatgcacc

SEQ ID NO: 44266 - DNA, 201 bp, Homo sapiens
agaaaccactttttaatttattatccaggtaaaaaagcatttctctccattggaaaaaaaataatccataggaaaaggagcttgtaggaaaaacaccaatmccacattgtgtactatttcctgtttttgtgattatctctatgaaactaccttgagggtttggcgagtaaatagtaacaaattcagtcttactaattttgt

SEQ ID NO: 44267 - DNA, 201 bp, Homo sapiens
aggtaaaaaagcatttctctccattggaaaaaaaataatccataggaaaaggagcttgtaggaaaaacaccaatcccacattgtgtactatttcctgtttytgtgattatctctatgaaactaccttgagggtttggcgagtaaatagtaacaaattcagtcttactaattttgtccttttctttgggggtaatacagcct

SEQ ID NO: 44268 - DNA, 201 bp, Homo sapiens
aaatattacctccactcaatatttgtaattgttgcttcagaatataagtcctttgagtacagaaattccagacctgatatagaacttactcatgcaataaraaacatgtgcaaggtatagtctcacagtttattctcttccgttttatgctgcactttggctgatgcattgcaaatgtatgttaaaatcaaccaccctctg

SEQ ID NO: 44269 - DNA, 201 bp, Homo sapiens
atccattgatttggaaagtaactcaataaagatttaccttgtttttataagcaggattgtttatgattgaagctttagtaataaaaccttttacaagaaaygagattcagcaaatgcagaagttggcagcaattttactagatgttcctagtcagttgagcacaactttcttgcaggaaaatgatattatgcttcttaatt

SEQ ID NO: 44270 - DNA, 201 bp, Homo sapiens
ttatctcgtttaattctcaaagcatcccagtgaggtcatcattatcatactcattttataggtgacaaaacaaggtcaaataatttaatatcttgctcatratcagaagcttattaactgtaggaactgggttcaaacccaaatctgtttgtctccaaaaactcccgatatccttgtttccctcagtgagcagaaacattc

SEQ ID NO: 44271 - DNA, 201 bp, Homo sapiens
ccagtgaggtcatcattatcatactcattttataggtgacaaaacaaggtcaaataatttaatatcttgctcataatcagaagcttattaactgtaggaaytgggttcaaacccaaatctgtttgtctccaaaaactcccgatatccttgtttccctcagtgagcagaaacattctacagagatcttatgaataccaacaa

SEQ ID NO: 44272 - DNA, 201 bp, Homo sapiens
acactgatgtaacattagaaaatatgtcataaaatcattcaaatttgaaatgtaaagatattttatttctaacacttttctgttttgtcacagatattacktatcttaaaattcgaccttgtttgtacacaatagcactaaaactgcacatgacttgaaatatactctattacctagtaactttgacagaacagttctggt

SEQ ID NO: 44273 - DNA, 201 bp, Homo sapiens
aaagcaaagactgtaaatccatttaaataacattttgtggtacttttaaaatagtgatccaaagtcatatgttgtttatttccactgcatgtggctaatgsgtagtttctccgcaactggatgtattttagatcttagcaggaaaaactgcaatgcgttaaagtataaaacaactgacagagatattttaaaagttagaaa

SEQ ID NO: 44274 - DNA, 201 bp, Homo sapiens
ttttgacaaaggtatgtcatgtatccaccattaatatatacaaaattgatttaccagtcaaaaaaggcctgcgcttcacctattcaatcctcctcctctcrccttgaatcattggcagtctctcattgttttactgttcctctagttttgttcttttcaacatactgttcaattgggatcatatagtctgtagccttttca

SEQ ID NO: 44275 - DNA, 201 bp, Homo sapiens
tatttattttgaaatttcaaatcagctgaaagaattgactctttttttcttttatcaaagaaggtatcggtttgaaaaaagttaagaaatattttcttgtyggtaattcagatgtttcttaaaatctgaagagtgacacacttttagggaattatttctacatgacaaatggttttgaagccatgaatcaagatacacata

SEQ ID NO: 44276 - DNA, 201 bp, Homo sapiens
gatacacatagagaaattttaaacactcttatctgagaagaagcaggatataatacggatacttcctaataaagaccacaaatgttataaggatgagaaawataacaaagattagggactttaagtctctggacgtctcctgagattctcagtctacaaaaagtagggcatgtgttaaattattgatttgccttgctgaca

SEQ ID NO: 44277 - DNA, 201 bp, Homo sapiens
tttctttcacttatgaagattaatttagtgggatatgaaattcttggttgaaatttctttttagaatgctgaaaatgagctcccaatctctcctggcttayaaattttctgctgagaagtctgctgttagcctgatgggattcccctttatgtgatctgatgttttttcccagctgcccttaagattttttttataacatt

SEQ ID NO: 44278 - DNA, 201 bp, Homo sapiens
cattaatatatacaaaattgatttaccagtcaaaaaaggcctgcgcttcacctattcaatcctcctcctctcgccttgaatcattggcagtctctcattgktttactgttcctctagttttgttcttttcaacatactgttcaattgggatcatatagtctgtagccttttcaggtgggattctttcacccagctataagc

SEQ ID NO: 44279 - DNA, 201 bp, Homo sapiens
aactctcaaataaccacagatctgatttctgccactacagattgactggcaagttttagaatgttatataaatggaatcatgcagtgatatggtttggctstgtatccccacccaaatttcatgttgaattgtaatccacatgtgttggaggaggggcctgggggggtggtgattgaatcgtgtgtgcggacttccccctt

SEQ ID NO: 44280 - DNA, 201 bp, Homo sapiens
taggaaataccattctggacatgggcctttgcaaagaatttatgactaagttcccaaaagtaattgcaacaaaaacaaaaattgacaagaaggacctaatyaacttaaagagcttttgcacaataaaagaaactatcaatagaataaacagacaaccttccgaatgggagaaaatattagcaaactgtgcatctgacaaag

SEQ ID NO: 44281 - DNA, 201 bp, Homo sapiens
catggacattaatttcgtttattccccaatattattagtcataagcataggcactgtgcctgaataattggggcagtctgattcagcaggcatcctggtarggaatgaagtcactgtggcgggatgcatagattatttcaatggaaaggggcattgtaattatgtttgagtgttgtagctaaaagactgcatatgtttgtt

SEQ ID NO: 44282 - DNA, 201 bp, Homo sapiens
ctatcattaaaaattaaaacatttctcacttttacagaaagcctttcaatatgtatagaatgtaaacaatgatcctagatgacttgcactgctctgagaawtagtagttatttgaagttatttgtccactgagggctttggcaaaggcgagggcagtttgatatataagtagaatattatagataagaaataattacttat

SEQ ID NO: 44283 - DNA, 201 bp, Homo sapiens
ttttataagacctctgcctatgaataggatatgtgagtcacaactatggaaaattaggcctctgaaatgctgaaataatacaaagggttgttttgccaaaygcttgacactaagcaaagacgaaaaagctgtttgatgtgcagatcatcttctgctcttattcttgccatcacatctaaaagttttgggaactgtttgact

SEQ ID NO: 44284 - DNA, 201 bp, Homo sapiens
ataatcctctgtgccatgaaaatgaattttctgaggaaattcactcaaaaacccatctagaggtaaattcttttaaaatttaaataagtagtcttattatrtaaagactgttacgttaggtaagctattcactcatatatagaaaaagttctttcagtatgtatatatatacacatctctttacccactccttttgtttgt

SEQ ID NO: 44285 - DNA, 201 bp, Homo sapiens
atgaaaacagaaacaagacataccaaaaaacctatggaacacagaaaaaatagtacaagagggaagtttaaaggaataagcacctatataaaaaaaaaaaagatttcaaataacctagtgatacacctcaaaaaatagaaaagcaagaacacgccaaacccaaagttaatagaggaaaataaataataaagatcagcacag

SEQ ID NO: 44286 - DNA, 201 bp, Homo sapiens
ttgttgaattttgtcaaaggccttttctgcatctattgagacaatcatgtggtttttgtctttggttctgtttatatgctggattacatttattgatttgmgtatattgaaccagccttgcatcccaggatgaagcccacttgatcatggtggataagctttttgatgtgctgctggattcagtttggacaacttctttta

SEQ ID NO: 44287 - DNA, 201 bp, Homo sapiens
tgaaccagccttgcatcccaggatgaagcccacttgatcatggtggataagctttttgatgtgctgctggattcagtttggacaacttcttttatgttcastttatgaggactcagcttaaatatcatcttctcagagatcaatctcccttctccctaaatcactcctccagctgtgacttattatgttaccatatttatt

SEQ ID NO: 44288 - DNA, 201 bp, Homo sapiens
atttattttagagtctatatcacaacctgaagttatattttatattaatttgttacctttattatatataacacactcacacagaaagttcatgaagtcartgatttgatctcccttattcaccattaatatcccctgtacctagcagaaataaaatatatattggatgttcaataaatatttgttcagtgtataaatcag

SEQ ID NO: 44289 - DNA, 201 bp, Homo sapiens
ggactatgatgtgaatgacttgttctgaagggccccgaggggcaaaatacaacctatgagcagatgttagaagaatgcaaattttatctcaatatagagawgagttttttaacagagctatcctgacaggaattggactttattgagaacacaggatttggagtttctcaacactgcagacatttaacacaaggagagtga

SEQ ID NO: 44290 - DNA, 201 bp, Homo sapiens
ctagccaatttgtgttgaaaactgtctagggtcacacagcatctggatttagtttccttcaaatctagttggcatcattggtagagatcacatcttatgartggaaattgaattggaaatacattttgctaaaagtaagctttgctcttgctttcagggaagtgggtgcgtggttcactcaggctgatgccactgaaggta

SEQ ID NO: 44291 - DNA, 201 bp, Homo sapiens
gatctgtctgttttatgaaagagagaaatgtgatctggatgattgctggagtactacaggtgtgtgaacagttatactcaacctggtggaaggataaagcsatctatagggcttaatccttgctccactttaacaagtgacttggaagaatactgaaaaagtaaacattttatatttgtgtaaggcacaaaactgagaaag

SEQ ID NO: 44292 - DNA, 201 bp, Homo sapiens
ttgggcccaagagtttgaggttgcaatgagctatgattatggcactgtaccccatcctgggtgatagaaggagaccttatctctctctctctctctctctstctctccatatatatatatgaatgaaactgaacaactagaaaaaattataattttaaaaatgcatttcaaaattttattgtgctacacttcctgtggtga

SEQ ID NO: 44293 - DNA, 201 bp, Homo sapiens
caagtgacttggaagaatactgaaaaagtaaacattttatatttgtgtaaggcacaaaactgagaaaggtagaatggtctaatgtttgaaaactcataagytgaaattaaataagggcaaatataaagtcagggccttagcttaaatacaacctattgcacgagcatatagtgaaacgattgcacatcaaaagcacatggg

SEQ ID NO: 44294 - DNA, 201 bp, Homo sapiens
ttgcatgggacatgacaataattacttcatttagaaagtttagagcaaggccgtacaaaaatactcttccagtgaatattcaacaacagtctaattcatgkcataacagtgttgttctgcacatcagatttctctgaatacaaatattaaaagtaaagagataaataaaggtgtatctggtgaacactacccataataata

SEQ ID NO: 44295 - DNA, 201 bp, Homo sapiens
ttaatttatagctatggagccaggtatgcaaaaatggaaacttttttttataattaaatttagcttaagtctcttagctcatatacactgggtagctagamttaatcttgacaatttagaaaattcaatcgattttgcattataactcagtttctccagaaaaactagttaatatctttttctctcttcttcccttctctg

SEQ ID NO: 44296 - DNA, 201 bp, Homo sapiens
gggcccatagtttaaaggataggcagaaaaagaataagttgttttaagccatagtgagctatcacctcattactggaagtgtttaaacaaaagcaaaatarggtgtaccttgacaaaaatattggagagagaatttcattattgagaagtagaagaattagatcctcttaagtgttctttccataaataagattcactaat

SEQ ID NO: 44297 - DNA, 201 bp, Homo sapiens
cagcctcccaaagtgctgggattacaggcatgagccatcatgcccagcatctttttattcttttaagtgtcttttgcagagtagaagttttaaatttttaygaagtccaatgtattcattttttgtaaaaaaattgttaattatgtttttggtgttatattttaaaagttcttgccaaacccaagatcacctagagtttct

SEQ ID NO: 44298 - DNA, 201 bp, Homo sapiens
tcttcttttgagaaatgtttattcaggtctttgggacttttttttccccaacatgtctaaataaactgttattgaaacacagccatgtgagttcctttatktattgtctagggttgctttcatacaacaaggaaagagaccatccacctaacctaaaatagttactatctgacctttttaaaaaaacttttaagttcaggg

SEQ ID NO: 44299 - DNA, 201 bp, Homo sapiens
tacagatccagaatgttaacattaccagagcatagtcaatgtaagctttgcagaattaaaattatccttctaaaatgcatagatgattatcttatgctcartgaaaattaatgtgaaaacttataatgcattcagctatagattactatagcataaacaatcttttgtaccatttctataaaatttagaaaatattttaaa

SEQ ID NO: 44300 - DNA, 201 bp, Homo sapiens
ttgctttcatacaacaaggaaagagaccatccacctaacctaaaatagttactatctgacctttttaaaaaaacttttaagttcaggggtacatgtgcggktttgttacatagggtaagctcatgtcacggggcctgaagcattgctccaggaacatagcccccccatgggtatttttacacaaaaactggaggctattca

SEQ ID NO: 44301 - DNA, 201 bp, Homo sapiens
ttaagagaacaattactgatgctggtgaaattgggatcttgttcagaggttacagaatggctatgattaggatctgttagagaatcttctagaaagctttrtggcaggttcatggagaaacttcatggaaaggtaaataataagtacagactttttggaaatctgaggtaagatgaaccacattgaattcctgaaaacatg

SEQ ID NO: 44302 - DNA, 201 bp, Homo sapiens
gagaccatccacctaacctaaaatagttactatctgacctttttaaaaaaacttttaagttcaggggtacatgtgcgggtttgttacatagggtaagctcrtgtcacggggcctgaagcattgctccaggaacatagcccccccatgggtatttttacacaaaaactggaggctattcaaaagatacacatgaagtctatt

SEQ ID NO: 44303 - DNA, 201 bp, Homo sapiens
aacattaaaaacaagacatttaaatattataatttcaacgatagtcatttcatatttcattgtgaccaggttatactacatttttaaagatacattatttstcatatatactgatgaccccaaattacagaaattgtaatatgcagtctttgcttgatgactaaggtctgtcatgtgtttaacattatattcacttaagag

SEQ ID NO: 44304 - DNA, 201 bp, Homo sapiens
gcaagaattgaaaaattacctattgggtaccatttttgctacgtgggtgatgggtatgctaggagcccaaacctcaccattacacaaacctgcacatgaamcccctgaatctgaaacaatataaataaataaataaaaattacagagagtatcaagaaatagagaactcttaagagaacaattactgatgctggtgaaatt

SEQ ID NO: 44305 - DNA, 201 bp, Homo sapiens
aagtatatttttgcaacaattagaacttctgtgatttaagcctaaatctctctcctcttccattgatttatagagtagaacgttggtattcaaaaatgccmgttttccaccttataacatggacaaaaaaaccaaagttctatatctttagtagtttataatgccaccaaggcatgaatttaagtggtatattgtgatata

SEQ ID NO: 44306 - DNA, 201 bp, Homo sapiens
attgtaaattattattatatttaggagttcatcttctaagtttgctgttttgacaaggagataattttgacataaacaacttataaacaagtggcataaayttaggtttgttgggacagagaagtgacattatccatatcaggggatatattctttcttggcacctgacagcaaattataaaaattaacacttaaagagct

SEQ ID NO: 44307 - DNA, 201 bp, Homo sapiens
ttttaatgttcttttttttcccatgatgtattcccccacacttagaacagtgtctggctagtaaatgtgctttaaatatttattgagtcaataaataaacrgtgttaaccatatatgtgctttgggaaaagagacctgtgcagaaaatttgggggtggtggggttgtttcagatacagcacttgaatccaaccaattataa

SEQ ID NO: 44308 - DNA, 201 bp, Homo sapiens
gatcaaaatacataccttttagaagtatatctatatatagataggtagatatcattagatagatcattagatatatatctatatattaaataaatgatatattagaaaagcttattctttttcttccttagttagtcttataatctttctcttttaaagtgaattgtgttagataatattcatttgcactcactgaatcat

SEQ ID NO: 44309 - DNA, 201 bp, Homo sapiens
tctctctaaaataattgcttcaaggatgctgcccatatctgctgtccccatatctggagccctttagagcttttgtgtgacaaaggttgaagtgtaacatyactcatatgtagtatttcagtttttatgtgctgcttgaagtctagcacctcctttggaactctgcatccattatatgttcacgccttggccaaaatgtcc

SEQ ID NO: 44310 - DNA, 201 bp, Homo sapiens
aatctgaaaagctctctgcctactttgttttcccttatgaataagactaaaaacacatattgaaaagaattttattttgtaaactcattcactgaatgaaygaaatatgaaaggattttttaaaatatatttgttaccccccaaagaggaagatactagagactatgattaaacaaaaagaagttgcaacaatctgctagc

SEQ ID NO: 44311 - DNA, 201 bp, Homo sapiens
ccacttataagtaagaacatgaagtatttggctttctgttccatgttagtttgctaagaataatggcctccagctccatccatgttactgcaaaggacatratctcaatcttttttatggctgcagagtattccatggtgtatatgtaccacattttctttatgcagtctgccaattgatggacatgtgagttgattcctt

SEQ ID NO: 44312 - DNA, 201 bp, Homo sapiens
tattccatggtgtatatgtaccacattttctttatgcagtctgccaattgatggacatgtgagttgattccttgtctttgctatggtgaatagtgctgcartgaacatacacatacatgtgtctttatgatagaatgacttatattcctttggatatatacccagcactaggattgctgggtcaaatggtatttctgaatt

SEQ ID NO: 44313 - DNA, 201 bp, Homo sapiens
aatatgtttccatttttttgtgtcctcttcaatttatttcatcagtgttttacagttttctttgcaaagaccttttacttcttcattaaatttattcttaygtgtgatatatatttttagctattgtaaatgttactgctttcttgttttttattttcagattgatcactgttagtttgcagacacactattaatttttgt

SEQ ID NO: 44314 - DNA, 201 bp, Homo sapiens
tctaggtaacatagtgacctaagagaatgtacacttactctgtctcacatataggtgctattgaatatttttggtggtgatgttgaagatatttgaattaygttggtggtaagtggaggccagagagttacttaatatgtggactggcatggtgtaagtctggaaggaactgtggtgaacagtttctttgcttatggtgca

SEQ ID NO: 44315 - DNA, 201 bp, Homo sapiens
acttaaagcaaacactggaactcatttcctaagacactttgaggtcactcattcccacccaattaaaaaaaaagtagaagaagaaaagaaaaacacctgtratgagttttcagaggcttatatggtgttactgtattttttcagaatgtattgttgtgtaacaagaaatatttcatgggtaatccaaagtataggagttct

SEQ ID NO: 44316 - DNA, 201 bp, Homo sapiens
aattagctggatgtggtggcatgcgcctgtaatacccaggaggctgaggcaggagaattgctggaacccgggaggtagaggctgcagtgagccaagaacgygccactgcactccagcctgggtgacagagcaggactctgtctcaaataataataataataataataataataaataagatcaatcaatcaacaaggaata

SEQ ID NO: 44317 - DNA, 201 bp, Homo sapiens
  misc_feature (1)...(201): n = A,T,C or G, or insertion/deletion polymorphism (see Tables 1-2)
gtgcaatgaactgaagaatatgactaatgcaatcctcagctcctgagttccagcaacataaacaacaacaacaaagggccctatatgtactagataaaaangagtaaatatttatttttgtgactttaggatggtaaaggatgttccaaatgtgataccaaagaccaaaaacaaaagaaaaggggcgcgaactttactgct

SEQ ID NO: 44318 - DNA, 201 bp, Homo sapiens
aacgcgccactgcactccagcctgggtgacagagcaggactctgtctcaaataataataataataataataataataaataagatcaatcaatcaacaagraatatttaacagcaataactataaagtctacattcaaactaaatgcatcttttatgggtctctcttggcacttggtgagataggtaaagtgaaattgttt

SEQ ID NO: 44319 - DNA, 201 bp, Homo sapiens
tttcatccagtttcatggatagagaaattagcaaagttatatgatttacctaagaatttaatttccatgaaaaaaagttatagttaaggaaagccaaaaaraaaattgtggaaagggaaagctactaatgaagacacatggactgaaacatcacatctgtcactagccagctggagagttcttttaagtcatttccccttt

SEQ ID NO: 44320 - DNA, 201 bp, Homo sapiens
atgaaatagaaaaggactgtgtgcaaaaaacaaaaatgccttgctacagatggtgacatttgaattgacagttttatagcataaaggaaaaaaccgtgtamaattctaggagaagagcttttcaggcagaagaaacaaatgcaaaagcatccagatgggatgactgcaacctgtttgaatgaagagatgcagacttgagta

SEQ ID NO: 44321 - DNA, 201 bp, Homo sapiens
cttaagtgctgaatacaaaaagccagacacaagaattcatgtgctattattccacacctttataagattaaaacatgggcaaatctacagttttagaaatsaagttagtgattacccttaggagatagtgactagcagaagatagaaggaggcttccgagtgtctgtaatctttttaaggtttcttgatatgagtgtaggt

SEQ ID NO: 44322 - DNA, 201 bp, Homo sapiens
tgcgggcttgcaagaatctcattaactgtagggccatctgccacgttgctactcatttggctcatttaatcacaggtgggtaggaaggtctcaatagtttyggttcccattcaattctgatttttgcttgggaaacagaaggaaggtctcaatagttttggttcctgttcaattctgatttttgcttgggaaacagaaaag

SEQ ID NO: 44323 - DNA, 201 bp, Homo sapiens
gccagtgcacttggcccacaatacaatattgttaactctaggcactatgttgtgcagcagatctctagaacttattcatcttgcataactgaaattttatrcctattgaatagcaactccccattctcttaattatctaggatcatattttcaggaacgtcatcgcatgtgtgtgtgtgtgtgtgtgtgtgtatatatata

SEQ ID NO: 44324 - DNA, 201 bp, Homo sapiens
atgttgtggaaatatagagggtctctagggtcaggaagccttatgaatgttgtgagaggcagcttttctcctcaaatgtgaggcagctcacacaaaagaartacaaatagttaataaacaaacaaaaaattcaatctcaccagcaatcaagtttgaagtatatcagctttgacctatcaaattgtaaaagagatcttaaaa

SEQ ID NO: 44325 - DNA, 201 bp, Homo sapiens
ctaaaggagtaaatttacacacaaaagagaaggtccaagggctaacctgggacaccccaacattaagaggttggtaagatgaaatggaaaagagaacttcwcaagagagtcccagtgaggttggaagaaaatcaccagtgagtggcatgcttgaatgtaatgaagatggtaggttaagaaggagaatgtgatcaactgtgt

SEQ ID NO: 44326 - DNA, 201 bp, Homo sapiens
tgtgatcaactgtgtcaaatagtgctgacagttcaagtaagaggaggatggagaactgactttagactgagcaatgtggagtttattgatggccttaaggrgagcagttttggtagaattgtggagcaaaattttggagtgagtaagagagagaatgagatgaactggagatcagagactatacaaaacaatagaaatcac

SEQ ID NO: 44327 - DNA, 201 bp, Homo sapiens
attgttctcagaaaggatcccttgtgattaactagtagtccttagcaaaaaaacttaagaaccattcccattttagggtcactctcaagatttctacagakcctttccttctcctatgctttatcaacactgtcactattcctaaccctaccatccccccttttctaagggcagtcacaaagtggaattaaaactaaagtt

SEQ ID NO: 44328 - DNA, 201 bp, Homo sapiens
ttctaggagaagagcttttcaggcagaagaaacaaatgcaaaagcatccagatgggatgactgcaacctgtttgaatgaagagatgcagacttgagtaggsaatagggaagatagggcaaggaccaggtcatgtagggctatgctttggaaggagatttcattctaagggtactgcagtaaaacaggaagaatttaatcag

SEQ ID NO: 44329 - DNA, 201 bp, Homo sapiens
tggtcagtattgtttcagatacccaaatggaagtgtcaggtggaagagatatttctactttgaagttcagagaagaactttaggcaggaaaacttggagtygttaacattttgatatttaaaaccattggatgggatagggataatataacatagagggaggattcagccatcagaaaaggaaagcaatgaggcctagttc

SEQ ID NO: 44330 - DNA, 201 bp, Homo sapiens
ttgaaataagcgaattaggcaaaaagagaaaaaagaataaaaatgaaaaaagtttacatgacatatgggatatcactatgcaaacaaatagtctattcctrttttagaaattccagaaggaaaagcagtgagaaaataaataggccacttatttaatgaaacaatagctgaaaagtttccaactcttgggagataatcatc

SEQ ID NO: 44331 - DNA, 201 bp, Homo sapiens
tgaagttcagagaagaactttaggcaggaaaacttggagttgttaacattttgatatttaaaaccattggatgggatagggataatataacatagagggargattcagccatcagaaaaggaaagcaatgaggcctagttcaaaattcagctatcagggaaggagtaatctacagaaaacaactgagaatgaatagccaaa

SEQ ID NO: 44332 - DNA, 201 bp, Homo sapiens
gacagatcttttgaaataagcgaattaggcaaaaagagaaaaaagaataaaaatgaaaaaagtttacatgacatatgggatatcactatgcaaacaaataktctattcctgttttagaaattccagaaggaaaagcagtgagaaaataaataggccacttatttaatgaaacaatagctgaaaagtttccaactcttggga

SEQ ID NO: 44333 - DNA, 201 bp, Homo sapiens
gtatgatgagaacttgagactgcttttttggattttggtcacaaacagaagtaataaaaacactttgattcaatgtgactttggcaattacggctctgtawgctaattaaatttctaaataaggtggcttaagggacacttaaagtagtgatattcaaagtgtggtccccagaccaggagtatcaaaatcacctggaaact

SEQ ID NO: 44334 - DNA, 201 bp, Homo sapiens
tagtttaattagaccccatttgtcaattttggcttttgttgccattgcttttggtgttttagacatgaagtccttgcccatgcctatgtcctgaatggtaytgcctaggttttcttctaggatttttatggttttaggtctaacatgttaagtctttaatccatcttgaattaatttttgtataaggtgtaaggaagggat

SEQ ID NO: 44335 - DNA, 201 bp, Homo sapiens
tctagaaataaggcaaactataactatttttaacattatcctcacatgttacatgactatgttaaaatataaatgccatagcaattttaataaatgaaatyaccctcactgaatcaaatgtaaagctggctttctgattcatggtcctcatttttctcattgttgtatattttcctaattcactttttagactgttttaac

SEQ ID NO: 44336 - DNA, 201 bp, Homo sapiens
gtagcttcttttgctgtgcagaagctctttagtttaattagaccccatttgtcaattttggcttttgttgccattgcttttggtgttttagacatgaagtmcttgcccatgcctatgtcctgaatggtattgcctaggttttcttctaggatttttatggttttaggtctaacatgttaagtctttaatccatcttgaatt

SEQ ID NO: 44337 - DNA, 201 bp, Homo sapiens
cctgcttcacaggtagaccagaaggggtgcggcctgaaagctgtggtttcactggtctccactgggacggcttatggcctggggcagtttttagttctacstacagactacctggaacccagcctgctgcttttagcgaacattatgagtgggatacatgccttgccaagtgcatgggagctgagtggggcttactgctgc

SEQ ID NO: 44338 - DNA, 201 bp, Homo sapiens
agatgagtaggttgcgaaaatattctcctattttgtaggttgcctgttcactctgatggtagcttcttttgctgtgcagaagctctttagtttaattagaycccatttgtcaattttggcttttgttgccattgcttttggtgttttagacatgaagtccttgcccatgcctatgtcctgaatggtattgcctaggttttc

SEQ ID NO: 44339 - DNA, 201 bp, Homo sapiens
gtcagatgagtaggttgcgaaaatattctcctattttgtaggttgcctgttcactctgatggtagcttcttttgctgtgcagaagctctttagtttaattrgaccccatttgtcaattttggcttttgttgccattgcttttggtgttttagacatgaagtccttgcccatgcctatgtcctgaatggtattgcctaggtt

SEQ ID NO: 44340 - DNA, 201 bp, Homo sapiens
agatccctgtggaatcactacactgacttccacaatggttgaactagtttacagtcccaccaacagtgtaaaagtgttcctatttctccacatcctctccrgcacctgttgtttcctgactttttaatgattgccattctaactggtgtgagatggtatctcattgtggttttgatttgcatttctctgatggccagtgat

SEQ ID NO: 44341 - DNA, 201 bp, Homo sapiens
ggtttccagtttcatccatgtccctacaaaggacatgaactcatcattttttatggctacatagtattccatggtgtatatgtgccacattttcttaatcmagtctatcgctgttggacatttgggttggttccaagtctttgctattgtgaatagtgccgcaataaacatatgtgtgcatgtgtctttatagcagcatga

SEQ ID NO: 44342 - DNA, 201 bp, Homo sapiens
tttacatttgctttttttatataattactccaatgggtgtcattatttcttcattactttctaatgactaaaatttctaattctaactttttaaaaatgtraactagtaaatctttcaaaaagaaagagacatatggatttactcttagccaatctcatctgattattgtgggttctgccaaatatgaggaatataaaagc

SEQ ID NO: 44343 - DNA, 201 bp, Homo sapiens
aatgtagatgaatgtccccccagcacctttactttgtaatttatgtccctcatctctcattttgctcggcattttttcctcatttttttaagcattctcaytttattgggcatatattttctaggatttttacatttgctttttttatataattactccaatgggtgtcattatttcttcattactttctaatgactaaaa

SEQ ID NO: 44344 - DNA, 201 bp, Homo sapiens
aaacaccaaaaaatggataatgcagttttcagtgatttttcccgtaatctgtggattcagcactcaatgtagatgaatgtccccccagcacctttactttstaatttatgtccctcatctctcattttgctcggcattttttcctcatttttttaagcattctcattttattgggcatatattttctaggatttttacatt

SEQ ID NO: 44345 - DNA, 201 bp, Homo sapiens
caagaaacaccaaaaaatggataatgcagttttcagtgatttttcccgtaatctgtggattcagcactcaatgtagatgaatgtccccccagcacctttamtttgtaatttatgtccctcatctctcattttgctcggcattttttcctcatttttttaagcattctcattttattgggcatatattttctaggattttta

SEQ ID NO: 44346 - DNA, 201 bp, Homo sapiens
gagtctgagggtgtaaaatagcagcagactgaagatagtaattataacttttttcaacatctaccctgtggataccagcgcttggcaggacctgtgcaatrgggatgtgtataattaagagagaagggtctgtagaaaggctgtggggaggagataattcatttacactctctctccctatgtctgaatagaagcgtaact

SEQ ID NO: 44347 - DNA, 201 bp, Homo sapiens
tggatcttttcagggaaacaatactcagagtaagattagaaaataccaaaggcacctaggaaaagtttctgacttttcagaggttagaggaagtcttcctwctattttgttgtttaccatgtattatatgataagaaatttggaaagactttgataatgctatatatgttaatgtgctccaatgttttccaaagcatgttt

SEQ ID NO: 44348 - DNA, 201 bp, Homo sapiens
aaggtttatcatatcccttttcccaccactttctttctcatgctttataagtatttattgagtttttctatgtgtctggcatataggaacatactatgacrtagaccttgctttcaagaacttccccatctagaagagatagacacataaattaataaatttttaaaaatatagaaagttcatgaatataaataaacctgc

SEQ ID NO: 44349 - DNA, 201 bp, Homo sapiens
aagaattcttttattttctcttttattgaatctgtcctatttctatgaaatgacaaatgggaaataaggatagaaaagtagtaaaggcctctctctgctcyttaatgatgcttttattgtaaaatcttgcatttttttaattttaatttttcttctcaaaactttcttttacctgaagcctactgttgtttcaccatctta

SEQ ID NO: 44350 - DNA, 201 bp, Homo sapiens
cctgccttaagcatgtttaggatacaaaaaaaatgtaagattttttcctccctgtaaaatttccctgaaaggaagataattatagatataagtaaatatamttcaagttagaaaattttaatggctatagaagtaaaataataataatatacaattagagttgaatggggaagaaaaatgcttttggttgtatcagaaaat

SEQ ID NO: 44351 - DNA, 201 bp, Homo sapiens
taaaaatgtacacatatattcaccaaaaaacatctactaggatattcatagcaccatatatattatagtcccaaactaaaaattatgcaaatgcccatcamccatagactggataaatacattttagtataatgacatgctatacagcaatgagaatgaataattccatatacaacttacgtagaaaaaaatttaatgttt

SEQ ID NO: 44352 - DNA, 201 bp, Homo sapiens
aattatgcaaatgcccatcacccatagactggataaatacattttagtataatgacatgctatacagcaatgagaatgaataattccatatacaacttacrtagaaaaaaatttaatgtttagtgaaagttgatacaaaaaagtatatgcagtatgattctatttgcatgaaccaaaacagttgcacgaacttcttattca

SEQ ID NO: 44353 - DNA, 201 bp, Homo sapiens
atccagcaccgtgcctgtggtatttgacgtgttcgttcccttactcttctcccatcttgtttctttgttggttggcatctacatacattacagatttccartcagcaccaagaaacaccaaaaaatggataatgcagttttcagtgatttttcccgtaatctgtggattcagcactcaatgtagatgaatgtccccccagc

SEQ ID NO: 44354 - DNA, 201 bp, Homo sapiens
  misc_feature (1)...(201): n = A,T,C or G, or insertion/deletion polymorphism (see Tables 1-2)
gtcccttgatcttgacttcctcttcttcctcattggttctgagctgccaaagtattagcatccttcaagtctgagttttactattaggacaggctgcctcntcactcctctttctgatgacatatgtatgggtatgtctttgtctttatttctaaccactctattaaggcataattcacatatcataacattccctattta

SEQ ID NO: 44355 - DNA, 201 bp, Homo sapiens
taatttttgagtagtttcttataaaaatggataatcccaattttaactcacataattatgtatctaggagtccaaaaaatcagtcttgtcttaaagtcttsaaatacttaaaactacttgaaatacttaaaactaaaaatacttaatacttaacatacttaaaaacctttaaaaacttaaaactaatgatgaaaatattat

SEQ ID NO: 44356 - DNA, 201 bp, Homo sapiens
tttcaaagttgtcggctaaacaaagtgccatgaaagttctctaggtgttcgcttttggaaaactataaattgttactttaagaaaatttgggtattatgamaagtacttttaagaaaaatcattgtggccgggcactgtggctcacacctgtaatcgcagcactttgggaggtcatggcgagtggattacctgaggtcagg

SEQ ID NO: 44357 - DNA, 201 bp, Homo sapiens
ttacatttttcattagactattaatacagatttcattgatgccaaaatattggccagacttgtacccctagaataaatcccatttggttgtggtacagacwtacatacacacatgctaatatatgatgtttatatttttttatcctcttcctcctctcctccgccttttccccctttcttcccctcctccccctcctcccc

SEQ ID NO: 44358 - DNA, 201 bp, Homo sapiens
gtttttcttagatgttcttcaccaggttgaggatgttccttaccattcctactttgctgagaatttctataatgaatgaacactgaattttacatatttttcctgaaaaaaagaaataattattacatttttcattagactattaatacagatttcattgatgccaaaatattggccagacttgtacccctagaataaatc

SEQ ID NO: 44359 - DNA, 201 bp, Homo sapiens
ttttatcattaagtatgatattagtcacaggtttttcttagatgttcttcaccaggttgaggatgttccttaccattcctactttgctgagaatttctatmatgaatgaacactgaattttacatatttttcctgaaaaaaagaaataattattacatttttcattagactattaatacagatttcattgatgccaaaata

SEQ ID NO: 44360 - DNA, 201 bp, Homo sapiens
ttttatttcttatattttaaaattgttattgtagtagttagaatttctagcacaagattgaatgggagaagttagagtgaacatccttgccttgttcccartcttaagagaaaagccaatattcttttatcattaagtatgatattagtcacaggtttttcttagatgttcttcaccaggttgaggatgttccttaccatt

SEQ ID NO: 44361 - DNA, 201 bp, Homo sapiens
tatttcttcattttaagtttttatttcttatattttaaaattgttattgtagtagttagaatttctagcacaagattgaatgggagaagttagagtgaacrtccttgccttgttcccaatcttaagagaaaagccaatattcttttatcattaagtatgatattagtcacaggtttttcttagatgttcttcaccaggttg

SEQ ID NO: 44362 - DNA, 201 bp, Homo sapiens
tgttttttgagttaaattttggataaagtgaggtttaggtcaggttgttgttgttgttgttttgtttgtgttttttgtttgttttttgagatggagtcttgctctgttgcctaggctggagtgcagtggcgtgatctaggctcaccacaacttctgcctcccaggttcaaatgatccttctgcctcagcctcctgagtagc

SEQ ID NO: 44363 - DNA, 201 bp, Homo sapiens
caatttgatgcctaggctggagtggggtggtacaatcaaagctcattccagacacgacgtcttgggctcaagagatcctcccacctcagcctcccaagtakctgggactaccagtgcatgccaccacacccagctaatttttaaaaaatttgtagagatgggttttcactatgttacccaggctggtcttgaacttctggg

SEQ ID NO: 44364 - DNA, 201 bp, Homo sapiens
ataaacattgaagacattatgctaagtgaaataagccagacacaaaaggacaaatattgtctgattctactaataagacacacctagaatagttaaatccrtagaggcagaaaatagaatagtggtcaccaggatctggggaggggagaatggaaagttgttgcttaatgggtacagagttttagtttaggatgatgaaaa

SEQ ID NO: 44365 - DNA, 201 bp, Homo sapiens
gacttcagtcattcagctgcaggctctaagaaagtctgttgtaactgtgcattttaattaaccgactcagctgaggaaatattgtctctctactgtggtgwagctgtctgccttgtaaagtacctccctggataaacagaggacttttatttcttaaactgcctttcccccatcgtctttaagagtatgttgggctttctt

SEQ ID NO: 44366 - DNA, 201 bp, Homo sapiens
tagaaaaaaatttaatgtttagtgaaagttgatacaaaaaagtatatgcagtatgattctatttgcatgaaccaaaacagttgcacgaacttcttattcayatgcttaatgccactttctactattaattctctcccagttaattaacataacataaataaaaatagtattgataatttaaacatttgagaattcttactg

SEQ ID NO: 44367 - DNA, 201 bp, Homo sapiens
agaatttttccctccttttacattaaattattagatggtgtcattttaattattgctttcatgagagataaaactattagtattttccttttaactcagtytgaaggcatatatccaagttgtatggattgacttaaaagttggatagaaagaaaaattgaaagaaattttaagtggagatgagaaagagaaaaagaaatg

SEQ ID NO: 44368 - DNA, 201 bp, Homo sapiens
ataaagtagtacataaaagaacaaaggtcatcatagaacattacttggttcaggtccaactttgaatatttaagtagtcacatttgtgtaaatgattactrtgatgtaaacaaattagaaaatgatgtgaggaaaagcatgaaagagcttaatcttcatcatattaaaaattcattggatacacttttaatataattaaat

SEQ ID NO: 44369 - DNA, 201 bp, Homo sapiens
ttgagcttatggaaatttagattctatttccggaaagtccaccaggagtctgttattcaaaataaaaataggtagtgtaatatgactttcaaagcgcattrtggtactgagatttttagcagttggaactaatgaagggaaggagaaagtattatgtgccaacctttgtattaaatgattttatctacatcatctcattga

SEQ ID NO: 44370 - DNA, 201 bp, Homo sapiens
gctccatagaaagacaatttactgcctgtctacttaggtagttcactcaccaaatcaagtaaaaaattgtttaaattctttgaaaagatgtaatgtcaacrtccttggaaaatacaaactcatttcaatgcaatatatcttgcataagtattgcttacaagactgtggcactgggactatttaactacatgctgtggtagc

SEQ ID NO: 44371 - DNA, 201 bp, Homo sapiens
agtggcatctattgtaagatttaatcaatatcaaagtaccttgagaaatccactttaactatttctttttctttattgcttataaaagtatgattttaatratctggcatccttaaaattttattttatggtgacttgcctagatttttcctctcagcatatgaaaaacccccaaacaataaaaaaaaattagtaaaaata

SEQ ID NO: 44372 - DNA, 201 bp, Homo sapiens
ggacagagctaaggattctactaactacattagggtcttcgaaaaaactggaaagagaaattctggtaagctctcaaccacatgcctgtagcaagctgctytcccattcgcgaaccttatctgaaaactccctaactaatgtgaggtgtggtggagaaatctggcttctcaatgctgtttcatttatttatttatgaaaca

SEQ ID NO: 44373 - DNA, 201 bp, Homo sapiens
gcatctttcttatttaaatggaaacaaggatgtggttaattcagcatagaggagaagaactgtggtagcttcaaaggatagtactacagtttcagagtccyttcacctggccacagcactacagtgttgagtggctgctgtggatattgggagacaatgggacacattggccccacctcattacttttgccatggaagaga

SEQ ID NO: 44374 - DNA, 201 bp, Homo sapiens
aaatatagttaattaataactccagcctgcctgttcccaaagtattttaaacaattacctagtcatagttactttcctgtattttgattttttggtttgcrtatcactttttcactctggactatgggaccctgaaagcaagaagctcataataaattaatgatggaatgattagatgaacagatgatatatactttgact

SEQ ID NO: 44375 - DNA, 201 bp, Homo sapiens
tcctatttttctagattcatattgagtttcaactttgtgtcttcctaggatatattctgtttcctttctgaataattgatgtttacaagttgatgttgttrtttgctttcagatagttttgtgattatttctttttggttacagtaatcatctaaagaaatttttatgtcatttaaaattttcaatgatctttctttaaaa

SEQ ID NO: 44376 - DNA, 201 bp, Homo sapiens
ccaggcacttttactttttattattgttattatttaatttcaacttgtagatacagggggtacatgtgcagatttgttacatgggaatattgcatgatgcygaggtttggggtatagatcccgtccactgttgtagtgagcctagtacctggtaggtagatttttaacccaatatcccctgccttccaccctcttggagtc

SEQ ID NO: 44377 - DNA, 201 bp, Homo sapiens
aataaagtactggtgaggatgtcgagaaactgaaacccttgggtattgccagtgggaatgaaaaatagtacagccactgtaaaaagcatcatagattactrtctgatcagaaatcttacttctaggtatatgattgatcattgaataattcaggggttaggattgctgacccgtgtgcagtcgaaaatctgcatttaactt

SEQ ID NO: 44378 - DNA, 201 bp, Homo sapiens
gcagtgagccaagatcacaccactgtactccagcctgggtgacagaaggagactccatctcaaaaaaaaaaaaaaaattggagatatacaaggatattacytcagcagtagaaggaagagaagagcactctttgaaatgaggaaatatttgcagtacttttgaaatattactaatatattccacttgatatatatatatat

SEQ ID NO: 44379 - DNA, 201 bp, Homo sapiens
tttctgagatttactcagtcttgccttctttgatgagataacttcctttatgttcatcatctgaactttatctttaaaataaatcttctggttctgtggaycataactaataatgttcgattcttttcatctccaaagtagaacataataacatctgccatgtagaggcattttatttaaaaataatggtattcttgaaaa

SEQ ID NO: 44380 - DNA, 201 bp, Homo sapiens
tgagatttactcagtcttgccttctttgatgagataacttcctttatgttcatcatctgaactttatctttaaaataaatcttctggttctgtggaccatractaataatgttcgattcttttcatctccaaagtagaacataataacatctgccatgtagaggcattttatttaaaaataatggtattcttgaaaaagtt

SEQ ID NO: 44381 - DNA, 201 bp, Homo sapiens
tagccactcttggactgagtcagcctccaggaactgtgtatggcccctactttggcacgaccccttaagtcggcatcacaaccaggtctgatctggttcargataataaattgtttgaagagggaagattatccatgaggctagttgagaaatccaaaacaaaataatgtgattctaagccacactgaatacttgaggctg

SEQ ID NO: 44382 - DNA, 201 bp, Homo sapiens
taaaacctgacttataaacttttaaggatttttacttaggaaccattttcatgatttatgagtaagtacattgtacaatatttataaagtgttacagatakttctgcaatcagagtatctatgacaaaattaattttcccttgattctgtataggttctgtggccatgagcatatattaagggttatcaagggtcatgaac

SEQ ID NO: 44383 - DNA, 201 bp, Homo sapiens
agaccatcctggccaaatggtgaaaccccgtttctattaaaagtacaaaaattagctggtcatggtggcacgtgcctatagtcccagctacttgggaggckgaggaaggaggatctcttcaactcgggaggaggttgtaatgagccaagatggcgccactgcactccagcctggagacagagccagactctgtctcaaaaa

SEQ ID NO: 44384 - DNA, 201 bp, Homo sapiens
catcacaacaaaatcacaggacatttacattgatagagtcaagatatagaacatttctatcatcacaaggatccctcctgtttcctttctttagtcggttscaagcttctttaggcctgtggtcagcttcttcagctccaagtctgggatatatgagggagaataaaaacccaggtaattcaccatcatgctgttccttgg

SEQ ID NO: 44385 - DNA, 201 bp, Homo sapiens
gattttcaagtgctggctactcacacttattcctaaagcagttgaaaaactactctatcatcttaattatctagaagtccagctgaatgaaaacatatttyttcaaaaccttcaaaaggaagaataagatccagcaatattatgtgttctcactaaaatgatgaagacaatgcaataatcatgaagttacaatgttcgctc

SEQ ID NO: 44386 - DNA, 201 bp, Homo sapiens
ttttattggctaagactggaaatatcccaccacttccttcatgttagaatgcagtcatattgccatttctaactgtaaaggagagtgggaagcttatactkcctgtgggcccaggaagaagatggaacagatgtggtgggaagctagctagtttctgtcataatacttttcaatatttattttattttctctgtcacaaga

SEQ ID NO: 44387 - DNA, 201 bp, Homo sapiens
ttcatccagtttcatggatagagaaattagcaaagttatatgatttacctaagaatttaatttccatgaaaaaaagttatagttaaggaaagccaaaaaaraaattgtggaaagggaaagctactaatgaagacacatggactgaaacatcacatctgtcactagccagctggagagttcttttaagtcatttcccctttc

SEQ ID NO: 44388 - DNA, 201 bp, Homo sapiens
aatactgtttttctttggcaaaaagaaacacttctttctttggttgcatattatataaaggaagggtaccaatcccatacagtaaatatctcttctatgayggacctagacacatgttttgttttataaaatatgatagataagttttaagaatgttacccaattgcagcatgacttttaaggatcaaaatacataccttt

SEQ ID NO: 44389 - DNA, 201 bp, Homo sapiens
gactggaaatatcccaccacttccttcatgttagaatgcagtcatattgccatttctaactgtaaaggagagtgggaagcttatacttcctgtgggcccargaagaagatggaacagatgtggtgggaagctagctagtttctgtcataatacttttcaatatttattttattttctctgtcacaagattagaataatcta

SEQ ID NO: 44390 - DNA, 201 bp, Homo sapiens
acatcacaacaaaatcacaggacatttacattgatagagtcaagatatagaacatttctatcatcacaaggatccctcctgtttcctttctttagtcggtwgcaagcttctttaggcctgtggtcagcttcttcagctccaagtctgggatatatgagggagaataaaaacccaggtaattcaccatcatgctgttccttg

SEQ ID NO: 44391 - DNA, 201 bp, Homo sapiens
ccgattgcaactctgttgtggaattggctggtgtttggtgttccccatcatcgtggactcccacagtaaactccacctcttactaccaggaactcttatcygggcatgttgccctcttgggccagcctgtttttaaatggctccacactgaagattctactgcagatattagggttggcttctggaattcatcccctttca

SEQ ID NO: 44392 - DNA, 201 bp, Homo sapiens
cattcatatatatatatatatatatatatatatatatatttgaataaaatgaatgaaatcctgtcattcttggaaacatgggtgagtctggaggggattakgttatgcaaaataagtctagcacagaaagattaatatcacatattctcactcatgtgggagctaaaaacttgaccttatagaagtaaaccgtgaaaactg

SEQ ID NO: 44393 - DNA, 201 bp, Homo sapiens
aatttttttgtatttttagtagagatggggtttcaccgtgttagccaggatggtctcgatttcctgaccttgtgatccacccgcctcagcctcctcaagtkctgggattacaggcatgagccttggcaccgacctgtttttttttttttgagacggagtcttgctctgttgcccaggctggagtgcagtggcgtgatctcg

SEQ ID NO: 44394 - DNA, 201 bp, Homo sapiens
aagaaactcaagtaatatcttttcacttaatagaatttgaataattattttttcaaggcaaaatctttcaaaaagtaaaggaattgtagccaccctgtaartggcttgtgatagagttaagcacagactaggaacaaggacacacttggcaggtttgaaggggcaaatggggccctgggcaggccatttgggttattttca

SEQ ID NO: 44395 - DNA, 201 bp, Homo sapiens
atgagaattctactacctttgccattctctttttgttctctgctttttaaaaatatcagaccttacgagaattcatatacagttgagctgttttacaatawtatggaatgggatggacccataggctcactggacttgcagcaacagaagcctctgtcactttcaaagtgtatgtgaagggcacattacttctgccgtggt

SEQ ID NO: 44396 - DNA, 201 bp, Homo sapiens
attggtgtaatctctctgtacacttactttttgaaatacatcgcaattaattcctttttcttttgggagttcggagatcatagattttggatatttcaacrtctttactgattctatcactgtttaaagaatttaactaagtgacctaaacatgctccttcggacagccaacaacaaataagaatttcttgatttgcttca

SEQ ID NO: 44397 - DNA, 201 bp, Homo sapiens
tacattttcaccagtgtttggtgttatcagtgttttaaattttagtcattctaatagatgggccatgtgttgttttgaattgaaattccttgatgataaayaatgttgaccatgtttttgtgtccttatttgtcatctgtatgtctttggtgaggtgtctgctcgcatcttttgctcattttttaattgagctgttttctt

SEQ ID NO: 44398 - DNA, 201 bp, Homo sapiens
taaattcctgtggaaatcgttacattcatccgttcactcacacattcatctacttatttaacaaatatttattgagttctgtgcactgtccttgatgctgmaactatttttaaaaatcatggtacctgacctcaagcatcataaagcttatcccatcatcatactcctttcatttttggcacctaagaagtgactttaatc

SEQ ID NO: 44399 - DNA, 201 bp, Homo sapiens
ttacttgtttcttcagtcaaaactgatttgatatttacttgctgtgaggataccaataaactaagtgctgaaaaggagagcatgattcaaatctttcagtkgtttaactgtggttgaggatatattaaatagtgggattcttttataaaacaaggcaggaatatgttaaggaacaaaatgaataggggcaaaaaggaatag

SEQ ID NO: 44400 - DNA, 201 bp, Homo sapiens
tgtatgtgtgtgtacacgtgctattgaatccactcaaaagctatagatgatatctactattgttaagttccatttatattggaggcaactgagatatggaragaacaaatacctggcccatgatcacaattttggcaactgctaaaaccggaaaaatgtttgtagtcttatgttactttatcttcaaaaaagttagacttg

SEQ ID NO: 44401 - DNA, 201 bp, Homo sapiens
tgtaatgttctgggaaggtcagtgtccaggcctgcaggtggtaatttgtggtagtagctgctgtgtgggtaggcctaacctcaggtccccgagaggagtgktcatatgtcatcagtggtgaactaaactgggagattccctggcccctggactgtatgctgtggcatggggatgatggggaaacctgggctaggctggctt

SEQ ID NO: 44402 - DNA, 201 bp, Homo sapiens
gtgctattgaatccactcaaaagctatagatgatatctactattgttaagttccatttatattggaggcaactgagatatggaaagaacaaatacctggcycatgatcacaattttggcaactgctaaaaccggaaaaatgtttgtagtcttatgttactttatcttcaaaaaagttagacttgtgtcttgaagagtgagt

SEQ ID NO: 44403 - DNA, 201 bp, Homo sapiens
gaactgagcaggtaagtgggttcttgggtccatgggcagctaatatggcgtaggcaatgcgagtggcagtggtgtgacaaccctctaggtcccttgtggtrcatgctgtcattggaagtaactgtaatgttctgggaaggtcagtgtccaggcctgcaggtggtaatttgtggtagtagctgctgtgtgggtaggcctaac

SEQ ID NO: 44404 - DNA, 201 bp, Homo sapiens
aactgctaaaaccggaaaaatgtttgtagtcttatgttactttatcttcaaaaaagttagacttgtgtcttgaagagtgagttggggttaaagtaattggrttaatcagaaatctttacaaatctatttcagcaacatttacttgaaaaagaagaaataataagttggagcaaagtaacatctctagcttgtgaggaaatg

SEQ ID NO: 44405 - DNA, 201 bp, Homo sapiens
aagtaacatctctagcttgtgaggaaatgaggcagcattttaaatattgctacaacagggtctaaagtttagcacaattttcttctattgctagttcttcyttgagatgttatatcaatggagcaagatttttcttttaagtgtaaatattctagggaacattttcttacctattgtaaaatgcaatttcttgttatattc

SEQ ID NO: 44406 - DNA, 201 bp, Homo sapiens
aggtgaattggtcagtttgaaacttttccatatgatatttattgtcatgttactgttaataactttctcttgctttccaaaataataaaggaataaaagaygttatttcatttttctttgatgaacaaaggttgcactatggtggagaatgtgagggcataattcttctaaggtttatccatgttgtagcatgtatcagta

SEQ ID NO: 44407 - DNA, 201 bp, Homo sapiens
ccaatttttgttccttcaggtggcttactcaaagcccagtagtggcagctgtgaactgagcaggtaagtgggttcttgggtccatgggcagctaatatggygtaggcaatgcgagtggcagtggtgtgacaaccctctaggtcccttgtggtgcatgctgtcattggaagtaactgtaatgttctgggaaggtcagtgtcc

SEQ ID NO: 44408 - DNA, 201 bp, Homo sapiens
ctgaatcatagattttattactattcagtagtacaatgacttcctcccttctaagaacctattaactactcattgttgtagaattgaacctttcgaggggrtatattctttcttaacaggatttggtgaaatataatgataatttaaatctactaaacagattatttttctcactggcactcttatctttatgtttcacac

SEQ ID NO: 44409 - DNA, 201 bp, Homo sapiens
ttgctaacgacgtaaagccaaatttcaatgtagagaattaagaataagaataatacattgcaaggaaattagaaaatggaaaacataaagattaaaattaratttaaaatgacaaaaatttttgaagagcaaataatttatgcaaaatatgttacaaaatctgggatgctaaatagttgacacaagtactgtgtttgacat

SEQ ID NO: 44410 - DNA, 201 bp, Homo sapiens
ccctgcagaatgagccaaataaaccatgagtcaaataaacctcttttctttataaatcacccagcctcaggttatttcctttataacaatgcaaatggacyaacacagggaggcatatacacatacatgtataaatgtatgtatagtaagaaacagatgggtccacttatagcagatgatgagagccatgttgtcaagaag

SEQ ID NO: 44411 - DNA, 201 bp, Homo sapiens
tatggagttgggaatgttggtttgcctggagccagcttccactttaatggtacttccaggctgagccgagggttgacagagaggaaagccattcagctccrgggtcccaacaacaagttggttgaccctgcggccatgagtggaactctcaaaatcatgtcacccaagcgagacttgcccatctatcctatctcctgaccc

SEQ ID NO: 44412 - DNA, 201 bp, Homo sapiens
aagtgagtgaagaagtaataaggaataagtatttttgtttaatggtagtcataaacccaagtattcaaaaaatagaggttttttctcgaaataatttctgwtttgagacagaatggcaaaaactaaaccttagccatttggcagctctctaatttatggggctttccatattgccaagggatgacgacctttatgcttcca

SEQ ID NO: 44413 - DNA, 201 bp, Homo sapiens
agtgagtgaagaagtaataaggaataagtatttttgtttaatggtagtcataaacccaagtattcaaaaaatagaggttttttctcgaaataatttctgtkttgagacagaatggcaaaaactaaaccttagccatttggcagctctctaatttatggggctttccatattgccaagggatgacgacctttatgcttccat

SEQ ID NO: 44414 - DNA, 201 bp, Homo sapiens
ggataggcaggccagtatccaagctttatttgacgggtggatatatgaaagctcataggggttaaataattgtcctcagtcactaacatttatgtacaackttaagatctggcaatgattgagccacactcattgcatttgctccacaacctgtgaaatgaggagggcaggtatgagtattatcatgacctccattttcca

SEQ ID NO: 44415 - DNA, 201 bp, Homo sapiens
aattgttttattattgagtttttatagctctttatatattccagatatatgacacatcatatatataatttgcaaaaattttctattattctgtatattgkctttttactttatagtactctttgataagcaaaattttttagttttcatgaaatgtgatttatctatcttttcttttgctgtttgtgcttttgttgtcat

SEQ ID NO: 44416 - DNA, 201 bp, Homo sapiens
tgcccattttttaatgagtaattgttttattattgagtttttatagctctttatatattccagatatatgacacatcatatatataatttgcaaaaatttyctattattctgtatattgtctttttactttatagtactctttgataagcaaaattttttagttttcatgaaatgtgatttatctatcttttcttttgctg

SEQ ID NO: 44417 - DNA, 201 bp, Homo sapiens
aagttaacccttgtttatatcaattagcctatagtaaattgattttgttacattgttttgcttaaagtcacagttcccaagaaccaatcaaaaatgttaartgaggatttactataatctagagatgatttaaagcgtatgataggatgtgatgtatgtaaatattatgccattttatgttaagaacttgaagatcataga

SEQ ID NO: 44418 - DNA, 201 bp, Homo sapiens
gtgtttacgttaatactgcccctccctctcttcctcaaatcttgaattccttactgttgtgacctgaccatacgatggcaaattctagaaggggctctatmtgtaatttatattgagattattttctgttgacaaacgtgacctggcctctttaagtgctttaaaccagcagttttccaacccccgtcccttgatcttgac

SEQ ID NO: 44419 - DNA, 201 bp, Homo sapiens
atcagaaacataagacaaactttggtaagtaccttaatggaggaaaagatctccaacagttgacaggatcagggaagtctgaactaaggacataggatgtsagttgggtggtgaagatcaggtattattttaacaaggagaaatggagggtgttctacctggaaaaaaccttgggagatgttgtaaaagtgagaaagcata

SEQ ID NO: 44420 - DNA, 201 bp, Homo sapiens
aagtagctgggacttcgggcacacaccaccatgcccggttaatttttgtgtttcttggtagagacagagtttcaccgtgttggccaggctggtctcaaacmcctgacctcaagtgattcacctgccttggcctcccaaagtgctgggattacaggtgtgagccaccacctcctcaggtcttgattctctttctaaacatct

SEQ ID NO: 44421 - DNA, 201 bp, Homo sapiens
gcctcccaaagtgctgggattacaggcgtgagccaccgcgcccggcctctccagactaattctatgctctactcatggtttaggattttcacctcattgtrctctaaagtcttggatttcctattctagatcagatggcttgtattaagtgtggacctgtcacctattgatcctatttaaaaaattaccaagagcctttaa

SEQ ID NO: 44422 - DNA, 201 bp, Homo sapiens
aatctatattcatgatggattacacaacagccatttacagtggcaacttatcattagggatatggaggttgttggggaaatttaagacacccctgatatcmttatggcttttaagaacctttgaggtacatctttcatcctctgcccactgttagctctgaggtctgaaattcccaagccttactcccacaaaaataccag

SEQ ID NO: 44423 - DNA, 201 bp, Homo sapiens
tgagtttatttgagaatttcagcaaggagtctcctgaaacaagtgacaccaagccatttatttcaagtaagggatggttacacatgattcaggaatacacrgcaatagtagcctaacggtatgtcacaatgcctatgtaattcacctcacttcatgtcatcctgtgggcatcgtataaactcaaatcattacaagaagaag

SEQ ID NO: 44424 - DNA, 201 bp, Homo sapiens
atattcatgatggattacacaacagccatttacagtggcaacttatcattagggatatggaggttgttggggaaatttaagacacccctgatatccttatkgcttttaagaacctttgaggtacatctttcatcctctgcccactgttagctctgaggtctgaaattcccaagccttactcccacaaaaataccaggaaat

SEQ ID NO: 44425 - DNA, 201 bp, Homo sapiens
aacattgttctgcataacattttgaaatcttgtgctctcttgctcagtcctgctgagatgtgaatgatcttttcctctagcacatctatgctgtatactayttgcccgttagtcacttagtagccctctcggttatcaggttgactatcacagtattgcagcatttgtgtgtaagtaatccttattttgcttaacatggcc

SEQ ID NO: 44426 - DNA, 201 bp, Homo sapiens
ttacaccactaggttagaaaaagaactgttctccgagggaaatcagtgttattaccaaagggaggaatggattttggatggaaggccagaatatcccctayacttgattttcttattttaatttttagccttttctctatttctcaagtagaagtttaagtcattatttcttgcctctaatgtgtgaagctttctattaaa

SEQ ID NO: 44427 - DNA, 201 bp, Homo sapiens
tattttaatttttagccttttctctatttctcaagtagaagtttaagtcattatttcttgcctctaatgtgtgaagctttctattaaacttcctacgctawcccacacatgttcaggtcattcttttttagactttcacctcagtacatttatcttcgggaaagactgtctattcaaacacatgaaaattaaccaaaatcc

SEQ ID NO: 44428 - DNA, 201 bp, Homo sapiens
ctccatctcttctgcctctgcccccactgagacagcaagacccaccctttctctttctcctcctcctcatcctactcagtgtgaagacaacaaggatgaargccttcatgataatccacttccacttaatgaatagtgtattcgttctgttctcatgctgctaataaagacatatctgagactgggtaatttatgaaggaa

SEQ ID NO: 44429 - DNA, 201 bp, Homo sapiens
tcagctctctgtaaaatgggccaatcaacaggatgtgggtggggtcagataagggaataaaaggaggctgcccgagccagcggtggcaacgtgttggggtytccttccaggctgtggaagccttgttctttgtggaagctttgggtctgctttgggtctgcaccgcctttatgagctgtaacactcactgtgaaggtctgc

SEQ ID NO: 44430 - DNA, 201 bp, Homo sapiens
tttttgctcttgattctgtttgtgtggtgaatcatgtttgttgatttgcaacatgtgcaacaaacgcaaatatgatttgcaacatatgcaagtatttgcartcttgcaacacagcaaatcacaaatcacaacaaatgtgatttcagtattgaatcccaagaataaagcctacttgattgtggtgtattaactttttgatgt

SEQ ID NO: 44431 - DNA, 201 bp, Homo sapiens
taatttcttgaatatcttaagacttgttttgggacctaacatatgatctgtccttgagagtgatccttgtgctgaagaaaagaatgtgtattctgcagccrttgaaatgttctgtaaatttctattaagtccatttgttctatagcacagattaaatattacatttctttgttgattttctgtctggaagatctgtccaat

SEQ ID NO: 44432 - DNA, 201 bp, Homo sapiens
gtgagaacattctttttgcaaatatttattgactatttggctttctaattcggtgacttgcttatatcgttttccaattttccgatttttgttaggttgtmttttgtaattaatttgcttaggtttgttaaaaatatctctgttgcccatgtcttttgaaatattttttaaataatttttcagtcacagaagatttgaaga

SEQ ID NO: 44433 - DNA, 201 bp, Homo sapiens
gatcttgaaaagactgcaggtagggaataggggaaaggctagtaaaggctttctgagtcaggataattatgagagcacaaaagcatagatgagggaactastaggtcagggagcagatggcctaggttctagtggtaagtagtcctacaggctttccctcgtttttatccttgttgttcagggaacataaataatcaccag

SEQ ID NO: 44434 - DNA, 201 bp, Homo sapiens
tggacctttagattgagttccgtttatagtgctgaatgcaatggcaagtgagattgtatggttttggcaggaggagttgaggcagaatggacatagggatrtctgttttttacatagaaagttttaagattatagctggaagggaccttagactagttgtactcaaagtttgacctatggtccagttctggtcagtccatt

SEQ ID NO: 44435 - DNA, 201 bp, Homo sapiens
gaatggccaggatgagggatatatcgatagcatctttgtagcggtgaaaacatagctagccagtaggagtacagagctaattgctggagttctgtagggastcttcagccccttcctccattctctctgttgatcagctgacttgactacaggtcagttctactgaggccaaggctgtttgcctctatatcctaatgctga

SEQ ID NO: 44436 - DNA, 201 bp, Homo sapiens
atttttggactgtctattccattccattggtctttgtgtacgtttttatgccagtaccacactgttttgattactatagctttgtagtatattttgaaatyggagaatgtgatacctctgattgtgttattttggctcaagattgctttggctattcagcatcttttgtgcttgcatatgaattttaggattttttttcta

SEQ ID NO: 44437 - DNA, 201 bp, Homo sapiens
agcgatgtggtttttatagtctatattgttcttttaataatgaaaataaatttaatgccctaatatttttggacatcaagacagatcaaaagaaggcattyggtaaggcagtgaaattattaagtaaacaattcagactgaagcataatcttggtatacaatcaagataataagacattgcttcactagcatcaagagcaa

SEQ ID NO: 44438 - DNA, 201 bp, Homo sapiens
tcagggacgtatattttacagtgtaagtgctctcacatgcatattatcttattatcatctttccaaactctccttgtgataagtattattcactctgtaamgtgatccaagcttctgcgtaaatgattagctcaggtcttgttaacttactggggagtaggtgagccaagattgtattcagctcttttaatgctaaatgct

SEQ ID NO: 44439 - DNA, 201 bp, Homo sapiens
aaagtggcgcaaaaatagtcatgaagtaggcagcaggcagcaacctcagggacgtatattttacagtgtaagtgctctcacatgcatattatcttattatsatctttccaaactctccttgtgataagtattattcactctgtaaagtgatccaagcttctgcgtaaatgattagctcaggtcttgttaacttactgggga

SEQ ID NO: 44440 - DNA, 201 bp, Homo sapiens
taacttcactttcttttgtcaaagaaatggatttagcagtgaaagtcgctgggcgtggtggctcacgcctgtaatcctagcactttgggaggccaaggtgkgtggatcacctgaggtcaggagttcgaggccagcctgaccaacatggagaaaccccatctctactaaaaataaaaaaattagccgggtgtggtggcacat

SEQ ID NO: 44441 - DNA, 201 bp, Homo sapiens
ccctttgttgcccagtgaagtggtgtgatcatagctccctgcagccttgaactcctgggctcatgcaatcctcctgccttagtggccaagtagctggcacwacaggcatgagccgccgctaacggctgattttttatttatttatttaatttaatttaatttaatttaatttaatttaatttaatttaatttatttttgta

SEQ ID NO: 44442 - DNA, 201 bp, Homo sapiens
aggtttaattgactcacagttccacattgctggagaggcctcaggaaacttacaatcatggcagaacacaaaggggaggcaggcaacttcttcacagggcrgcaggacagagttgagtgctgcgaaagtggggaagagccccttataaaaccattagatctcctgagaacgaactcactatcacaagaacagcatggggga

SEQ ID NO: 44443 - DNA, 201 bp, Homo sapiens
atatgcgttgctactattatttctctggaacatttttactgacttctaatgtattatcatgatggtcagaaaatgtgggttgtataatcttgattcttcawattgagatttgctttgctttctggcttagtgggtggtcaatagtgtaaatgtctcatgaatgctttaatcagaatatattttctattgaatatatctaat

SEQ ID NO: 44444 - DNA, 201 bp, Homo sapiens
cttgcagttaattgaggtcagcctggattagaagttctatgtgttgagaatccctgtttcagttactctggtagagataactgagtgatcaaaagctgttygctcacatctgtgctcatatgctgaaacttgaaacctggcatatttgatttatggtagcaacgtggccctgagataagaattgtataaacataaggtaaa

SEQ ID NO: 44445 - DNA, 201 bp, Homo sapiens
tttctttgccttaacaacccagctatatgcagatggatctcaaatacacatctcccatctgtaatgatttttctcctgaatttccaacctgtgtataaacyactatgtaatatatatacccaaaaatcagcatatctaaaggagaacttctgtcctcatctaattccgctgccacgcctgtacttttttctccattacctc

SEQ ID NO: 44446 - DNA, 201 bp, Homo sapiens
ggcttttgtaaaagttcttctggtgatgctaatgagctgtcagggtttaaaacctctggttgagagctgttaggccaatggaggatacataaaagcagggycaatgggatggaaacatggaagttaacagacagggaggaatcatatcaaagataatattctttcaaactttgtagtgttaggtgctccaaatttttatag

SEQ ID NO: 44447 - DNA, 201 bp, Homo sapiens
ttttctcaatcttgcctggcaatttagagtataccttaataacataatgtattttcatctctctttcacctttaaaagtatgtggttttagcagattaccracaaaagatgtctgtatttccatacagacatgtctttattgacagtcttctactccctaccccttccacttgccccaaaaaaggtcagcactattataat

SEQ ID NO: 44448 - DNA, 201 bp, Homo sapiens
tgcctggcaatttagagtataccttaataacataatgtattttcatctctctttcacctttaaaagtatgtggttttagcagattaccaacaaaagatgtmtgtatttccatacagacatgtctttattgacagtcttctactccctaccccttccacttgccccaaaaaaggtcagcactattataataaaattgacact

SEQ ID NO: 44449 - DNA, 201 bp, Homo sapiens
ttcaaaactatcttaaatactcactgtaactcataatatttaactggagaagcaattataattgatttctttttctatggttcaactaatgtaccatagcmtttgaggcttttccctcatgaatttgtggctcccaaaacagtgatttcaggtacacttactgcattatagcaaaatattctattcaatttactaaacgta

SEQ ID NO: 44450 - DNA, 201 bp, Homo sapiens
ttggtaacatcaatttaattattgtttaatagttcactatgtgaatgtagtgatttacttcactatttttcttaaagaatttaggtattctttagtttttmcactgtaaacaatggcaaggatttattttttaaaattatttcatgcgtaacattttcttctgtagttaagataatttccttaggataaattttcacagta

SEQ ID NO: 44451 - DNA, 201 bp, Homo sapiens
cagaaggcagtgggcattgaacaaataaccacagggattgccatggtagaaatagtcatcttatgtaggattatgagtttaagagttcaagataatttgamacaataaagtagagtgatgatcagcatattcttcttaattatatgaattgccacttgaaagcatgaattagaaaaaaggtaacattttaaagtagtatct

SEQ ID NO: 44452 - DNA, 201 bp, Homo sapiens
ttaagagtaggaggactatagaggtgggagccaagtagcattgcttgaaaatgaaatataaaggatttggacaagagatttggcagagcaaaccaagagamagtaatacactcttctcaccaaaaataaattttatggagaactatcaatggaagtctttttcctttatcagttaattcttggtaattccctcaattgatg

SEQ ID NO: 44453 - DNA, 201 bp, Homo sapiens
cagagttattatgaagactcctggagagaaagcagaatggaataaatgggaagagcacaggctttggagtttagagagagctggtgagaatgccatctctstctcccaccagctgtaggatatggggcaagttattttacctctctaagcttcatcttcaaaatgagactaataatagtcccttgaccagcattgtcaaga

SEQ ID NO: 44454 - DNA, 201 bp, Homo sapiens
acagtgagaccctgtctctacaaatgtttttttttttttaaattagcctggcatgtggtatatgcctgcagtcctaggtagttgggaggctgaggtgggargatcccttgaacccaggagtttgaggcttcagtgagccactccactccatcatgggagacagattgagacactgtctttaaaataaataaataaataaat

SEQ ID NO: 44455 - DNA, 201 bp, Homo sapiens
tctcattctatccaccatattctttattcagatttatgtatttccaggcctttgtttcactgtactgtaatccagataatttctgcagataacttttccarttcactaatcttttcttcagttgtgtatgatatgatgattcatccatttgttaactttttttaaacatatatatttcttcaattttagatatttggtaga

SEQ ID NO: 44456 - DNA, 201 bp, Homo sapiens
attacttgaggccaggaatttgaggccagtttgggcaacacagtgagaccctgtctctacaaatgtttttttttttttaaattagcctggcatgtggtatrtgcctgcagtcctaggtagttgggaggctgaggtgggaagatcccttgaacccaggagtttgaggcttcagtgagccactccactccatcatgggagaca

SEQ ID NO: 44457 - DNA, 201 bp, Homo sapiens
accatattctttattcagatttatgtatttccaggcctttgtttcactgtactgtaatccagataatttctgcagataacttttccaattcactaatcttytcttcagttgtgtatgatatgatgattcatccatttgttaactttttttaaacatatatatttcttcaattttagatatttggtagattcttgctgtctg

SEQ ID NO: 44458 - DNA, 201 bp, Homo sapiens
agcaggtattactccatcccttaacactgtaagcagggaatcactggagctgctagcatttatacattgtatgaaggataccacagttctaaagactgctratagagattctaaagactttggtgaggcatggtagctcacatctgtaatcccagtactttgggaggccaaggcaggaggattacttgaggccaggaattt

SEQ ID NO: 44459 - DNA, 201 bp, Homo sapiens
agatttatgtatttccaggcctttgtttcactgtactgtaatccagataatttctgcagataacttttccaattcactaatcttttcttcagttgtgtatratatgatgattcatccatttgttaactttttttaaacatatatatttcttcaattttagatatttggtagattcttgctgtctgcttttttttttaagat

SEQ ID NO: 44460 - DNA, 201 bp, Homo sapiens
tgaataacttttaggctataatacaagacagtcatgcaaataagcatatgtgctcatgaatgtttgtgattaatttgtttaaattctctttacataacagrctaggatttgtggtgctacatgccacacaagttgtgcaggtctccaataaaccaaaataaaataaaaaaagcaggtattactccatcccttaacactgta

SEQ ID NO: 44461 - DNA, 201 bp, Homo sapiens
taatttcattgatgtgtttccttctagtctttttttttctagatggctttaaaaataattgcaataatagtatagataaaatttggaaccttgctttttcrtttaaccatataccaaaacattttccacagaatattacctattctacagtggtgttattttaaatttgtgtaacatttgttcaagtgaatgaatataatt

SEQ ID NO: 44462 - DNA, 201 bp, Homo sapiens
tgataatacacataaaatgcttagaacacatcctggcacatagaaaagttgcataaatattagccatgatttttatggttttgcatatcttattaaattcycaattgtctcaggctatgttgatgaaagacacagtatttctacacctttaagacatgaataacttttaggctataatacaagacagtcatgcaaataagc

SEQ ID NO: 44463 - DNA, 201 bp, Homo sapiens
ccggagtccatcctttcaaccttatgtttttctatcatctgtaacatcacctattatattacataagaaagggtgaacaaataagcaaactcaacatcacmcacacatcaattatgtgtgacagactgaacatggattagcagaatcttcttttaatttctgagacatgtaagaggcagaatattttaggatgtatagctg

SEQ ID NO: 44464 - DNA, 201 bp, Homo sapiens
catagatcacactgttaacaccagctgtgtcactattagtggggttatttttatttaccatagctagcatagtttgggagctcaccacgtcccaagcattrtacatgtattattttcttttacatatgttatttcattttctccttacagctatttaatgaggcaggtgtcaatatctccatttatagaaggggagactga

SEQ ID NO: 44465 - DNA, 201 bp, Homo sapiens
tctttccatttagagaacttctgatggttctgctttattgactcttcttaatctactaattctctttaggaatttatatgattcaatatcctaaactagartggtttatttatctagtattggacaaagaggaaaaagtttcaagtgctgatagttaccaaacttccaaatccctgtgagcccattagagttaccagaaaa

SEQ ID NO: 44466 - DNA, 201 bp, Homo sapiens
ctttattttcaggaataatttttttatgtaacctgatattaacaaggaaataggtagtatttataacttctttccatttagagaacttctgatggttctgytttattgactcttcttaatctactaattctctttaggaatttatatgattcaatatcctaaactagaatggtttatttatctagtattggacaaagagga

SEQ ID NO: 44467 - DNA, 201 bp, Homo sapiens
cagccaacagattaactcttcttgaattgggtacctgcctatgacctaaatagtgttgaagtgggagaaaataataccaaacctgccctcctgtggctgtyctctcagtgtgggctgcgagcagaatagtttctcttagggacagtttgtaagtatagcatttatggtaattaacatgtttagtataccaagaagcaaaga

SEQ ID NO: 44468 - DNA, 201 bp, Homo sapiens
atgaggaaacacattatcatcagtgtaaataaaacctgaaaatattcctccttgaccagaattcccagtcaataactaaatctatattcatgatggattayacaacagccatttacagtggcaacttatcattagggatatggaggttgttggggaaatttaagacacccctgatatccttatggcttttaagaacctttg

SEQ ID NO: 44469 - DNA, 201 bp, Homo sapiens
catttccttcaatacctttctcttggtagaaaggtgaggaaatggtttccagaaatatttactgaattgaatgaaatcatttacacagaagagaagatttmacaagtccatgatgggaatattatagttatgtttggtaggataactacatttgaagagcattaacaaagagatatatttgaaagtttgtcttttagttgt

SEQ ID NO: 44470 - DNA, 201 bp, Homo sapiens
tttagaacctttgatggggcagtttgggacaatgccacagactggaagaatgggatctgttagcataagaaatacaaatatttatgataatgctgtctttmttgatcaccatgtgctctctgctgtggtgttttgcactgtgagacttggggaaatattatttggattagaataatttctatttgtgaagcccatttcgtt

SEQ ID NO: 44471 - DNA, 201 bp, Homo sapiens
aaatcaatatgtatttccagcaaagcaaaggggagtaataagactttttggctatagttgcagatgggaaattatagtgaagtctttatatgaaaaacagkcactctttaaacatatatctcagagtagtaaataccaagtcttgcttcttcatgtcacaatcaaattattaaaaacagaagtttatactcactgtcttta

SEQ ID NO: 44472 - DNA, 201 bp, Homo sapiens
ccagagttctttctcatgcagaactttcacttggtcatcattaactcatcaaaagggagaaaaagcttttcaactatgaacttttaatgcaatgtattatsgtagtttaatggcaagatttagtaaaatggctaagcaatcttttaatttggacgtagatttggaaatggaataaatagagatctccagccagttaataat

SEQ ID NO: 44473 - DNA, 201 bp, Homo sapiens
aaattagctggctgtagtggggcatgcctgtagtcccagctatttgggtggctgaggcaggagaatcacttgaacccctgaggcagaggttgcagtgagcygagatggtgccactgcactccagcctgggagagagagtgagactccatctcaaaaaaaaaaaaattgtaggatagactacaatgtgtataacttcactcc

SEQ ID NO: 44474 - DNA, 201 bp, Homo sapiens
atttaaacagcagcaattttcctagaggtgaatcacataatgatttttccaatctcttttatgtgagatatcactgcaaaaagtatgattagatttaatcyagttgtcttgcacaaaaataatatgtagaaaataccaaccaaggtgactctctatgtgcttaatagcctaaagatttaggttaaggatataacagagagc

SEQ ID NO: 44475 - DNA, 201 bp, Homo sapiens
gttactatcaggaatagaaaaaaaattgagatatatttgccaatatcaggattctaacagtatcataagggggatgcacataaataaaatgattatattgraaaacactcaaaatgctgttggaaaaaggaaaagtgagactttacttttgagcagggttgttggaagaactccctgtagaaaccagtgaggagtagatag

SEQ ID NO: 44476 - DNA, 201 bp, Homo sapiens
agaataacatcaaaagtcccccaaaccaactgttgtatttttattatgatggttttatatttataaattatcttaagaagaattgacatatttatgatgtygtgtttttctagctgatgtaatttcattttctgaagtcttcttttgtgttttcagttgtgttgttaggttttcttcctatagatcttacatactttctat

SEQ ID NO: 44477 - DNA, 201 bp, Homo sapiens
tctctagaatgacaccttcctggaaaacagtaggcctctaatcaaactatgttgtgttttgaattaaattgctcatttatagtctagtcaactctatttgrtaagtcctatgtaagttactatcaggaatagaaaaaaaattgagatatatttgccaatatcaggattctaacagtatcataagggggatgcacataaata

SEQ ID NO: 44478 - DNA, 201 bp, Homo sapiens
ggaggcataggttgcagtgagccgagatggcactactgcactctagcctgggcaacagaacaaaacatttggaaagaaagaaagagaaagaaaagaaagaaggaaggaaggaaggagtccataacaagaaaagtaagagacaagaaatgaaaagagaggtatttatactagcagagttcttgagttgtaatcatattgcag

SEQ ID NO: 44479 - DNA, 201 bp, Homo sapiens
tgcaataaaagtaacatattattctacaattcttccttttagagaacatggccctttcatagaattttaaagttagaaaggaatatagaaacaatttaggrcaaatattcattttatgggtttggaaattaaggcccagaaacgtaatgggatctgccaaaaccttatccagtcttctatttctctatttatttaacaaat

SEQ ID NO: 44480 - DNA, 201 bp, Homo sapiens
caatggctgtttatgcaagaaattgtgcaataaaagtaacatattattctacaattcttccttttagagaacatggccctttcatagaattttaaagttaraaaggaatatagaaacaatttagggcaaatattcattttatgggtttggaaattaaggcccagaaacgtaatgggatctgccaaaaccttatccagtctt

SEQ ID NO: 44481 - DNA, 201 bp, Homo sapiens
catctcttagtgtttgaggcttcataatttatagggtgagcatcatggccttcctatttcaaacgtctccttttattttcagcttcgtattacacacacatgttttgacatattttcaatggctgtttatgcaagaaattgtgcaataaaagtaacatattattctacaattcttccttttagagaacatggccctttcat

SEQ ID NO: 44482 - DNA, 201 bp, Homo sapiens
aattccattctactgaagtccacttcatgggggcaggatgtgtttttagtattagcatctttggggtgaattatgatgttgttgaaggcatttaattcaaygagtactcatttttattgtgtcactttttaccaatactgctaaagtaacagaacattctattcctctaatttgcctgagcaatatatcgtagtcattagc

SEQ ID NO: 44483 - DNA, 201 bp, Homo sapiens
cagcttcacagctattagcacttggttactgcattataccttatgtcagtggttctcaaacattggtgcacattagaatcacctggatgagtttattacamtacagatggttaggcctcactcccaggatttctaatttaataggtctcgggtgaggtccaaaatttgcatttctgacaggttcccaggtgatgttggtgc

SEQ ID NO: 44484 - DNA, 201 bp, Homo sapiens
cctgtttagaggggggattgagagatgaagccggctgggcttctgggttgggtggggacttggagaattttctgtctagctaaaggttgtaaacgcatcartcagcactctgtgtctagctaaaggtttgtaaacgcaccagtcagcactctgtaaaaacgcacaaatcagtgctctgtgtctggctaaagatgtgtaaat

SEQ ID NO: 44485 - DNA, 201 bp, Homo sapiens
tggtaacagcttcacagctattagcacttggttactgcattataccttatgtcagtggttctcaaacattggtgcacattagaatcacctggatgagtttrttacaatacagatggttaggcctcactcccaggatttctaatttaataggtctcgggtgaggtccaaaatttgcatttctgacaggttcccaggtgatgt

SEQ ID NO: 44486 - DNA, 201 bp, Homo sapiens
ataactataactacctgcttattttttgtttccctttgaaggcagaggacaattttcctttttcctttgagtcaatagcaactagcataacgtcagacacrtagcagataccaagtaatgattgggtgagattggttagctgatccttccaacacctcaaaagatacaccttttattttatttagtagaaaaaaaaccaaa

SEQ ID NO: 44487 - DNA, 201 bp, Homo sapiens
tcatagacaaaaatattagaagcaataacaacaagtggaataaatgtgactgaaaaccaagttagaaatatggagaaaagctttgaaaaaaatcccataawatttagttcaaatgcacaaaaacacaacatttattatgggaagatgaaagatgtggaaaagaaaaaaaagggatccaatataaatataatttgtattctt

SEQ ID NO: 44488 - DNA, 201 bp, Homo sapiens
ttttgaaacttcctctgtaaaacttctttccaactcttgttcctgaggtttatggtcctggttttattaattaaggttcctggatgtcatctttagctacrtgttaccatttaaggatgtcaggcagtgtgtacctgagagttttctttgattaataaagagctcttcttcaatcacctatcttgcaacttgcataacttt

SEQ ID NO: 44489 - DNA, 201 bp, Homo sapiens
aagcaaaggttgaaatgttaaactttttgagatgagtcataattgtaatggtgctatttatcttcaaagtttttcacaaaatgaagtaacatcctctcagyagtcacaattatatgagcacctttcaaagatgttggaattaaggttaagaggttaaaaagtcacttcagaccaagagtagaagtaaactttttgagaatt

SEQ ID NO: 44490 - DNA, 201 bp, Homo sapiens
atactctcaggagtataattctgctccttttggccggcaatggtatgattaataagggtagaatttcatttttttgttctatttgggatttctgaaatagycttggattaatttagaactacttattataattgtggtatattgatcaatagtaagttgaccctgtttgctgctgttttcatcacagttcctgttctgcaa

SEQ ID NO: 44491 - DNA, 201 bp, Homo sapiens
gcctgggagagagagtgagactccatctcaaaaaaaaaaaaattgtaggatagactacaatgtgtataacttcactcctcttgtataaagatgtgtgggcygagtgcagtggctcacgcctgtaatcccaacactttgggaggctgaggtggacagatcatgaggtcaaaagatcaagaccatctcaggtcatgaggtcaa

SEQ ID NO: 44492 - DNA, 201 bp, Homo sapiens
tgtaagtatagcatttatggtaattaacatgtttagtataccaagaagcaaagatgaataatacatagtccctcctataatggagctcattacccaggaakagacatgtgtacgagcaatcatgcaatagaataactactatttatttatatggacaaaatattttttaaacacaaaggagaaaattcaatttgctgggta

SEQ ID NO: 44493 - DNA, 201 bp, Homo sapiens
aaaaaaaaaaaaattgtaggatagactacaatgtgtataacttcactcctcttgtataaagatgtgtgggccgagtgcagtggctcacgcctgtaatcccwacactttgggaggctgaggtggacagatcatgaggtcaaaagatcaagaccatctcaggtcatgaggtcaaaagatcgagaccatctcctgatcgaggca

SEQ ID NO: 44494 - DNA, 201 bp, Homo sapiens
ttatattcataacttcatatctccactgagggttttacaccagtactttaaaagtatactttgctgtgaaggcataatttcagtacaaccacatgtgtacrtagctgtccaattgcaagaacaatgaaacaccagggaccagagccactgcagtatacacgaaggtacattgtaagttaataggttaataaaactctaaaa

SEQ ID NO: 44495 - DNA, 201 bp, Homo sapiens
tagaccgaacgctcaagaaagggagagcaggaggcctagaatatgtaaattgtttgatatttgacaaatcagttactgtgtgtggtgtgatatgcaaattrggaataatgctttcctcttatctgcattgcagattcttcagggcatgttctacatgcattctgcatgcactatgtgcaacacagcagaaaagtttagtgc

SEQ ID NO: 44496 - DNA, 201 bp, Homo sapiens
atgtgttttatgaaaaaattatgcatagaattcaacatttttgcacaaaaataaacttgtgctaacttgtgataacgtgcgtggacaggatctagtttgaygggttaaaaatcagagacatcagtttgaaaagagccctatattagtctgttctaatgctgctaataaagacagaactgagactgggtaatccataaagga

SEQ ID NO: 44497 - DNA, 201 bp, Homo sapiens
tgatatgcaaattgggaataatgctttcctcttatctgcattgcagattcttcagggcatgttctacatgcattctgcatgcactatgtgcaacacagcakaaaagtttagtgcaagaaatccgggcaatggaaatcagaggaaggaaatgtatattagctttatatctttatgtgaaatttgtgcatgcctagccacagt

SEQ ID NO: 44498 - DNA, 201 bp, Homo sapiens
tttatatctttatgtgaaatttgtgcatgcctagccacagtcaatgaattggtgagatcagcatctactaacttacaaatggatactgcattaaataatamatttaaagataagttatgaataatacatccctcagttctgaacacatttagggatttctaaatgtgaaacacagcatatgctaagactaatgcttagaat

SEQ ID NO: 44499 - DNA, 201 bp, Homo sapiens
taaaggtagaagaactggatttggtagataagtggtcagacaagaagcacacatgtttctgcctcttttctccttgtgacaggctggtttaaatataatgmagtaacactcttactttccctccgactcctttccttaatgtttttctttcacacttagcactatcctttcattgttctctcttgtttttgatctttcctt

SEQ ID NO: 44500 - DNA, 201 bp, Homo sapiens
tcatctcttagtgtttgaggcttcataatttatagggtgagcatcatggccttcctatttcaaacgtctccttttattttcagcttcgtattacacacacatgttttgacatattttcaatggctgtttatgcaagaaattgtgcaataaaagtaacatattattctacaattcttccttttagagaacatggccctttca

SEQ ID NO: 44501 - DNA, 201 bp, Homo sapiens
taaactcatctctggataagcagaagcaaggaatcagatacaggcagtgctcctggaccctgaatatatgttccaaacatattgcaaacattagactattycttttctaccctctgtaccctctttctaaattggtaattatttcttctttacctactaatgtacctcttcttctttaagtcatcaatgtaaaaggaaggc

SEQ ID NO: 44502 - DNA, 201 bp, Homo sapiens
cctctgtaccctctttctaaattggtaattatttcttctttacctactaatgtacctcttcttctttaagtcatcaatgtaaaaggaaggcagtgcccaarttttctttggacccttaattcctatctactcacccaaaaagtcctgttgaaagcttcgattatgggccatgcattcagggcaagatatcctgccaggctc

SEQ ID NO: 44503 - DNA, 201 bp, Homo sapiens
aggtgtcttcctgatacgccattcagtacagtggtattctagaaggagagatttcatttttctttcttatacttgtctgtttgtgtgtctttcatgcctgwaaaatgtagactagaatctgtgcctgtgctatgtgctaagcataaactatttttcaagcaatttctttagagaagaactaagtttaagggtatcatattt

SEQ ID NO: 44504 - DNA, 201 bp, Homo sapiens
gcaaaatatctattatgttactttatccttataacatccctaagagttcttttaaaaaaaggtgcaagtcattaaaaacaaaagttatcttagcttttgtrttcatttcacaaacttaatataacatgagctgtgtcaatcagaataagacaaatcctgtctctgagacagagggatagctatcacttcttataatgagca

SEQ ID NO: 44505 - DNA, 201 bp, Homo sapiens
tggttaacaattcttcatttattcattttacccacatccattaattgagtttcaggtgttgtagtagatacaaatgacagatttaagaagtgtcagtgtaraagatgaggcagagtataaataaaagataacaaaagtctcacagatatagtggaaatatatgaagagattaatgaaagaacaaatgagatgatttgtaac

SEQ ID NO: 44506 - DNA, 201 bp, Homo sapiens
acattcaagcactagttggttcacattctaacactagctcatcacatctcagaaaatctattctgacaagtttgattttcttcagtactatttgctctggmagaacatgatcaggaaccatttttggctgaattccctagttctcagtgagacaactgacataccttggcatctctatggaccaaataacactaatcttat

SEQ ID NO: 44507 - DNA, 201 bp, Homo sapiens
tgtattaataatatagcttgaatattacttattagaagtatggttaacaattcttcatttattcattttacccacatccattaattgagtttcaggtgttrtagtagatacaaatgacagatttaagaagtgtcagtgtaaaagatgaggcagagtataaataaaagataacaaaagtctcacagatatagtggaaatata

SEQ ID NO: 44508 - DNA, 201 bp, Homo sapiens
ggtgaatatcggttaaaattctgtattctggcgtgagtatctttggtctgagaacacaggcaacaagctggagtgtagtgttctcagtacttaattagttrtttactagactagataccaacagagaactctaatgccacacactgttagagttcagaggaaccctaaagatcatttagtgtaatggcctccttttatgca

SEQ ID NO: 44509 - DNA, 201 bp, Homo sapiens
ttaaaagcgggaaaataatttatttggtctatgtgtgtaatgctatgtcattgcttattagactctggtagtggttctgaatattgtagacaaagtcgttgccatatgagctcacaggagctcacagtgtgatcgacagcataaaatattgcatttctccacgttcgtacagacgcttttatattagcatcacagctgctt

SEQ ID NO: 44510 - DNA, 201 bp, Homo sapiens
gaaaatatttatgttaatcagcaaagaatacatccattgtattcttattttatggtgttaaaaataaacatgtctgcaagacacagattacagttcactgkgaaagtgaaaacaataaccagaatcgtggaagtctatctgttctaagtttcatagactttccatagccatatgtaaaggctatggaaatactttgacagt

SEQ ID NO: 44511 - DNA, 201 bp, Homo sapiens
gtgctaatttaggaaagaaatgatagaaaatatttatgttaatcagcaaagaatacatccattgtattcttattttatggtgttaaaaataaacatgtctkcaagacacagattacagttcactgtgaaagtgaaaacaataaccagaatcgtggaagtctatctgttctaagtttcatagactttccatagccatatgta

SEQ ID NO: 44512 - DNA, 201 bp, Homo sapiens
cagagccaagtagtggtttttgattatttcttttgaaaatcattatcttggtctggcacagaaatgaggaatgccctatatgtatttagttaaagctaaarttttttaatgaaataaagaagaatggaaattttcaaatattagatggagattttcaaatattagaatctggcaatggaagaaaaaagggagagactatct

SEQ ID NO: 44513 - DNA, 201 bp, Homo sapiens
caaaaaaacaaggtgaccccagaccagctgtctttagcataaggcccatatctggaccatgaaaaatgctcaaatgttggaattcattcacatctttttckgcttattcatcagcaagtagccgacctcctttcactagttagatttcttgggagagagttcacaagtgtccactgaatctcagctgccagggactttgct

SEQ ID NO: 44514 - DNA, 201 bp, Homo sapiens
tagctttattctgcctaagacacttcacgtaagttcctctggagcttgtttgggtaaatagaaacatctatttagttgctcctttaatatctacttttggwggcaattttttttaaaggaaggatacatttgcaggctaacagttcttggtacagaacaatgttgcactgacattttcagaatactctcaggagtataatt

SEQ ID NO: 44515 - DNA, 201 bp, Homo sapiens
cttgttttatttatggaagtaggagggaattacttaggggtagtaatttaaggctatttcagttggcatttaattgggtttagatgtcggaagatgcatasagctagatacttaaatagagggtttacagtggtaaaatagactaggagaacaatcttatgaactttgcaatatgctttcctacttaaatatcttccaagg

SEQ ID NO: 44516 - DNA, 201 bp, Homo sapiens
ttaccctcatgctgttcttgtgccagtccgtgacttcttacaagattgatggttttataaggggcttttcccctgctttgctttcacttctctctcctgtsaccatgtgaagaaggatgtgtttgctttgccttctgccatgattgtaagtttcctgaggccttcccagccatgtgaaactgtgagtcaatttaatttctt

SEQ ID NO: 44517 - DNA, 201 bp, Homo sapiens
cagcctttttggtgttctctttcttctatacacttaaatatatgtctgtgagtgtgctttactaaacattcaatttttaaaatcaactttattgaggtatratttgaatacaataaaatgcacccattttaatggttgattgagttttgagaaatgtagccattcaggtaaccacaaccataattgaaatataagatttct

SEQ ID NO: 44518 - DNA, 201 bp, Homo sapiens
cctataaactacagagtatttcctcatgaatgattagttttttcaatgtattgtttttaatcacagaggtcttgctactttattttattttagtttagttyagcaagatggagtcttgctctgtcgctgaggctggagtgcagtggtgaaatcttggcttattgcaacctctgcctactgggttcaagcgattctcctgtc

SEQ ID NO: 44519 - DNA, 201 bp, Homo sapiens
tgtcacagaatcaatggctatcgtcctcagacttctaaggctggtctttgctatgtgcatgtccagtctcctcttctcccccttattatttccagcgagaytgactatttatgattcccttgatgcactgaactattttgtttttgttggcttattttcctccctctgtgtagaattttctcaatatggtgatcactcagc

SEQ ID NO: 44520 - DNA, 201 bp, Homo sapiens
ataaactacagagtatttcctcatgaatgattagttttttcaatgtattgtttttaatcacagaggtcttgctactttattttattttagtttagtttagyaagatggagtcttgctctgtcgctgaggctggagtgcagtggtgaaatcttggcttattgcaacctctgcctactgggttcaagcgattctcctgtctca

SEQ ID NO: 44521 - DNA, 201 bp, Homo sapiens
agagaggttgggctgaagatacatacttgaggtagacagaataaagatggcaattatgacatggaattggatgatagtacagatggagaaaagaaaaggtctgaggactgggcactgtgtgtgtactccagcagttagatgtcagaagaatgaggaggaatagcaagggaatctgagaaggaacttcattaagctggtaag

SEQ ID NO: 44522 - DNA, 201 bp, Homo sapiens
aacctactcatatgctccctttgagtacccagcatgaaatttagttctgtgagcattttgtctacaagtgggcatctttcatgccaaaataaatatattgrccaatatttcttgctaccagaaaagattaaatattttaaaatgtaggcttgcacccaagctgctggttatctctattgtagtattgctgacatgagaggg

SEQ ID NO: 44523 - DNA, 201 bp, Homo sapiens
ctactatgcccccataacagaacctactcatatgctccctttgagtacccagcatgaaatttagttctgtgagcattttgtctacaagtgggcatctttcwtgccaaaataaatatattgaccaatatttcttgctaccagaaaagattaaatattttaaaatgtaggcttgcacccaagctgctggttatctctattgta

SEQ ID NO: 44524 - DNA, 201 bp, Homo sapiens
aacactaactaaaaatggataaagacctaaataaatatacaaacctataacatttctaaaaggtaggagaaaaatctaggtaaacagctttggcaaagacrttttaggtacaacaccaaagccacgatccatgaaagaaagcattgataagctggactttattaaaatgtaagctttctgctctgtgaaagacactttcaa

SEQ ID NO: 44525 - DNA, 201 bp, Homo sapiens
taattaaaaacagcagaaatgtttccttccaatctcaattctcttcttttaattcactgactaagggtctgcttttgtaatctcccccaaattctgtaatrtgcccagacttactatagaaagtaattaagacctgtatgatttgcactaaggctataatcaacgtgtagcccagtgtcttgcacacatttattcatttca

SEQ ID NO: 44526 - DNA, 201 bp, Homo sapiens
taaactacagagtatttcctcatgaatgattagttttttcaatgtattgtttttaatcacagaggtcttgctactttattttattttagtttagtttagcragatggagtcttgctctgtcgctgaggctggagtgcagtggtgaaatcttggcttattgcaacctctgcctactgggttcaagcgattctcctgtctcag

SEQ ID NO: 44527 - DNA, 201 bp, Homo sapiens
acttataccttgatttcaactgggctgattttccacagcttagacctattgtaggtaggaaaccagcagttgaaagagaacttaattgctttttattattkttctccccttttctggggtagaagcaagaggaggaaggagagctgaagggaacataaaagttatttctagctctcaggtttctgaaggctgacttttccc

SEQ ID NO: 44528 - DNA, 201 bp, Homo sapiens
gaatataactgtcaaaacttataccttgatttcaactgggctgattttccacagcttagacctattgtaggtaggaaaccagcagttgaaagagaacttarttgctttttattattgttctccccttttctggggtagaagcaagaggaggaaggagagctgaagggaacataaaagttatttctagctctcaggtttctg

SEQ ID NO: 44529 - DNA, 201 bp, Homo sapiens
atggccaaacttttctagttaccttcagtcttttgtgccagtccctctcttctaatcaataactagaatataactgtcaaaacttataccttgatttcaaytgggctgattttccacagcttagacctattgtaggtaggaaaccagcagttgaaagagaacttaattgctttttattattgttctccccttttctggggt

SEQ ID NO: 44530 - DNA, 201 bp, Homo sapiens
acatttagtacatagtgatcagatctgatcgagacatcaacacatctgtttctacacgccatcttacagaagaggaaactgagacccacagaaactgtgtratttgcttaagttcacacatctaggaagtggaaaagttaggagtaggaatcgcctctcctctgactcactaagtagaggttttaattttttctccacatc

SEQ ID NO: 44531 - DNA, 201 bp, Homo sapiens
aggttgcagtgagccgagatcgcaccactgcactccagcctcagcgagaagagtgagacttaaaaaacaacaacaaaacaaacaaataaacaaaaaaaagrtttagtaagcagataaatagagcaaaaatatgttttatttataaaatggcaggagaaaaatatttgttcatgtacttgtaacacttgtaacaatgcactt

SEQ ID NO: 44532 - DNA, 201 bp, Homo sapiens
ttacagatgtgcaccaccacgcctggtaatttttgtattttttagtagagacagggtttcaccatgttgaccaggctggtcttgaactcctgacctcaggygatccacccgcctgggcaccccaaagtgctggcattacaatcatgagccaccacacccagccagaaataatatttttatctgttagctttctttaacttg

SEQ ID NO: 44533 - DNA, 201 bp, Homo sapiens
actaactgattcagtacttaattatgaaggcttctgagtgtctggcatatgccacatgctgggggtgaggagagcagtgaataaaagcagatttattcctyttccctgctagtattttcatatctattgggggagagatgcattaatcaattaattacaaaaaatgagtttatcattacaagctgtgttaagcatttgtaa

SEQ ID NO: 44534 - DNA, 201 bp, Homo sapiens
agaaatgagctttgataagacagtatctttcacaaactactgctaactctgacgagaaaaccttgattgtaaggaggcctatctaaaaatcctcagtattyttataaaaacaagtaattaattcactaactgattcagtacttaattatgaaggcttctgagtgtctggcatatgccacatgctgggggtgaggagagcag

SEQ ID NO: 44535 - DNA, 201 bp, Homo sapiens
aacatctctgtaaacttctagagaagatgattacctaaatagagtggcttttaatcaaacttctgtccagacctaggtgatgaggcaatctttagaagttygttttagaatactataattactcctgataatatcatctctgattttgcctaatattacagctactactccagcatagattttgatattttaaaaacagaa

SEQ ID NO: 44536 - DNA, 201 bp, Homo sapiens
aaaagccataattgaaaacacttcaacatctctgtaaacttctagagaagatgattacctaaatagagtggcttttaatcaaacttctgtccagacctagrtgatgaggcaatctttagaagtttgttttagaatactataattactcctgataatatcatctctgattttgcctaatattacagctactactccagcata

SEQ ID NO: 44537 - DNA, 201 bp, Homo sapiens
atcttcagagataaaggcactaagaatggacagagggaagacgcagaagctgggctgaagggtgagaaagctggaaacgctacatggggctacagtatacycacactcattcctggcccccagtggctctgagggaacaggtgagttgcactggcaaggagcaaactgcttttgccacaggcctctggaaccctggcaggg

SEQ ID NO: 44538 - DNA, 201 bp, Homo sapiens
gaaaaagtacatgtgtttatgtatgtttatattgaaaaagtttcaaaaccaaataagtcctataatatcctattaatcataaaaaaagaaaaagaattggygggggacaagatgaccaactagacgcaggcaggtggaacggctctcatgaagggactcagatgactgacacactcctaacacatcttcagagataaaggc

SEQ ID NO: 44539 - DNA, 201 bp, Homo sapiens
agttagtctacctgcacactttggctctatcctgctgcctggaatgtggatgtcatggttggaactctagctggcatcttggactatgaggataaggccayacctaaggtggcggagtgagaagttggaagacgcctgggttcctaggtattttataaagcagaaccactacatcagctcaggagcactttacctccagac

SEQ ID NO: 44540 - DNA, 201 bp, Homo sapiens
ctttgagatgcaagtaagattaatgacatataagtgaaatttttattgggtaacttttgcaaacttccataaaagttagtctacctgcacactttggctcyatcctgctgcctggaatgtggatgtcatggttggaactctagctggcatcttggactatgaggataaggccatacctaaggtggcggagtgagaagttgg

SEQ ID NO: 44541 - DNA, 201 bp, Homo sapiens
caagttggcagatgcccagcagatccagaaagcaatggatccacattagaatacaaagtcagcgggctcccagaaaataataataataataataataataataataattattattattattattattattattattataaaagaagccttaaaaagatgcagaaaaccagaatcactaaattagtcacatgataaagaaag

SEQ ID NO: 44542 - DNA, 201 bp, Homo sapiens
taaatatagaaatatttaagagctgcttcatgctgcctcctacagcatggctgggcagaatagacacagaacattcagaaatttgagttttgggaaacatrcaggagagagatgtgacagtgagatgttgcctccaatatgaattgtccttgtcttctaaaaacagaatcctgctaaattaatgaccaacagtaatagcag

SEQ ID NO: 44543 - DNA, 201 bp, Homo sapiens
agactgtaactaaaggaaatcctagtggtcctttgggtcaaataaggaaaatatattgcatatgtacagctatttcctcaatgtccttatggaagacttarcaaatcacccatgacactctacttttgtccagaatcagcctcataatccttcttaacacagtgcttcagccagccattatcagttgattgtaattgatgt

SEQ ID NO: 44544 - DNA, 201 bp, Homo sapiens
gccttggccttctttcctttcagcagcttgggtggctggaggaagcaacaagaccaaacattttgtataaaggatcttatgatattttattgtaaaatatsctttatagactgtaactaaaggaaatcctagtggtcctttgggtcaaataaggaaaatatattgcatatgtacagctatttcctcaatgtccttatggaa

SEQ ID NO: 44545 - DNA, 201 bp, Homo sapiens
actacaactttaagcaaaatgatatgtaataaaaccaactttaccttaggctaatttacataaacaagcagtaagctcctacagcatgtttgtcatagaamtatcaaacttctaagtaaagactcaaaacacttttaatattaaacattgaaataaatgtgagccaaacatacattcaagaaagattaataaaaacaagta

SEQ ID NO: 44546 - DNA, 201 bp, Homo sapiens
aaacaaggttatatacacacatttacacacagtaagttctcaacgttgtcgataggttcttggagactacaactttaagcaaaatgatatgtaataaaacyaactttaccttaggctaatttacataaacaagcagtaagctcctacagcatgtttgtcatagaaatatcaaacttctaagtaaagactcaaaacactttt

SEQ ID NO: 44547 - DNA, 201 bp, Homo sapiens
gtggccaccatacctgactcatttttaaaatgttttgtagagacggaatctcacaaaaatcttgccccagctggtcttgaactcctggcctcaagcaatcytcccgccttggcctcccaaagtgcttggattacaggtgtgagccatggcatccagcctgtttggctcttaataagacataaaacttcctttaatttcaat

SEQ ID NO: 44548 - DNA, 201 bp, Homo sapiens
ttaccaaaatgtgacacagagacaggaagtgagcacatggtgttggaaaaatagcagttgacaccgatttgccacaaaccttcaatttgtaaaaaaaaaamaaaacactatttgtgaggtgccataaagtgaggcacaataaaacaaggttatatacacacatttacacacagtaagttctcaacgttgtcgataggttct

SEQ ID NO: 44549 - DNA, 201 bp, Homo sapiens
cactcaaaagtattctctcaatgcagtggtggggtacaatttaacacttcattaaagaaagaaacagaaggtaagtggatgataaaggttaatgatggaarcgactaccctaatctcaaaaagaatggttaggttgggcatggtggctcatacctgtaattccagcactttgggggaatgaggaaggaggattacttgaat

SEQ ID NO: 44550 - DNA, 201 bp, Homo sapiens
ggagatcaatgcagaaggtgggtgatttctgcatttccaactgaggtacctgactcatctcattgggactggttacacagtgggtgcagcccatggagggygacccgaagcagggtggggcatcacctcacccgggaagtgtaaggggtcaggtaactccctcccctagccaagggaagccatgagggactgtgccttgag

SEQ ID NO: 44551 - DNA, 201 bp, Homo sapiens
cgtctgtaatcccagctactcaggaggctgaggcaggagaattgcttgaacccaggaggcagaggttgcagtgagctgagatcatgtcactacactccagyctgggcaacagagctagactctatctcaaaaaaaaaaaaaaaaaaaaaaaagaataatactaaataagattaattttatttaatccagtaaacatttaat

SEQ ID NO: 44552 - DNA, 201 bp, Homo sapiens
attacaaacctaattctcatagccctatcattacctagctatttaattttggtaagtttctgacttagtttcaacatttataaaacaaagtgatttctgtwcatatttattaagatttttttgtctcccatactttactggccaataaaaagccataattgaaaacacttcaacatctctgtaaacttctagagaagatga

SEQ ID NO: 44553 - DNA, 201 bp, Homo sapiens
acatttcaaatacatagtgtatagtaaagtgtaatgaatgtgaactccaccacttatgaaaacattgtaatttatctgactataaaggtaaataataatawtcaatttcagagtggctactaaactagataaaatacctatacagaggaatagcatagttcctggtgtataatagatactggacaagtaggtaaatattat

SEQ ID NO: 44554 - DNA, 201 bp, Homo sapiens
ctttttgattgtgcaatgcattcagttataatggtacttgaagaaaccttagaaataatctctttatgttatagctatctatctcatattcattttataamcaatgaaataggtgagggattttttttttttttttttttgaggcggagcctcgctctgtcgcccggtctggagtgcaatggtgccatctcggctcactgc

SEQ ID NO: 44555 - DNA, 201 bp, Homo sapiens
ccttttcaggatctatttctggccaggtaatttaatcttaaatgcttagtattaaaacgtactagtctgtaattaagtggaagcctcagcagaaggtgagkgggaaagtttgaattcagtgactcaaaattccaaatttgcttgtgtattgctatatttgtgactaatagctaatgagaaaaccaagctgatataattcca

SEQ ID NO: 44556 - DNA, 201 bp, Homo sapiens
tgcagtatttcttttactgtgttggtatggaactgaacccgaatatctttgaggtattcctgtacttgatttttatctatgacattttcccaacttgttaygtaaaggatggtggttgtttaaggccccacatttgaagcatcttactcgagttttgtggggcttatttacattttgaattttcttttcatgttgcctctg

SEQ ID NO: 44557 - DNA, 201 bp, Homo sapiens
gtgggtaccattcacccattcccctctgcattttctgcgttcaatacgcaatgagggggagctgtagtccctcaactggcaagggaaatcacattctatcrtgtgtgctctctcaccaactatttggccttgggaaaattgcttaacatcccttgattccttcttctgtaaaatgggagtgataattcctaagtgacagga

SEQ ID NO: 44558 - DNA, 201 bp, Homo sapiens
ggtcatctgggcaaagttaattgaaaactttctggaatggattcactattttagatgccattaagaacattcatgattcatgagaggaggtcaaaatatcmacattatattaggcatttggaagaagttgattccaaacctcatggatgagttcaagggcttcaagacttcaatggtgaaagtaactgaggatgtggtgga

SEQ ID NO: 44559 - DNA, 201 bp, Homo sapiens
tactgtggtgaatatgttaatatactgataaatagatacatttaactagaggctgatggggtgtgcaatggcaaatatttggtaccgattggtgggttggygatacaacatgaaatgtgggtaccattcacccattcccctctgcattttctgcgttcaatacgcaatgagggggagctgtagtccctcaactggcaaggg

SEQ ID NO: 44560 - DNA, 201 bp, Homo sapiens
gccagcttcataacatgaaaatgccaggtgaagcagcaagtgctaatgtagaaggtgcagcaagttatccagaagataatagctaagatcgttgatgaagyagttacacttaacaacatattttcaatgtagacaaaatagtctcatggaagaagacgccttctaggactttcatagctaaagaggagtagtcaatgcctg

SEQ ID NO: 44561 - DNA, 201 bp, Homo sapiens
atgcatatgccatgctactgtggtgaatatgttaatatactgataaatagatacatttaactagaggctgatggggtgtgcaatggcaaatatttggtacygattggtgggttggtgatacaacatgaaatgtgggtaccattcacccattcccctctgcattttctgcgttcaatacgcaatgagggggagctgtagtcc

SEQ ID NO: 44562 - DNA, 201 bp, Homo sapiens
ctaagcttttgatcttcattgaatttcatctaaatcttcatttaattcatggagacttgagcaattttttaaagttccaacctgtaagtggatagctctgmtgagctaattgtaagacatatcatgaagaaagtagatagagtgtataatgaaaatagtctccttgtggtaagatattgtcaaaggccaatctggatgcat

SEQ ID NO: 44563 - DNA, 201 bp, Homo sapiens
tttatgcatatgccatgctactgtggtgaatatgttaatatactgataaatagatacatttaactagaggctgatggggtgtgcaatggcaaatatttggyaccgattggtgggttggtgatacaacatgaaatgtgggtaccattcacccattcccctctgcattttctgcgttcaatacgcaatgagggggagctgtag

SEQ ID NO: 44564 - DNA, 201 bp, Homo sapiens
tataaatattagtaataatattgttatcaattttcaacttaaaatatgtttccatgggtattttagtaaacacttagaggagactgaataatatgtgttasctaaatgagatttggcacttctaagcttttgatcttcattgaatttcatctaaatcttcatttaattcatggagacttgagcaattttttaaagttccaa

SEQ ID NO: 44565 - DNA, 201 bp, Homo sapiens
aatattgctttcagtttcattttctctacactctccttttgggattcttattaaacttgtgttaaatgttttgaccgtgtcccacatttctctaatgcttktctctaccttcttccctctcctcaccacaatgcttcagtttaaatatttttcattgacttttcttcagatttactaattttttattcttctatgtccagt

SEQ ID NO: 44566 - DNA, 201 bp, Homo sapiens
ttgtgttatcatttattagtgttgtatatataacaaagaggaaaatataagcagagtacatgggttaaattattactagaatgatttatattcaatctaaytcttctaaatgtctttttgatttgtacatgtgtttttgtatccaaattgtgctgtataccatcaaaaacactgatgattcaaccttacttaaagaccttt

SEQ ID NO: 44567 - DNA, 201 bp, Homo sapiens
caacctctcctgtgctccacactggatgctggtcatcatgagagtgctattccattgggcttagctttcctgggatttccatcagtttaggatgaaacaamccctggaccaggccctcctccttaattcccacattgcacaaaggaaagtggtgcaaaagcttttttgtctgtgtttaaatatcatcaacaatcccaactg

SEQ ID NO: 44568 - DNA, 201 bp, Homo sapiens
aggatgaatatttttattttgccctcaattctatgtaatgccaagctgcagctcatggccacaaatcatacatgtacatctataataatgataaaaaaaaagccaagttttcttggccacttcatctgtgttgggtgcgatgctaattactttatcaaaatcaggatatttaattctctcaggagtacaaataaacattct

SEQ ID NO: 44569 - DNA, 201 bp, Homo sapiens
cagttgtgagattaggttgttaatttaagatttttctaaattttgatgtggccatttagtgctatgaatttccctcttaacacttccttagctgtgtctcrgagattctggtatattgtatgtatgggggtctaacctcccactttgctggacctgcagctacttttgctggaaagcccaagtatctaaggctccagggtc

SEQ ID NO: 44570 - DNA, 201 bp, Homo sapiens
ctagctggaattttgtatcctctaataaatctctccctatcactcccttcccctgacctttcccagccccagtatcctctgttcttttacttctatgagaycaactttttttttttaacttccacatttgagtaagaaagtgtggtgtttaactttttgttcttggcttatttcacgcaacataatgtcctaatcctccaa

SEQ ID NO: 44571 - DNA, 201 bp, Homo sapiens
cctgacctttcccagccccagtatcctctgttcttttacttctatgagatcaactttttttttttaacttccacatttgagtaagaaagtgtggtgtttamctttttgttcttggcttatttcacgcaacataatgtcctaatcctccaattctatccactgtgaaagacaggatttcattctttttatggctaaatagta

SEQ ID NO: 44572 - DNA, 201 bp, Homo sapiens
agggcttgtcaatgtgccagagactttaaactctgccaatgactggttttgcatctttaggcaaagtgcttaaactttctgaacttcagtattcatatatktgaaatggtgacctcatgttatatttgttgagaattaaataaaacaatgaaaagattcttactgccctttgcacatagttttcaatcagcaaatattcca

SEQ ID NO: 44573 - DNA, 201 bp, Homo sapiens
aaatgacaaataaaattgtgtttatttatcatgtaccacatgatgttttaaaatatgtatacattgtggaaaggctgaatccagataattaacatgcattrcttcacatagttaacatttttttgtggtaagaacacaaaatactttctaagcaattttcaggaatacagttctattaactccactcaccgggttgtacaa

SEQ ID NO: 44574 - DNA, 201 bp, Homo sapiens
ttgtcaatgtgccagagactttaaactctgccaatgactggttttgcatctttaggcaaagtgcttaaactttctgaacttcagtattcatatatgtgaawtggtgacctcatgttatatttgttgagaattaaataaaacaatgaaaagattcttactgccctttgcacatagttttcaatcagcaaatattccaaataa

SEQ ID NO: 44575 - DNA, 201 bp, Homo sapiens
taaaattgtgtttatttatcatgtaccacatgatgttttaaaatatgtatacattgtggaaaggctgaatccagataattaacatgcattacttcacatasttaacatttttttgtggtaagaacacaaaatactttctaagcaattttcaggaatacagttctattaactccactcaccgggttgtacaatagatctctt

SEQ ID NO: 44576 - DNA, 201 bp, Homo sapiens
caaatgaaggcagaagtaggaatagtgtctgtttctggttccctagcatggattccagcacagagttttacatatttgttgaatgaataacataaatgaaygaataaacacagcaggtaaagaaatgtgtaatttttgtttgtttttaagagacagaaccttgtcagtctagtacttcacttggtcaaatacctcttttgg

SEQ ID NO: 44577 - DNA, 201 bp, Homo sapiens
aaattatatagattggtatataccaggatgaattcagtttaaagagaaaacatgaaattcagtagaaatattctttaaattctaaacagagaaattgaaaygaagttatattcatactgcatgtgggtatagttttttcttacgtatatttatgtatacatgtttaaatataatacctttacttaaccacctactgtacac

SEQ ID NO: 44578 - DNA, 201 bp, Homo sapiens
tatagttgtcattgaacaaataatacgacaaagataatatcttccaaaaattattgaatattaaggaataaattcagaatattgaagaagagaaataaagratcctgtgatgtggcttatattacaacattacctaaagtagtccattcctcttagtgaataaatgaaggaattaatgaattatatgaccaatatttatag

SEQ ID NO: 44579 - DNA, 201 bp, Homo sapiens
atttattggtcagaatatttttgtccagtaaagatgaagattgatttgactgagtcagaaatacttgcatgaaatttatcgtataaaattatgagatagtmacatagtcaaagaaaattatccttttaaactctggcatttatgattatttcaaaatccctaatagatgccagttattgatgagttctcttctctgacatt

SEQ ID NO: 44580 - DNA, 201 bp, Homo sapiens
tatgagatagtaacatagtcaaagaaaattatccttttaaactctggcatttatgattatttcaaaatccctaatagatgccagttattgatgagttctcytctctgacatttatctttctgtggttgttcaatgtaaagattccagaacagtacatgtacttcaacagcacttcattttgtaagtttgtcgcttttatct

SEQ ID NO: 44581 - DNA, 201 bp, Homo sapiens
cctcaggacaatggtgagggtgttccaaacaaaagcacttctgactttgttgttgaatttaggtatgagaatctatggtcaaagggccctacaaagaaaaycataaacaaatgtgcagcaaaggaaaaaatttgaactgcacatttacaataatggcttctgatacacttagtacctcttgagtgggagttaggcatcagt

SEQ ID NO: 44582 - DNA, 201 bp, Homo sapiens
ctgactttgttgttgaatttaggtatgagaatctatggtcaaagggccctacaaagaaaatcataaacaaatgtgcagcaaaggaaaaaatttgaactgcwcatttacaataatggcttctgatacacttagtacctcttgagtgggagttaggcatcagtgtgtggagtaacaataggaataatcaatgaacagaggaga

SEQ ID NO: 44583 - DNA, 201 bp, Homo sapiens
caaggattgctcctcaatggtaaggactaatggaggtgagcatggggtgctactgcaggagcgcaacaaggaacacaaaactcaagactgagaggccttgrgccgactcctacagaatggtcagaagttaaccaggttaaaggtagaaacaggaaggttcaggaagagggaaaggcatacaagaagtcccatggatgatga

SEQ ID NO: 44584 - DNA, 201 bp, Homo sapiens
actgtatattcacctgtgaatttaagaagtaatagaagcttcacaaatcctttactagttttttcctgatggcggtatttgtaaagtgtggtccaacatcwcaacaaaatcacaggacatttacattgatagagtcaagatatagaacatttctatcatcacaaggatccctcctgtttcctttctttagtcggttgcaag

SEQ ID NO: 44585 - DNA, 201 bp, Homo sapiens
atttattaatttaatttaatgtattgagacaaagtctcactctattacccaggctgcagtgcagtggcatgatcttggctcactgcaacctccgcctcccrggttcaagtgattctcatgtctcagcctcctgagtagctgggattacaggtgtgcaccaccacactgggctaatttttgtattttaatacagatgaggtt

SEQ ID NO: 44586 - DNA, 201 bp, Homo sapiens
ccaggcctgcaggtggtaatttgtggtagtagctgctgtgtgggtaggcctaacctcaggtccccgagaggagtggtcatatgtcatcagtggtgaactaractgggagattccctggcccctggactgtatgctgtggcatggggatgatggggaaacctgggctaggctggcttatcttcaggcccccagatggcatgt

SEQ ID NO: 44587 - DNA, 201 bp, Homo sapiens
gcttatgctagcaagtaggatgaatggggaagcttttccatttttatttgtttcagcaaataaaaatacttgtaagacaatgtataaatctacgtaggatkaaagttatgaaggacttaatgggggtaacttcaaaatctctttattcatgtctttatatagttcctatatagttgtagtttcctgattgttatctacttt

SEQ ID NO: 44588 - DNA, 201 bp, Homo sapiens
ctgctcatatgccccataatgtcatacaggtgggccaatttttgttccttcaggtggcttactcaaagcccagtagtggcagctgtgaactgagcaggtargtgggttcttgggtccatgggcagctaatatggcgtaggcaatgcgagtggcagtggtgtgacaaccctctaggtcccttgtggtgcatgctgtcattgg

SEQ ID NO: 44589 - DNA, 201 bp, Homo sapiens
agaagaaagtctttcccagatgattttcatcagtttctcttacttgtcataggtcaaaacttggttcctctctcaatcttgagccaattaccggcaaaagraaattagatttccaagatgagtttagagggtgctgataagtgattaacaactgactagaagccagagggagtggtagtcctaatttgtagcatttgttta

SEQ ID NO: 44590 - DNA, 201 bp, Homo sapiens
agattttgcataagattagtatgacttctttaaattttggatagaattaactagtggagccagttaagtctggaatttttttttgtatgtgaaagattatwttttgtttaggaatgtttttcatctgttttcataaataagacttacgatatcttttgttgttgtgttggtgccatttttgtcaagttttcttgaataggc

SEQ ID NO: 44591 - DNA, 201 bp, Homo sapiens
ttagagggtgctgataagtgattaacaactgactagaagccagagggagtggtagtcctaatttgtagcatttgtttatttctgtggcataaatacccccrcctttgcaggttttaagctaccaatgtgatgtcactgaactctgagttggtacgaaatgcatagaatcggctcttgtgagctggaataaacaggttctaa

SEQ ID NO: 44592 - DNA, 201 bp, Homo sapiens
ggctggcgcagctaagaaatattggctgaatattttccatttgtccctccacatcccctttctctcctcctatggtcctaggagaacatcgatggggcagsctcctttgttctctggcttctggttgggcaaggctaatgagaggcactaggaggtgattagaggccaggagcaaaatgatgtctagcttttattctctag

SEQ ID NO: 44593 - DNA, 201 bp, Homo sapiens
gtataccatgaagaagaactttttgtattgtgtctgtttggtgactgctgggactctgtatctggatgtttaaatctcttgctagatttgggaaattttcmtctattaattcattaaataggtttttaaactctttctctctttgccttcttggataccaataatttatatattttatcacttttttttctgtcccatata

SEQ ID NO: 44594 - DNA, 201 bp, Homo sapiens
aaaaatagtgccattatattctccaactagtattttaggaaaggaaggatcatcttttcactagtcttctcagagattgttcaaagaaaaaaggcaaaatraagtgtatattgtagacataaaaggcaaataagggacatgtggggtgcaggagagagggtttgaggtatcgttcttatcattaggaaagcagaacagaga

SEQ ID NO: 44595 - DNA, 201 bp, Homo sapiens
tacatttccttgaattgtccaggcagcctatctatatataatgaagtaaaaataaatttaatatgacaatacgattcaatatacaatcacaaataacatartaaaatatacttaactaaaattttttgtccttattgtctgtcttgtgaaaaattataatatatgctgtttctccattttatatgctaggtggagatgtaa

SEQ ID NO: 44596 - DNA, 201 bp, Homo sapiens
gtatcaatatagaaactgtttactcttcaagctcccaagttccagtcaagggccagccttgcaaacatgcctttataagaaaaggagcctcactcctgctmtgttaactcttttctaaacaggagctaaatagagccaatttctaactccataaaatctctaaaaattgagctttaatgacaactacaatgcaacgggatt

SEQ ID NO: 44597 - DNA, 201 bp, Homo sapiens
ctcttatttatctctctaaacctcaatttcctcattgttatatggcactgatagaaatatcaactacctcttaggatttttgccattattaaatgagtatwcacacacacacacacacacacacacacacacacacaaacaccaatatctggcacacagtaaatactatgtgcttagacattattatttatatcatgctct

SEQ ID NO: 44598 - DNA, 201 bp, Homo sapiens
aacatagatgtctctctcaatttcctgaaatgtttatctataaactcgaagaagctatgattgtacaaaatacttgccgaatatatatatgtatgtttatrtacacataccacattgtgtatatatgtatacacacacacacacacacacacacacacacacacacacacatatatgccacattctctataaatatagatg

SEQ ID NO: 44599 - DNA, 201 bp, Homo sapiens
tcttgctcaaagcccactgtaactactacctggctactgcctatgttccctcaaggacctagggctctacagtcagccagtggcaaaggcagccatgtttrtgtccttcccttccgggtggaaagttctgcgcaggcccagatggagatgctgtctggaagccagggattgaagtaaaaaacgttagaaatctacctgatg

SEQ ID NO: 44600 - DNA, 201 bp, Homo sapiens
gccattaagtaaaataaggattattggaacacaagcactgagacactgtgataatggatctgataatcaaaatggctgctaagtaactattggattggtarcatatacagtgtggaaatgctgggcaaaggaatgactcatgtcctgagtgggacagaccagaatggcacgagatatcatcacacaatttaaaacttatga

SEQ ID NO: 44601 - DNA, 201 bp, Homo sapiens
agctgagccacttggagctggaagtgggatgacacagggccccactgtggccacatcactggaactgccctaggctagacctgaaatcagcacagcactgrgtcttgctcaaagcccactgtaactactacctggctactgcctatgttccctcaaggacctagggctctacagtcagccagtggcaaaggcagccatgtt

SEQ ID NO: 44602 - DNA, 201 bp, Homo sapiens
ataaaaatatagaatacctaggaatacttttagtaaaaatgatgtaaaccgatattttaaaaattatttaatagataaaataaaaattaagtaactggaartaaatgctatgttcctagataagaagacttaatatcataatgatgtcatttcttgccagatagatgtatgtatttaataattccagtcaaattgcctgct

SEQ ID NO: 44603 - DNA, 201 bp, Homo sapiens
ctcagtttctagctgaagtgttggagttattttaggggatgtgggagcaacatgggaaaccacaaacccaataagaaatctgtgggcaaagagatagagayattgagaacctaaaataagtcaatggatgggagatctgaaattgagagatgtttctgaagtggaatcagcagaatgtggggacagattggatgtggggtt

SEQ ID NO: 44604 - DNA, 201 bp, Homo sapiens
gaatacatttccttgaattgtccaggcagcctatctatatataatgaagtaaaaataaatttaatatgacaatacgattcaatatacaatcacaaataacrtagtaaaatatacttaactaaaattttttgtccttattgtctgtcttgtgaaaaattataatatatgctgtttctccattttatatgctaggtggagatg

SEQ ID NO: 44605 - DNA, 201 bp, Homo sapiens
ttctccctctctttcctgaaatatttaaattataagccttatgtagaaaatcagaagctgctctaaccaaatagctgtcttataagacaggagacaacctrtacttctaggaacaagaggaatacatttccttgaattgtccaggcagcctatctatatataatgaagtaaaaataaatttaatatgacaatacgattcaa

SEQ ID NO: 44606 - DNA, 201 bp, Homo sapiens
tgaatattaaggaataaattcagaatattgaagaagagaaataaaggatcctgtgatgtggcttatattacaacattacctaaagtagtccattcctcttrgtgaataaatgaaggaattaatgaattatatgaccaatatttatagcacaaaactaatttctttccttacacacagatgtttataatgaatgttatataa

SEQ ID NO: 44607 - DNA, 201 bp, Homo sapiens
atagcacaaaactaatttctttccttacacacagatgtttataatgaatgttatataagagaagctctcctttattgacaataatagtaagcaattgatakttcatatgttctatgcaacattgttttctaaaatcttattgactatgtagaagataataatatttgcatacaaagaatgttttctctgtccttcctcatt

SEQ ID NO: 44608 - DNA, 201 bp, Homo sapiens
gttttaggaccaaactggggtctgctcaccctgtgcagtaaaacgaggtgatatggtttggctcgtctccccccaaattacgtcttgaattgtaatccccrtgtgttgagggagggacatggtggaaggtgattggatcatgggggcagttccctccatgctgctctcatgatagtgagtcagttctcatgagatctgatg

SEQ ID NO: 44609 - DNA, 201 bp, Homo sapiens
tttatgtaaatacgtactagaaaaataaatatcaatcacatttctctaatctgcatgaacttgaaatacttatacaaatagatttatgatatgtagtccaraaagtaccatgggatggaggtgaggcaacaacttttgagcaggagactggcagttggcgttttaaaatttacagtggtaaactagttattaaatctacaa

SEQ ID NO: 44610 - DNA, 201 bp, Homo sapiens
aaagtaccatgggatggaggtgaggcaacaacttttgagcaggagactggcagttggcgttttaaaatttacagtggtaaactagttattaaatctacaaraattatatatctgtgctcagaagatactgagaattacagaagattcattctcaaagagtgaggagaaagaaagaacttttttcccataatttcatgtccc

SEQ ID NO: 44611 - DNA, 201 bp, Homo sapiens
tataaaaactaaggcagcgtagtttagtgattaacagcatagattttggcacctagattccaactcctggctacaatttaccagctatgtaaccttaagcrcgttacttaccttccctatgcctcagttttctcatctgcaaaacgggcataaaaacaaaaactcacttcatgttttgagaattaagtcattttaatatct

SEQ ID NO: 44612 - DNA, 201 bp, Homo sapiens
accccaaagatcccgtaacaaaaggtcacatatctctctttctccaggattggtctctggtgtcttatttactgtgtttggtgaagttttcttggctggtstcaatgcttgtaaatgttcatctgtagctgggcatttaagagttaggtatttgttttagtcttcacagtctgccttgtgtgtacccatctttcttgggaa

SEQ ID NO: 44613 - DNA, 201 bp, Homo sapiens
ttttaagtaacaaaatattttactcagtttctagctgaagtgttggagttattttaggggatgtgggagcaacatgggaaaccacaaacccaataagaaayctgtgggcaaagagatagagatattgagaacctaaaataagtcaatggatgggagatctgaaattgagagatgtttctgaagtggaatcagcagaatgtg

SEQ ID NO: 44614 - DNA, 201 bp, Homo sapiens
cacctttgggccatagagggcctgaaagctggggcctgggctgccagtcccacagactagagtgggaacttgtggtgccttttctgggcccaccaatggtygcccatgagccaaatcagtgcacacttcctcccatttgaggcccataaaagccaaagtctcagccagaggtgagcagacaatgggatgaccagctgcaga

SEQ ID NO: 44615 - DNA, 201 bp, Homo sapiens
gtggagggcatgctaacatacttgctgttactacagcattcattggttacacagatcttacttatgagaaaacattgaagattttaagtaacaaaatattwtactcagtttctagctgaagtgttggagttattttaggggatgtgggagcaacatgggaaaccacaaacccaataagaaatctgtgggcaaagagataga

SEQ ID NO: 44616 - DNA, 201 bp, Homo sapiens
gcattgaagaccaccatgaatgtggagggcatgctaacatacttgctgttactacagcattcattggttacacagatcttacttatgagaaaacattgaagattttaagtaacaaaatattttactcagtttctagctgaagtgttggagttattttaggggatgtgggagcaacatgggaaaccacaaacccaataagaa

SEQ ID NO: 44617 - DNA, 201 bp, Homo sapiens
gttgactttgacctttagtttttaacttgcaaatcagcacctacattgataatttcaatttgcgtttatctaaagttccactatatacactgaaacccaaytgagtctccacatggtacaatatactctgcttaatacctaggatgtagagatgaaatgaagacagggaggaagatgactaatataacagtctaagagtaa

SEQ ID NO: 44618 - DNA, 201 bp, Homo sapiens
ctctgtaagtgtttcctcatttgcaaaatggggatgataaatctcccactgaggattaaatgctccaatgcaagttaagctcttggaaccctggcacaaaktaaatacttaatagttattatcttattatttgaacaatgttgatatttctaatttctgagctatcatgttaaatagagtaattagcacttcttatattct

SEQ ID NO: 44619 - DNA, 201 bp, Homo sapiens
catggactagtgcttgcacagtatactgtgaacttactgttgactttgacctttagtttttaacttgcaaatcagcacctacattgataatttcaatttgygtttatctaaagttccactatatacactgaaacccaattgagtctccacatggtacaatatactctgcttaatacctaggatgtagagatgaaatgaaga

SEQ ID NO: 44620 - DNA, 201 bp, Homo sapiens
tttccaaagagaagccctagtcatgggtgacagtgagacatgatggtggatccccacacaattacctgccagatccaggtcttatataccacagtactgtkgatcttgatttgtagacctgtaaactaaagatataagttgtctcttcccgcataaccaacatacaaaggtcggattgaagttgacagatttccaagggaa

SEQ ID NO: 44621 - DNA, 201 bp, Homo sapiens
accatcatagaaatatttgggcaatgtaaataatatatatatcattgtcttttttactctcatcaacactgccttcttttcaaagttgcccttaatatatrttaaaacttgacatatgtctcaaagaagtgactctgtgagattaaattgatggttttcatatttcatagactgatcttaataatggttaagagtatggtc

SEQ ID NO: 44622 - DNA, 201 bp, Homo sapiens
ttctgccatatggattaaaattccttaaattcctcttgcgtagattcagaattggctcttcattccatgatctgtgattctatttcttttcctctcttccrctggcctctaagtgttgaagacaattgttctcttttgtttctcttctctaacctaaacatctaagttcctgcagctgtgttgctagtcctcccaggatct

SEQ ID NO: 44623 - DNA, 201 bp, Homo sapiens
ggagatcttcgtgataaggaataggtctgtattttagctgtggtgatggtagttacaagaatctatacacaagataaaatggcatgaagctatacacatgyattgcaccaatgacaacttcctggtatttatattgtaatgtagttatgtaccacagaaccattggaagaaactgggtgaagggtgtaggttcctctctgt

SEQ ID NO: 44624 - DNA, 201 bp, Homo sapiens
tcaaattattcaccaagtccttccacctcttgacactcagtaattttgtcattccactagacccgcttcactttatctataataatttttattcgttcttvgttctttgtttggatgccactttcttctgcaagaattttctaaacccagtttacgaattaggtattcccatatattcacataacaccacatacctgtaca

SEQ ID NO: 44625 - DNA, 201 bp, Homo sapiens
ttatacagcctaagccagttcataaatatttaaccattgtattatgttgcctttcactctctcttgcttaatgaattaggatttagcattattgtcatagmagaataccatgtaattgtatttgtgtcaacaaaataccagatttctatgagcactatttagcaatcaaaagtaagacatctttctaagatatgtttatat

SEQ ID NO: 44626 - DNA, 201 bp, Homo sapiens
gggagatcttcgtgataaggaataggtctgtattttagctgtggtgatggtagttacaagaatctatacacaagataaaatggcatgaagctatacacatktattgcaccaatgacaacttcctggtatttatattgtaatgtagttatgtaccacagaaccattggaagaaactgggtgaagggtgtaggttcctctctg

SEQ ID NO: 44627 - DNA, 201 bp, Homo sapiens
aaatgtggccatcatcctccgatggttccttttcaaattattcaccaagtccttccacctcttgacactcagtaattttgtcattccactagacccgcttyactttatctataataatttttattcgttcttggttctttgtttggatgccactttcttctgcaagaattttctaaacccagtttacgaattaggtattcc

SEQ ID NO: 44628 - DNA, 201 bp, Homo sapiens
cagtgagatgtatccagtgaaaaattgtggagataaaaaaattgtgataaatttgcagttatacatctagaatttctggactggcttttcatgcaaaccaktgttagtgatgaagaaagcaagccagagaaataaaaggactttcctgagatagcaagttggaaatataagctccttaataataataatacttaatatttt

SEQ ID NO: 44629 - DNA, 201 bp, Homo sapiens
gcctcccaaagtgctgggattacaggcgtgagccaacgcgcccggctgtatgactccatttatataggattcttgaaataaaactatagaatagagaacargtaagtggttatcagggtttagaaatggttggaggagagtgtagttgtgactgtagaagggtaatatgagggagatcttcgtgataaggaataggtctgt

SEQ ID NO: 44630 - DNA, 201 bp, Homo sapiens
ttcctttttaataattcatgacacttattaacttcccacccatccaaaaagcaaaagaaacacacagacacacaacgtgcacacacacagaaacacacatrcatacaccacaaagacatatcttgaacacctaaaaaatgcaaaactattgtgaaagaaaccttcatagcaccagtactgtggtgcacacagtttaaccag

SEQ ID NO: 44631 - DNA, 201 bp, Homo sapiens
ttcatttcacatgagagcttcttgtgtgagttttttgcctctacatttcacatttctctgtctctgtctcctttcaaacacacacacacacacacacacactcacacacacacacgcccttcccccaaatagtctttctctaaggcaaatctgattctgccccttccgactttatacttagaatcttttaaaaggtgattt

SEQ ID NO: 44632 - DNA, 201 bp, Homo sapiens
ttagtagagatggcgtttcaccatcttggccaggctggtcttgaactcctgacctcgtgatccaccctccttggcctcccaaagtgctgggattacaggcrtgagccaacgcgcccggctgtatgactccatttatataggattcttgaaataaaactatagaatagagaacaagtaagtggttatcagggtttagaaatg

SEQ ID NO: 44633 - DNA, 201 bp, Homo sapiens
cttcatttcacatgagagcttcttgtgtgagttttttgcctctacatttcacatttctctgtctctgtctcctttcaaacacacacacacacacacacacactcacacacacacacgcccttcccccaaatagtctttctctaaggcaaatctgattctgccccttccgactttatacttagaatcttttaaaaggtgatt

SEQ ID NO: 44634 - DNA, 201 bp, Homo sapiens
tgcttaaaaccacattttttgggaaaaactccagttatttctgtgtcagataaatcttacccatgtttctgtgtttgtggatatctttattcttcttcttmttattattttttgagaccgagtctcactctgttgcccaggctggagtgcagtggcgtgatctcggctcactgcaacctctgcctcccgggttcaagtgat

SEQ ID NO: 44635 - DNA, 201 bp, Homo sapiens
gagaaaatttcctgtttcaaaaggatacacttcaatatgttagagatatgttctacaaattataatcacagttcacttatgcctttctgaaacaataattstgagcatctaaactgtgcttaaaaccacattttttgggaaaaactccagttatttctgtgtcagataaatcttacccatgtttctgtgtttgtggatatc

SEQ ID NO: 44636 - DNA, 201 bp, Homo sapiens
ttttttagagacagggcctcactgtgttgcacaagctagtcctgaactcctgggctcaagtgatcctcccatctcagcctcccaaaatgctgagattacargcttgagccactgcacccagccttttgttgctttttgttcaactcagaccattaaagacttggatgatgcccaaccacattgtgaagggtaagctacgta

SEQ ID NO: 44637 - DNA, 201 bp, Homo sapiens
tttaaagatttccattgaatgctattaccacagaaccttcctagagatttatgtaatgcctttgtacattcaaaaggaaattccagctcagtaactgagctgcaaatggcacccattgaagctactcaaccacattgctgaaggccaccaaattgcttcttgcaggcttctactattcagaaattattaaatactttcaaa

SEQ ID NO: 44638 - DNA, 201 bp, Homo sapiens
ttcctagcgcaaagaaatgataaatttttgaggtcataaatataattattctgatttcatcattatgctttgtatatatgtattgaaatattattttgtaygacataaatatgtagaattattatgtgtcaattaaaaatgaaaaccaaagaaaaaaatgagattggacttagaaaataaagaaaatcacagttacaaact

SEQ ID NO: 44639 - DNA, 201 bp, Homo sapiens
atatgactgacttcataggattaataaggcaccacactggtatgagaacaatgattccaaaaagtacaagaagcatattataaattattcttggttgtatkatataatgtaattgtaatgattagtttgttctgttactgcattccacaatccaatcaaaggtctaaatcgacacatgttgctgaagaaaaggcaatatag

SEQ ID NO: 44640 - DNA, 201 bp, Homo sapiens
agctaagtcaataataataacatattaaggcaagtcttttgtatctgttttatcaccatatgactgacttcataggattaataaggcaccacactggtatsagaacaatgattccaaaaagtacaagaagcatattataaattattcttggttgtatgatataatgtaattgtaatgattagtttgttctgttactgcatt

SEQ ID NO: 44641 - DNA, 201 bp, Homo sapiens
catctgtgtaactgtctctctaactggtttcagatagctgaaaatggaaacaagttttctttataactaaaatagaaaataaatatatcccaccataaacgtgaatgtgattgatcatctatcacttcctattttttttccttcaaagatgtagtctatgtaattctgaggaatcatttattgaaaaagaaaaaggcttca

SEQ ID NO: 44642 - DNA, 201 bp, Homo sapiens
gggataaaccccactttatcatagcacatgatcccttcaattagcttttgaaatcagtttactagtattttgttgaggatttttatatgtatatttatcargaatattggcctatatatgtttttttcttgcagtgcccttttctgactttgttatgtgggtaatgctagccttgtaaaacgagtttggtccttagctttt

SEQ ID NO: 44643 - DNA, 201 bp, Homo sapiens
ttttcagacactcctttattctttctctttttctcttttttatatcctaaaatatacaagtttcaaatatataaaataaaaaatgaaattttgtaaaccartgcattcacttatcctctttggctatttttaaaactttaaactgaaattacttcctcaaagaaaatttggaacagttttaattgtttgaacattttgaaa

SEQ ID NO: 44644 - DNA, 201 bp, Homo sapiens
cttcttgaagaagaaaaataaactgaaatattttaaaatgatacttcatgcttttcctttccaagtataagaacacaaaattttggacacagattcttttwtaagttccaggagctttggttgcattagcaacatggtttttgtttatttgtttattttattttgcttaacttggtctccaagggtgctaatatacttata

SEQ ID NO: 44645 - DNA, 201 bp, Homo sapiens
ctctctgatatctccagattttgttcctttctgttggaatcactataaggtcaagttcctttttaataattcatgacacttattaacttcccacccatccmaaaagcaaaagaaacacacagacacacaacgtgcacacacacagaaacacacatacatacaccacaaagacatatcttgaacacctaaaaaatgcaaaac

SEQ ID NO: 44646 - DNA, 201 bp, Homo sapiens
taggctttaacttgcacatagtcagttttcatggcatatatgtttaacaagagtctattcattaatttgagcagaatatccagccccaaagtggatatttkgggcatctattcattcttggtagcagtttaagatttgaagaacttttgagtaatacaggacttagagcttagagtaaagttgtacttctactttgtggta

SEQ ID NO: 44647 - DNA, 201 bp, Homo sapiens
cggtggattttccttaggggtttttatggactttaaagtgggagcttaagggtattttgaaccgtattagccatgtaggtcatgaggaatgattacatttrtagatattttggtgccttgatgtcagcaagggttgcacaatgagtttcaatatgcatacattccagagatctatagaaattctagttacttacaaagttt

SEQ ID NO: 44648 - DNA, 201 bp, Homo sapiens
tttactacgtggccttttacagaaacagtttgctgatcccccaactcccatcctaatttaggtgatcatattggttagctccatgagctctttttaagttrtctttttgccccttcttcatagcatactgttactctcatggatgtgccattttttctcactgtgaggatattatttgcagtttttttttttttttggtgg

SEQ ID NO: 44649 - DNA, 201 bp, Homo sapiens
taagtcatccttgagaattttccccatctaatttgtcttcagtcttattgaatatattttctagcagctctacaatctatactacacatctttgtctccartgtcactgccgtaatttaggcttccttcatttcacatgagagcttcttgtgtgagttttttgcctctacatttcacatttctctgtctctgtctcctttc

SEQ ID NO: 44650 - DNA, 201 bp, Homo sapiens
gttgagggaagcagagagaaaaaagaagggagaaatcccagtaaagtcccaggatgagtcaaaaagatgcccggcagggtgtcagagccccagcatcagaragtggttgactctcaggttggcaagaagaatttattgacaacagtataggtttgaaaaggaaggttttattagatagaaagcatgctgcagaagagtaca

SEQ ID NO: 44651 - DNA, 201 bp, Homo sapiens
gttacaaacaaaaatatagctatactgtgtattatatttacttatgtagttaacttttactggtgctctttatttcttcatctgaattcaagttactgtcwtatgtccttttatttcagcctggaaattgccccttggtatttgctgtagggctagcaaccaattgtctcactttttcttttcctgagaatgtcatttctg

SEQ ID NO: 44652 - DNA, 201 bp, Homo sapiens
ttggtttctaagagtaaagtaccagactgttgagggaagcagagagaaaaaagaagggagaaatcccagtaaagtcccaggatgagtcaaaaagatgcccrgcagggtgtcagagccccagcatcagaaagtggttgactctcaggttggcaagaagaatttattgacaacagtataggtttgaaaaggaaggttttatta

SEQ ID NO: 44653 - DNA, 201 bp, Homo sapiens
actttgctcctctatagattcattttcccccagtcctttgtgcatgcccgtcaacacgaattggtagttatcactttatgtacttgttttaaaacacaaaraaaattagttacaaacaaaaatatagctatactgtgtattatatttacttatgtagttaacttttactggtgctctttatttcttcatctgaattcaagt

SEQ ID NO: 44654 - DNA, 201 bp, Homo sapiens
tcccactgaagagtggcctcagccaaagatcattggtttctaagagtaaagtaccagactgttgagggaagcagagagaaaaaagaagggagaaatcccartaaagtcccaggatgagtcaaaaagatgcccggcagggtgtcagagccccagcatcagaaagtggttgactctcaggttggcaagaagaatttattgaca

SEQ ID NO: 44655 - DNA, 201 bp, Homo sapiens
tacatattttgtgctcctccattcctccattttactttgcttttttgtattaaatatgtattttctagtgtactgttataattttcttttactatattttsagagttatgtttatagtggttgccttggaaattacaattaacacattaaattatggaaatttaattcaaattaatagcaacttaattatagtagagcaca

SEQ ID NO: 44656 - DNA, 201 bp, Homo sapiens
gggtccacaaccagcagattgtgtctgtgcagagttgattttgctgctgctcatttccaaggcacggtttacagtgttaaagtgaaggtggacttgccacycttggaagggggcaatagtaaatttgcttttttgtcttggcctttggataataccaaggagtgcactcagccagaaaccctcaattgccaaagagtactt

SEQ ID NO: 44657 - DNA, 201 bp, Homo sapiens
catttacatttcatgtgaatactgataaggcagaatatacgtctaccaatttgatatttgttttctatgtcttacatattttgtgctcctccattcctccrttttactttgcttttttgtattaaatatgtattttctagtgtactgttataattttcttttactatattttcagagttatgtttatagtggttgccttgg

SEQ ID NO: 44658 - DNA, 201 bp, Homo sapiens
gttctttggaagattatgcaatttttatgtaattttacgtatcagataaagcccaaaagacctgaacatatggggtctctgaatataaaagtttaaagagyttgtgggtcaaaatgggaccactttataagaatgcaacccaagggcaaataggatagaactgaagaatgagttgaacccatgttgggtttagatacggca

SEQ ID NO: 44659 - DNA, 201 bp, Homo sapiens
tctgtttgcatggtatttctttttctatccttttactttcattctattggtatctttgaatgtatatgtctcttttataaacagcatgttgtattattttwaaaaatccattagtcgatttttgccttttaattggagtgtttaacccatttacatttcatgtgaatactgataaggcagaatatacgtctaccaatttga

SEQ ID NO: 44660 - DNA, 201 bp, Homo sapiens
tgtcgccatgtaattagttggcgacggcattttttctcctccaatttacgctttttttttttgagacaatgtctcactcttgttgcccaggctggaatgcwatggcacaatttcagctcactacaacctctgcctcccgggttcaagcaattctcctgcctcagcctcctgagtagctgggattacaggcatgtgccacca

SEQ ID NO: 44661 - DNA, 201 bp, Homo sapiens
tacatccatcacctgagcagtatacactgtaccctaagataaaatcttctgttattgatatgagatctcatttgttttctaacataagcatttacagttayggctgtccctttaagaactgctttaggtgcatcccataaattctggtatgttgtatttttgctttaatatatctcaaaatattttctaatgtctcttgat

SEQ ID NO: 44662 - DNA, 201 bp, Homo sapiens
actattccttataatatttaaacattttctgttaagtcaatagtaatgtccatgctttcattcctgattttggtaatttgagaattctctcttttttgttrttggccagtctaactagaaatttgtcaattttgttatcttttcaaaggactaatttttggttttgttgacttttatctgtaggttttttatcctctttta

SEQ ID NO: 44663 - DNA, 201 bp, Homo sapiens
gtcactcgctcttccgatgaccctcttatttctagtgaggacaggcttccagggttggcttgtaacctggaggttaggaaccttttctactctagtgtccwggatttctgcagcaataacaggtccccattctgttagtagcatagggatgagccctgggtttattagttaatgaaaaagaatgtgccagtgctgtcgcca

SEQ ID NO: 44664 - DNA, 201 bp, Homo sapiens
cagaattgagcagtaaatttatctgatcctgagattttctttgtcagtaattatttattaattcagtctcttcacttgttatagctttattcatttgcctrttgctccctgagtgtagctagtttctaggaattgtctgtttcgtataggttacctaatttgttggcatgtagttgttcatactattccttataatattta

SEQ ID NO: 44665 - DNA, 201 bp, Homo sapiens
ctcttttcttttttggaattcttttgtgaagaattagtattaattttttgaatatttggcagaattgagcagtaaatttatctgatcctgagattttcttkgtcagtaattatttattaattcagtctcttcacttgttatagctttattcatttgcctgttgctccctgagtgtagctagtttctaggaattgtctgttt

SEQ ID NO: 44666 - DNA, 201 bp, Homo sapiens
cttacaaatcaacctgttaacatgcattaaatctttgctcccacctttgaattatacttcaaagtaaatggtacacagcttacagaatttctcatactttmaaaactggaattactgttatttcttaaatcagcttgtctatatgtccagcatatcaagtaactcaaattggaatggctatgcacacatattaagtacttc

SEQ ID NO: 44667 - DNA, 201 bp, Homo sapiens
taagtatgcgctaggagtttagtcaatcatgtaacaggttctttctgtctgctgcacaaacaaaatcaaactactgagaccacagcattgcagtagtgaaygagtttaattgacctgaagctggcccatgtaagagaacctgggctgttggtcaaatcagcctctctgaaggcttggaagttagggggttttaatggacaa

SEQ ID NO: 44668 - DNA, 201 bp, Homo sapiens
gtagctgtgacagcccagaaggaagaggtgccccacctcatgagggagagagggtcactcgctcttccgatgaccctcttatttctagtgaggacaggctyccagggttggcttgtaacctggaggttaggaaccttttctactctagtgtcctggatttctgcagcaataacaggtccccattctgttagtagcataggg

SEQ ID NO: 44669 - DNA, 201 bp, Homo sapiens
tgaatttcagaggcttgattataatccaggaatagagttagaagagcttgtccttggcattgccctcgtccccattctgcaggactcccttgttaggtagrttgataaggctgtagctgtgacagcccagaaggaagaggtgccccacctcatgagggagagagggtcactcgctcttccgatgaccctcttatttctagt

SEQ ID NO: 44670 - DNA, 201 bp, Homo sapiens
tgtaatgctggcctcaagaaataagttggaagttttttgtcctcttttcttttttggaattcttttgtgaagaattagtattaattttttgaatatttggmagaattgagcagtaaatttatctgatcctgagattttctttgtcagtaattatttattaattcagtctcttcacttgttatagctttattcatttgcctg

SEQ ID NO: 44671 - DNA, 201 bp, Homo sapiens
aggatactaggtctaaagcttttgaaaaatatgctgtggggtgcttagagggccatagatcttaggctcactctcaaaactatcccccttcatttgtgtamgtaaaaaaagaaaggcttagtcagatcaggtagggctaaggctgggactgagattacagcctgtttttaaagtgtttagagcatgcttcacattattagt

SEQ ID NO: 44672 - DNA, 201 bp, Homo sapiens
aatattttgttgatggtttttgtacttatattttaaaggatgtttatctgtagttttcttttttcatggtgtctttagttttagtgtcaatgtaatgctgrcctcaagaaataagttggaagttttttgtcctcttttcttttttggaattcttttgtgaagaattagtattaattttttgaatatttggcagaattgagc

SEQ ID NO: 44673 - DNA, 201 bp, Homo sapiens
atgtattttggggtatcagttcctaagccccaacaatagccaaggaaaaaagcaaagcctgaaaagttgcttttcattaaggtttctaattgcagctcaaytctttcgtttacactctgattttgcaggtgggcccaatatagagacttggagtcaacatgggttagaaatagactctatcatagaacttgtctattttcc

SEQ ID NO: 44674 - DNA, 201 bp, Homo sapiens
gctttttgtgtgtttctggaaacagtttgctaatattttgttgatggtttttgtacttatattttaaaggatgtttatctgtagttttcttttttcatggkgtctttagttttagtgtcaatgtaatgctggcctcaagaaataagttggaagttttttgtcctcttttcttttttggaattcttttgtgaagaattagta

SEQ ID NO: 44675 - DNA, 201 bp, Homo sapiens
gattaactttaagatatttctccatggaatttgaatgagcctgagagacagacattatcttgtgaaagggtctattcaagtgtggttacatttttggcctwcttttctgtaatagataatgagataatagtaaggagaagaataaacagttgttctcctggtggatcagtactttaggcagataaagggacttcaggcaac

SEQ ID NO: 44676 - DNA, 201 bp, Homo sapiens
tttttttttttggttaataataaaagagcgttggattattttctgtgcctattatgatgatcatgtggttttggttcattattctattcatatagtttatkggatcgattgagtttcatatgttgaaacggtcttgccttcctggaatgaaatcccacttggtcatagtataagctttttgtgtgtttctggaaacagttt

SEQ ID NO: 44677 - DNA, 201 bp, Homo sapiens
tgttcaccattaagtatgttctcagttgtgaggtttttgtagataccatttatcagattgagaaagtagtcttctattcctagactgctttttttttttttggttaataataaaagagcgttggattattttctgtgcctattatgatgatcatgtggttttggttcattattctattcatatagtttatgggatcgattg

SEQ ID NO: 44678 - DNA, 201 bp, Homo sapiens
gtgtacacagtgagaatcacggagtgattacctatcccccaaatagggtttagaagcttatatatcatcttttgtgggtacagaaagaatgggaacttagktcttggcaaaacaggttataggagggaggaaaagaggaattctgttgacaggcaataaatgacaactagggagaatgaatggattggagggcagagatga

SEQ ID NO: 44679 - DNA, 201 bp, Homo sapiens
ttttactttttatgccattgtacgtggaattttaatttcatattcagactgttcaagtgtatagatatagagatgattttcacatattgatcttacatccygcaaccttgcagaatttattatcataaatagtttgtctgtattccttaggatttcctatatgcaaaattatttcattttaaagtaaagataacttcagtt

SEQ ID NO: 44680 - DNA, 201 bp, Homo sapiens
attgtgcaccacgtactgcctatattaatcaggaaggtgaaatgatctctatgtcagatctagagtttctgaatatggaagtgtgagagattaatttcaayatatatgagctatccttaaaattttgaaaatataattaaatccaattataaagatacgattaagaaaaaaatgatggtttataggacattgcatacactt

SEQ ID NO: 44681 - DNA, 201 bp, Homo sapiens
attcttccaatccattccccagaatgtctttccatttatttaaaacttcttcaggttatttcagtgatgttttgtaggcagtatgcaagtcttgaacttcytttgttaaatttgtttctattttactttttatgccattgtacgtggaattttaatttcatattcagactgttcaagtgtatagatatagagatgattttc

SEQ ID NO: 44682 - DNA, 201 bp, Homo sapiens
atattaattaaatacaattgtaatacaatgtgtttaatacaacatattttattaattaaaggcaatttgaaaaatattacttaaagaattgcatttgaaaycattggctaagaataggaatataacataaggactggaaaaagagacaagtgacaagtagcttggagggaaggtcaaattagtttctctgtaaaagaagat

SEQ ID NO: 44683 - DNA, 201 bp, Homo sapiens
aaaaaaacccacaaaacacagctggaattttgaaagggactgcattaaatttgtgaccaatttggatattgttgacatcatgagaatattaattcttccawtccattccccagaatgtctttccatttatttaaaacttcttcaggttatttcagtgatgttttgtaggcagtatgcaagtcttgaacttcctttgttaaa

SEQ ID NO: 44684 - DNA, 201 bp, Homo sapiens
agaggtttaatggttgggccatcgaaggagaagatgggaaggaacctcaaatccatctccccaggtagtttggggctgggtttttaagggttttggagtgkgtcaaagtgtggagattgttaattggtggaagagtacagggggaagtcataggatggggagaggaagaaaccatctcatgttgattctgttcctctgtgg

SEQ ID NO: 44685 - DNA, 201 bp, Homo sapiens
attatgatcaacttgccaatttctgaaaaaaacccacaaaacacagctggaattttgaaagggactgcattaaatttgtgaccaatttggatattgttgayatcatgagaatattaattcttccaatccattccccagaatgtctttccatttatttaaaacttcttcaggttatttcagtgatgttttgtaggcagtatg

SEQ ID NO: 44686 - DNA, 201 bp, Homo sapiens
cctatacttagaaaacctcatcgtctctgcccagaggctcctagacctgataaacaactttagcaaactttcaggatacaaaatcaacatacaaaaatcascagcatttctatacagcaataacatccaagcaaagagccaaatcaagaatacaatccattcacaatagccacaaaaagtacaaaatacctaggaatacag

SEQ ID NO: 44687 - DNA, 201 bp, Homo sapiens
cagccactttatcgtggatacacaaacaatacagaaagtacatcattttgtagttttctactgcaatggaattttgatttattgacaatttctagaatccygtgtcgtctaaacctttaaagtatatcctaggcacttaggttgtttctataccttgactatcatgaatgatgctgcaatgaacatgagagtgcagatacc

SEQ ID NO: 44688 - DNA, 201 bp, Homo sapiens
agagatccaacatcattcttttgcatgtggatatccagttgtcccagacccatttgttgaaaataatatttttcacatttgaattatcttggtactcttcyaaatatcaattgaccaaagatgtatgggtttatttttggactctccagtctattctattgatctatttgatccattatgccaatactactccaacctttt

SEQ ID NO: 44689 - DNA, 201 bp, Homo sapiens
tttgttttgatagaagttttaaatatatcttcccttttctgtgctttagagaacaatcgagactaaaccggaagaaagggataaaaactttaggagtgatrgaactcagttcaatgaaaacattgattaaataccttaatcaaagtaaacattaatataaaaagccttttaggaacatagaggattaaatatgggaattat

SEQ ID NO: 44690 - DNA, 201 bp, Homo sapiens
tgacctcaggtcatctgcctgcctcagcctcccaaaatgctgggattataggcgtgagccaccgcacctggctgcaaaagtcattttaaatttcttaaagwttaggctccaatatgagcaaaaaaatactaagattatggaataaaagtcttgaaaagtgttcgttttgctaattcacccctgaaatttaaactaaaacat

SEQ ID NO: 44691 - DNA, 201 bp, Homo sapiens
tttagtcatctcttccaacagaaattaaatgtttcaagtctactaatagtactcactttgactatctaggtctttacttggaacctgtccatcaggtggtrtggtcagagctaagtcaataataataacatattaaggcaagtcttttgtatctgttttatcaccatatgactgacttcataggattaataaggcaccaca

SEQ ID NO: 44692 - DNA, 201 bp, Homo sapiens
cccaataataggattgctgggtcaaattatagttctatttttagttctctgaggaatctccaatcgagtttccatattggctgtactaatttacatcctcwtcaacagtattcaagtgttcccttttctctacatcctcaccaccatctatcagttttcgactttttaataaagtcatgtgagacacataataaagttatg

SEQ ID NO: 44693 - DNA, 201 bp, Homo sapiens
aaattagaaattgaataccaccaactacaccaggccattgtgaagaaaaataatatacatgaatatgccttatcaactataaaacggtatataaattaatrtattattaatagtatcttcatgtttatatttcatgaaacaaatgattatatgcagtagctatttctttttaaattcctgacctatggctttagatgtgat

SEQ ID NO: 44694 - DNA, 201 bp, Homo sapiens
tcagctttgtccaagatcagatggttgtaggtgtgtgggcagtcttatttctggactctctattctattaagttggtctaaatatctgttttgtaccattrccatgctgttttggtttctgtagccccatagtatagtttgaagttgggtagtctatgcctccagctttgctctttttgcttaggatttcctgggctattc

SEQ ID NO: 44695 - DNA, 201 bp, Homo sapiens
agcatttttctgggtaacccatctcctcactcccagcctctgttaaccactatttttactctgcttctatgagtttgacttttctggattccacacacaartttgatcatgcagtatttgtctttctgtgcttggctaattttatgtaacataatgttctccagactcatcaatgttgtggcaaatcaaaagctttccttt

SEQ ID NO: 44696 - DNA, 201 bp, Homo sapiens
ttgtgtatataatttgggggttattttcaaaaattatgtggtttgcagtggattatttattagcacttaaaattttccacatgaaaaataagcctttgatwaccaaacaaagggatatgatctcaatatcatcttcttcctaaagtatttattccagagtgaatatcaggatgcccatttgtagggagacaaaatctatct

SEQ ID NO: 44697 - DNA, 201 bp, Homo sapiens
taatagtgttctacacaaatattcgtttcttagttttgataaccatacctggttatgtaggatgttaacattagtgatgttaacatttgagaaagctgggyaatagatatacagaaactctctgtatcattatgacaactcttttgtaagtctaaagttatttcaaaataacaagttaaaattttaaaaattctcaaaatg

SEQ ID NO: 44698 - DNA, 201 bp, Homo sapiens
ttgagggaaaaattgcctatctcaaaatccttggagggctttgaggccttcagaagtgaagtgagttacctatatccacgtagctaattaatgtcaaagcyaggattagaattcaggtctcctgactccaaattcagtgtacttttgatgttatcacaatcaagtaaccataataggttttttttgcccaatatgtgcaaa

SEQ ID NO: 44699 - DNA, 201 bp, Homo sapiens
ctgcaatgtcctggttaatgagtctctttataacgaagtcagctatattttatttttaattaagatttttggaggaaagttattgtataaactaagggggytggcatatatgttagatttaacattataatgacagtcatttgtaaaacattccctgtagttgctataatgtactaacaggatctcttgggaagtgttgga

SEQ ID NO: 44700 - DNA, 201 bp, Homo sapiens
taattaagatttttggaggaaagttattgtataaactaagggggttggcatatatgttagatttaacattataatgacagtcatttgtaaaacattccctrtagttgctataatgtactaacaggatctcttgggaagtgttggactccctacctcacaactacttaaaagaagtattggtgaacagtttgggttactgag

SEQ ID NO: 44701 - DNA, 201 bp, Homo sapiens
cactttctgtactttataggtttgcctattctgggcatttctgtaaatagaaaacatagcttttgtgaccagcttctttcatttagcgtaatgttttcaargtttatccatgatgtgtagcagaaatcattatttcattccatttttatgatggaataatattatattgtatgaatatgctgtaatttttaattcactcat

SEQ ID NO: 44702 - DNA, 201 bp, Homo sapiens
ggtgacaacatggtgtcattcctgtctctagaaataatgctaaacatttaggaatcatttgctcttatgactcaaaacaaccctgttgaaaatggatagtrctcttttgtatgtaataaagatcagtgggttaggttgctgctggttttctattattgcaaattgattcccctgtgaattttcagctgtggtgaattcttg

SEQ ID NO: 44703 - DNA, 201 bp, Homo sapiens
cgttgcaaagacttaataaatacgatgataaaagcgcatactagcagactgagtgttcacagaaaagaagaagcaattaaccctgtataagttcatgaggwatcttcaaagaggtgacaacatggtgtcattcctgtctctagaaataatgctaaacatttaggaatcatttgctcttatgactcaaaacaaccctgttga

SEQ ID NO: 44704 - DNA, 201 bp, Homo sapiens
tatattgacataaatataaacgtaatatttatgcataaattttacatataatatatgtaattttatataacataattatatactttatataatgtaaacartaatatattaataatgatgttgttaattacatagtatggaaaatttaaacagtgtgcttcaaaaaatattcaggacaaaatttaaattacagaaacaaat

SEQ ID NO: 44705 - DNA, 201 bp, Homo sapiens
gctaggccaaagcatgatgctataattatttatattgctaaaatatataatataaacatattacatactttatatattatatattgacataaatataaacktaatatttatgcataaattttacatataatatatgtaattttatataacataattatatactttatataatgtaaacaataatatattaataatgatgtt

SEQ ID NO: 44706 - DNA, 201 bp, Homo sapiens
cgccagaactttatttcacatggcattgcagaattctaggacacataagtggtataacagagttttagaaagctgataatatgtataggagaatgggtgtrcttcattaattgtacttgtaaatattgaaaattaatgggtttccaaagaaaatattcctctgaaagtatccagaaaatcaggaatagtggttagtcacaa

SEQ ID NO: 44707 - DNA, 201 bp, Homo sapiens
ttatgtaggatagtacctgtcgtagaggagtaacaaataaattcttttgtgagcacttatttgatagaaccctaaggctatacactgaaggacatatcctrttgcacagattggctctgggctatgcagaaaggtcaccacaggaataggctatctgtcaatttagatttccctgtgttagaaggaatcaaagtggtaggt

SEQ ID NO: 44708 - DNA, 201 bp, Homo sapiens
ctgctctgcccagccaaagtagcagtttcattcctggcaggtcttactagcagagggatagttcaagaatccttatccacaagtatttgtttgttctcttyccctttctctccataagaagtaaaagcagtaactttctttaataggatctgtgccctttcgttaaaaatagtgaagactgataatagtctactattgaaa

SEQ ID NO: 44709 - DNA, 201 bp, Homo sapiens
tttttttaaattaaatatttgatattagggaattttctataggaaccacattacagatggttaggtttccaagccatcccacaagaacatgacaacttatstaaaagaattgtagttttactaagaggagcctgagctctagagtgggtggtgaagagtggggaggcagtgggggagggggtggtggttatgtgttactgt

SEQ ID NO: 44710 - DNA, 201 bp, Homo sapiens
tcagatgtttcagagcagcaggaagaagataatcttacacctaaaaaaatgtaaaggttccttacttactgaatcaatcagcagcacctgctctgcccagycaaagtagcagtttcattcctggcaggtcttactagcagagggatagttcaagaatccttatccacaagtatttgtttgttctctttccctttctctcca

SEQ ID NO: 44711 - DNA, 201 bp, Homo sapiens
gtttgcaataatctttgaaataaaaaagacttaaacattttagttgaaaagtgagtataaagttagactaattaggtaagtatgatgactgtgtcatggartttaataagcttaaaggagaatcagccatcaccttacaaactaattgtgttacaaaagttaatctttttttttttaaattaaatatttgatattagggaa

SEQ ID NO: 44712 - DNA, 201 bp, Homo sapiens
gttttactttctaaagaaaccagcttgagttaatgtctaccattggcattctctcagagtcactgctcagttctcaccaccagctaggaatgtggacaagytgttaatatatggattttccagactcctaaacacagttctgcattagttggaggctctgagagactggtctgggactgtgctactaccagaattgttgca

SEQ ID NO: 44713 - DNA, 201 bp, Homo sapiens
acacttagcattgagtattcacacattcatttaatcaccctgttgttcataaaatgtaccccacccctaaaataagtctaaagacccacaatgcaaagacyattttatcctcttcagagaataatatctggaattatgctgggctgaggtgggggtagatattcagtggtgtgaaataggagatgggatcaaactgccttt

SEQ ID NO: 44714 - DNA, 201 bp, Homo sapiens
cactagcccatcacaactctacattcatcctccttgtagaagaagaatggctgcttccacagttagtaaataggaaataattgtttaagaaatttttttttaattcacataaaacatctgtttgagttaggaaattaataacaaaaggattttgcattcagaattttgtcttggtgatgacatggaatttatgaacaaata

SEQ ID NO: 44715 - DNA, 201 bp, Homo sapiens
ctttcctgcgccttgtaaagaaggtgccttgcttctcctttgcctactgacatgattgtaagtttcctgagggctccccagccatgcggaactgtgagtcwattaaacctcttcctcttataaattacccagtctcgggcaattctttatagtagtgtgaaaatagactaatacaatcaatgacaacaaaaaaagactatt

SEQ ID NO: 44716 - DNA, 201 bp, Homo sapiens
atagagatgccctaagcatattttagaacctttgatggggcagtttgggacaatgccacagactggaagaatgggatctgttagcataagaaatacaaatrtttatgataatgctgtctttcttgatcaccatgtgctctctgctgtggtgttttgcactgtgagacttggggaaatattatttggattagaataatttct

SEQ ID NO: 44717 - DNA, 201 bp, Homo sapiens
aagaagtattggtgaacagtttgggttactgagttggtaccattaagagagataagatctctccccaaagacgcctagaaaattgagaagtgttgtacttygattgtatagaaacaagagtaagtggtgccagatctcattcttagtgcctctcccactttgtgacattgtttctgtctcccgccattggaaatactgcat

SEQ ID NO: 44718 - DNA, 201 bp, Homo sapiens
tcatgatattgtagtaaattctcatattgtttatagtatttttttcagttgattctcttgggttttccagatatattttatcttctgggagatataacatyatgtttgatgtaaattaaatgatccacaattgagaaaatagtgttgatacaatgagagagaagaggaagagagtaatgcatttcagacagtgaggagagt

SEQ ID NO: 44719 - DNA, 201 bp, Homo sapiens
ctacatagttaaaagtatctacatggggccagactacctggattgaattctatttctgccatacaagctgtgagaactgcttgctcatctgtaaaattagkataacataggtatctatctcatggggtttgttagaaggactaaataagtccctattcttaaagcatttagaagagtacctgaaacaaccagtaaaggtag

SEQ ID NO: 44720 - DNA, 201 bp, Homo sapiens
aaggagtttcactgtcaggatctgatgctgaggccaataaggtctatgtactgccttcacggagcagatgtttagagagagcctgctgtgtgtcagatacygtcctgagagatttcagcagtgaatgaaactctcaaaaatttctaccctcatgaaatttatactttattgatagttttggcagccttgcctcttgtatgt

SEQ ID NO: 44721 - DNA, 201 bp, Homo sapiens
ttctttaaatacataatcaattatcccaaaagcgtttattaaatgatatgttttattattcattcattcattcattcttctttgattaggagttttttaartcatgaataagttctttctattttaggctagctatcctgttttattaatctacttttatatccgtagcactttgttttattattatagctttaggatgct

SEQ ID NO: 44722 - DNA, 201 bp, Homo sapiens
ctcatggaatgagtttggaagtactccctcctttatttttcagagtagtttgagcagaattggtattagtttttttttcctgattatttgttcttcataarctatattgtagtaattagttcttctttaaatgtttgataggattcagcagtgaagccataggtcctgagcctttgtttgctggatgacactttattatgg

SEQ ID NO: 44723 - DNA, 201 bp, Homo sapiens
ctatatcacagattagtgcactggaatgacaaagtacagtcttagccgacacaggccactgtgccattttcttatatactctcaaaccctctcatgaattraaacacctaaagttgagcaaagacatgctgaatagaaccccatacatagtttctttaacatgacatttcttaaccattaagaaatggactctggcccact

SEQ ID NO: 44724 - DNA, 201 bp, Homo sapiens
gaattgcttgaacccggaaggaggaggttgcagtgagctgagattgcaccaccacactccagcctgggcgacagagcacgactccatctcaaaaaaaaaawatatatatatatgtatatatacatttttatttatataatatatattgtcatttatataaatatatatatcttaaaatatatatgtatttttaaaaaatat

SEQ ID NO: 44725 - DNA, 201 bp, Homo sapiens
agaattgcttgaacccggaaggaggaggttgcagtgagctgagattgcaccaccacactccagcctgggcgacagagcacgactccatctcaaaaaaaaaatatatatatatatgtatatatacatttttatttatataatatatattgtcatttatataaatatatatatcttaaaatatatatgtatttttaaaaaata

SEQ ID NO: 44726 - DNA, 201 bp, Homo sapiens
gagaattgcttgaacccggaaggaggaggttgcagtgagctgagattgcaccaccacactccagcctgggcgacagagcacgactccatctcaaaaaaaawatatatatatatatgtatatatacatttttatttatataatatatattgtcatttatataaatatatatatcttaaaatatatatgtatttttaaaaaat

SEQ ID NO: 44727 - DNA, 201 bp, Homo sapiens
gctgagtgggaggattgcttgggcctgggaggtggaggttgcagtggtgagctgtgatcacgccactggcactccagcttgggcaacagagtgaccctgcytccaaaaaaaaaaaaaagtggaataacatgacttttcaccttaactctttggcaattatatatcttggcatattgaggaaacaatgaaagaagcaaatct

SEQ ID NO: 44728 - DNA, 201 bp, Homo sapiens
taaacaaccccaaactccaatgtatctgtgtaggggtacaaatttgaaagaatatgaattaaagatgagaagagggacatatgtagtttggatatttgtcyccacccaagtttcatgtagaattgtgattcccagtgttggaggtggggtctggtgtggagtgattggactttgggggcggatttctcatgatggcttagc

SEQ ID NO: 44729 - DNA, 201 bp, Homo sapiens
cttctagtagcaaggacttttaagatgtagggcagggtacaacagcccattatatttacagaaatgtttaggagcagtacagaattaataaatgttttggrcaatagatgccaaagatttgcaggaaataaagtactttcatttgaatagcctaaagaatttcacagaaaatttgcactaaataataaagaattagaattt

SEQ ID NO: 44730 - DNA, 201 bp, Homo sapiens
gggtagatcacttgaggtcaggagttcgagaccagcctggccaacataaagcaaaactccatctctactaaaaataccaaaattagccgggtgtggtggcrcacagctataatcccagctacttgggaggctgaggcaggagaattgcttgaacccggaaggaggaggttgcagtgagctgagattgcaccaccacactcc

SEQ ID NO: 44731 - DNA, 201 bp, Homo sapiens
atctaaataagataaaatatctacataatagaacagacatgatcaagacaatgtttaaaataaaatatatttagcaattttgtataaatgtatgaatactmgtcctacaattttaaaaaataaattgttgtaaatgggattagctactttccttcttttcacacttttaatctagcagtaaatttaacttgaatttcaact

SEQ ID NO: 44732 - DNA, 201 bp, Homo sapiens
gatttgggagagcattttggctttggggtaagggatgacaaagcgaagccagaaatgagggctccacaatcctgggacagtgagatgacttctttgacccraacagaggcagtgttctgatgacctgtagaaaaaaaagtttggctagcttgtggaagatcttaaatgaggctgagtgtaggtttaagataaaaaggaaca

SEQ ID NO: 44733 - DNA, 201 bp, Homo sapiens
attacatagacatgtttagcaggtttattgctctaccattgacacagggtaaattgcacatactaaatgggtacaattttcgtaagattgacatatgtctrtcaaaaagaactgacaacaccatcaagaaacatactgaacacccctaaattttcctagtgcccttttgtaaccccttccttttgaaggagcaaatgaaag

SEQ ID NO: 44734 - DNA, 201 bp, Homo sapiens
gaggttgaggctgcagtgaactgtgatcctaccactgcactctagcctgggcgacagggcaagaccatgtcgtaaacaaataaaaaaacacaaacaaaccraacattcaattacatagacatgtttagcaggtttattgctctaccattgacacagggtaaattgcacatactaaatgggtacaattttcgtaagattgac

SEQ ID NO: 44735 - DNA, 201 bp, Homo sapiens
agccctctgtggctgctctgtctgacctgtatgggggctgaccctgtaactctggtttcactagaatcagaaatcaatcttgtgaattatcttgggcagaytatgactctccaagtggtaggtccctaataatttgtctggaatagtgcagtaaaaaatagttgggttttaataaaatgatgaagctgtttccataagcaa

SEQ ID NO: 44736 - DNA, 201 bp, Homo sapiens
ttaaggccctgtctactgcttatagatatatacagggtctcagacctctctttgtaagaataacaatttatcatcaaaactatagagtcattttttctgcmaaaatgagtgtagtttcttcccaacttatagaaatattatgtctttgatatgaactttaattgagcagtgaattacttagtggtttgcagtgcttctggg

SEQ ID NO: 44737 - DNA, 201 bp, Homo sapiens
tacacttattagcttggttatttttctaaaaatctggattagtttaggatctaattctcttccattttgatttgttgggtcattttattgtagaatatgtrtataaaattatgcatggcttggttttcttaaataaacttttaattttagaatagttttagatttacagaaaaattacagatagtacagaggagttcttgt

SEQ ID NO: 44738 - DNA, 201 bp, Homo sapiens
actgcatcatattgaacctggaaggaagagtggtaagaaaggaatcatatgagcattgcccttttctattagggaaccaataaggcattaatagccaagcrtttactttaaaaagtcgccattgttgaacccatattagtgtattttgggggaacttcatgctataatgaagcattaggccagagattgaagaagctcaga

SEQ ID NO: 44739 - DNA, 201 bp, Homo sapiens
gtgtccaatcttttggcttccctgggccacagtggaagaagaagtgttgggccacacataaaatacactaatactaatgatagactatgtgaaaaaaaaaacccacaggaaaaacctcataatgttttaagaaagtttacaaatttgtgttgaactacaccacattcaaagctgtcctgggccacagggctgcaggtcgga

SEQ ID NO: 44740 - DNA, 201 bp, Homo sapiens
accgtgttagccaggatggtctcgatctcctgacctcatcatccaccctccttggtctcccaaagtgctgggattacagccgtgagccaccatgcctggcmtaggatgtagttttgcaatgtggaacaaagtgcctacctaagttgggctattatccttccacaaaaactgggagatagggctcctatctcccttgatgtc

SEQ ID NO: 44741 - DNA, 201 bp, Homo sapiens
taactaatgtgaggtgtggtggagaaatctggcttctcaatgctgtttcatttatttatttatgaaacatacaggctagaagaaattggcagtgaaacctstagtctgattttacagagatgggtttcagagacaaggctgagtcgaaaactttacatttttgtcatctcctcacattttgcagttgtctgcttgcagtat

SEQ ID NO: 44742 - DNA, 201 bp, Homo sapiens
agagaatatttgtctactttataattttaacaagaccttgtgtgccaatgagaatgattaggtgccccttctgtcatgtggtcgaggttttgtgactaaaatatgacatatactctatgaaaataaataaatggtttaatgaactataattttatagttgaaggagagaaaaaaggccaccatttggaaaataagaattgt

SEQ ID NO: 44743 - DNA, 201 bp, Homo sapiens
gcaattctcaatgataactctggtgtattatggatagatgagagagaaaatatagggtttcagaaatcttatggtggagtttcatacaaaccagttgcctyctcttaccttggtggcagtctggaatgaggagagtatattagattataaatattaaatatgctttaaatgtcactcgtgttttggtgaaaaatagtgaag

SEQ ID NO: 44744 - DNA, 201 bp, Homo sapiens
aactctagcctgggcagcacagcaagaaaaaacaaacaaacaaacaaaattctgcactctaatttacttagtggatatacattttggtaatttactatatrgtgtttatttattaaaaaatactgtagcctttttaagctaaatttcaatgtttaccttagttatttcattagaatacatttctaaaagtagaatttctat

SEQ ID NO: 44745 - DNA, 201 bp, Homo sapiens
gcagggattgattgcagtgagccgagattgcgccattgaactctagcctgggcagcacagcaagaaaaaacaaacaaacaaacaaaattctgcactctaayttacttagtggatatacattttggtaatttactatatggtgtttatttattaaaaaatactgtagcctttttaagctaaatttcaatgtttaccttagtt

SEQ ID NO: 44746 - DNA, 201 bp, Homo sapiens
ttttagtgtttgatattttaatgcaagaaacaacgcggtggctcacgcctgtaatcccagcactttgggaggccgaggcgggtggatcacgaggtcaggakatcgagaccatcctggctaacacggtgaaaccccgtctctactaaaaatacaaaaaattagccgggcgtggtggcaggcgcctgtagtcccagctactcg

SEQ ID NO: 44747 - DNA, 201 bp, Homo sapiens
tagaagatggctgaataggaacagctccggtcttcagctcccagggagatcaatgcagaaggtgggtgatttctgcatttccaactgaggtacctgactcwtctcattgggactggttacacagtgggtgcagcccatggagggtgacccgaagcagggtggggcatcacctcacccgggaagtgtaaggggtcaggtaac

SEQ ID NO: 44748 - DNA, 201 bp, Homo sapiens
gctcatttttatacctgttcctatacttttgttacacagtcaatacaacataatacttaggtgtgtgtgtatggtttatatgtgagtggtgtgggcggatrctcttgagtattatattgttgtattgtaggatcaaattttatttttttaatcctcttcaacttgctttctccacattttgttttcaagatacagatgctt

SEQ ID NO: 44749 - DNA, 201 bp, Homo sapiens
caaaagttcatatgactgaaattttttgttttgaacctttgaaaactaggaaatatatatcaaacacaagagtaaatataacatatatgtacttaaaataytactactaataataaatcaagtaaatatctatgtacttaaccttacctcgtggtcctgtctccccactcttacttaatcactgttctgaaatttgtattg

SEQ ID NO: 44750 - DNA, 201 bp, Homo sapiens
tatttgcaaaatacatttatttgggtcaggataggaaaagccgctatgtgactttggatactgttcactcaacattcttgctgagactttagatttatagmccagaataatcagctgcatggaattgataagtgaggcaaagtgcaagggataagagagagagaatttgcctttattaagtacttaactatgtgtccacca

SEQ ID NO: 44751 - DNA, 201 bp, Homo sapiens
ttgcctcctgtttgtgaactcatgtctctaacaagtttcagaaagttcctagctattttctattcaaatatgtcatttattctattatctcgattatctcrtcctgagcatgtgacagtatacatgatgggtagtctcattctatccaccatattctttattcagatttatgtatttccaggcctttgtttcactgtactg

SEQ ID NO: 44752 - DNA, 201 bp, Homo sapiens
tttgcttggaatgtgggattatgtgataatctttgtgtagtaataattaataagtgacatatttgcaaaatacatttatttgggtcaggataggaaaagcygctatgtgactttggatactgttcactcaacattcttgctgagactttagatttatagaccagaataatcagctgcatggaattgataagtgaggcaaag

SEQ ID NO: 44753 - DNA, 201 bp, Homo sapiens
aaaagtagttatatgattatcaacttattaaatattctattcaagtcagattctggtagattacatcacatcatcaacaagcggacactcgtagagtaaawcctacagactataatggtgtaggaggcaagattgattgtaaactagcttcttttccttattaaaatgtatgtctctttttgtatatgaatttaaaagtaa

SEQ ID NO: 44754 - DNA, 201 bp, Homo sapiens
ggtatgtgacagttttttattatttgcttggaatgtgggattatgtgataatctttgtgtagtaataattaataagtgacatatttgcaaaatacatttakttgggtcaggataggaaaagccgctatgtgactttggatactgttcactcaacattcttgctgagactttagatttatagaccagaataatcagctgcat

SEQ ID NO: 44755 - DNA, 201 bp, Homo sapiens
tcttctgaatgccatcaaggaagagagagactccatcaggacaagaaatataatcttatgtaacgaattgtgaagtaacgaacatgtaatcaaatatatcycatcaacttttccgttttctgtttgttacaaacaagtcacaaactcaggaagaaagggtcatggtggccaccttaaaggactacctgacacatcagagaa

SEQ ID NO: 44756 - DNA, 201 bp, Homo sapiens
ttcttgcttcctgttctgctctgtactagttatataacttcaaatctctgtgtcttcatatataaactgggaatattaacagtatctaattcagagggctyttgtgaggattaagtgaattaacacataaaaaatgcttgccgttgtgcctgacacgcaggttcagtaactgttagctaatttttttgttgttagtaattt

SEQ ID NO: 44757 - DNA, 201 bp, Homo sapiens
ttttacatacaggaagaaggtcacatgtttaacagaaactattcttgcttcctgttctgctctgtactagttatataacttcaaatctctgtgtcttcatmtataaactgggaatattaacagtatctaattcagagggctcttgtgaggattaagtgaattaacacataaaaaatgcttgccgttgtgcctgacacgcag

SEQ ID NO: 44758 - DNA, 201 bp, Homo sapiens
tttccccaacaaagttgcttgtcttctgaatgccatcaaggaagagagagactccatcaggacaagaaatataatcttatgtaacgaattgtgaagtaacraacatgtaatcaaatatatcccatcaacttttccgttttctgtttgttacaaacaagtcacaaactcaggaagaaagggtcatggtggccaccttaaagg

SEQ ID NO: 44759 - DNA, 201 bp, Homo sapiens
tgtcatctctctgaataattagaagtgttaaagatgactggagccacttacatattctaatatcaatttacaatatcacataaaagcatctttagaatcakgactaaaaactgacttgttcatgtttgtggaacaagtctaattttttaagtttcaatatacctttatttaaaatagttaatgtcacacatgcaaatgata

SEQ ID NO: 44760 - DNA, 201 bp, Homo sapiens
atgtgttgccctgaaataagaggaaaataagcattttcccaattgacccttcagcaatttctccaggctttttttttttttcaggagcccctttccaattycccatcatttttcaataagatgtgggaatttcttccccaattttttttttctggagctacgttttgatttattttgtgttcattgactatggagtcagga

SEQ ID NO: 44761 - DNA, 201 bp, Homo sapiens
aataaatggaaataataacaaacagtatctcagaccacagtgcaatcaaattagaactcaggattaagaaactcactcaaaaccgcacaactacatggaarctgaacaacctgctcctgaatgactattgggtaaataaattaaggcagaaataaataagttctttgaaaccaataagaacaaagacacaacataccagaa

SEQ ID NO: 44762 - DNA, 201 bp, Homo sapiens
ataatgtcaaaaaatgaattatcaggaaataaactaaaaatgaaacttaagtctttagatcaataaaatgcaatacttttgatttttatgaaattcataaygagtgtcacagtttgcaaatgagaatcaaccatttttatttattctcatcctaaatcaaattaaaatttggagtttgtcaatttaaaaaaacagctagtg

SEQ ID NO: 44763 - DNA, 201 bp, Homo sapiens
ctgcttaatggagctgagcagcagcctgcatttcttggcacatttgacaagcaagttcagtctcagttagtaaaccttatttaagaaactaatgttctccrtttgtgtatttgcaaaggatatgttttagataatgtcaaaaaatgaattatcaggaaataaactaaaaatgaaacttaagtctttagatcaataaaatgc

SEQ ID NO: 44764 - DNA, 201 bp, Homo sapiens
caccggagtggtcatgattactgtatcctcagaaagattaatttttagatgtgtgccctgaagcagaatgtgttgtagaagcatgattcactgaattctgycataaatgggaaatgagattgttgggtctgtgcacaaaattacagacttttgtttttgtttttgttttattttcaaagaaaataatgatctttccaaaga

SEQ ID NO: 44765 - DNA, 201 bp, Homo sapiens
aattctaggtacatgaattagtgtagtctcccttgatttttttggctacaaacagtgccagtgatatctgagacttccttggtggcttagggtccagttaytgaggaaagctctggtgcagttttgcttgggactcagaggtcaagtggaccagtctttgagctcctgtggttgcagcagtgggctgagagtgcctgctca

SEQ ID NO: 44766 - DNA, 201 bp, Homo sapiens
atatctcactgaaattatttagaatcaataattgaatttttactaggattttatgaattccatctcctttggagctgtcatatattcttgctttttcatgwttcctgtgtccttacattgatatccgtgcatctcatgtagcagttgcttcttctaactttttcaatttgctttcacagggaaggactttttttgaggaag

SEQ ID NO: 44767 - DNA, 201 bp, Homo sapiens
tatgctgtttgaccttgttgtttaagcaaagccattttgcctaaggtagtgaatctaattgatgcataagtcttaattttattgcttatttacttctcttktccttttcttttctacatatttgttgctactatcttggttcagactttctccacctctcacctatacttttgtagcagtctcctgcctcaggtctcatac

SEQ ID NO: 44768 - DNA, 201 bp, Homo sapiens
gaaatactactttaaaaaaatgttgattttgtatcctgtagtgtaactgaatttgtttaacaactctaagggttttttggtggagtcttttgacttttctmaatatgagtatcatgtcatctgcaaagagggacaatttgactttctctttttgaatctggatgccttttctttctcttgcctgattactctggctaggac

SEQ ID NO: 44769 - DNA, 201 bp, Homo sapiens
gttcttctgtttttgtttttgttttgcttttcttttttttgctatttcattattggtgtatagaaatactactttaaaaaaatgttgattttgtatcctgyagtgtaactgaatttgtttaacaactctaagggttttttggtggagtcttttgacttttctaaatatgagtatcatgtcatctgcaaagagggacaattt

SEQ ID NO: 44770 - DNA, 201 bp, Homo sapiens
agacaagagggtagtagttaaaatttgcgaaggattttcagtgttgtcttctgatattaacatgatgagccagggacagtcatttggctcttttttattcrttgttaaaagtaaggtcaataagaaatgattcaccagggctgtggttgtgaagaagaccgagacccgcgatgggaagctggtgtccgagtcctctgacgt

SEQ ID NO: 44771 - DNA, 201 bp, Homo sapiens
gaaagaaatctgctatgtgttgtgctttcatactaggaagtatgaaataaagccaagcaacaggaataaagataactgaatggattactaataggtaattrttttgggaagcctctataaggttcacatctatactgtgctatattgtctaaaaatgatattagacaaaattgcttattttaagtgataatttctgaggtg

SEQ ID NO: 44772 - DNA, 201 bp, Homo sapiens
ggggcttctggccgatttcagtgaggagcattctctcttacagactgagagtatttaagtgtttagggcaagagggcttatcacaggcttggaatgttttygtgtcggggagaagtttattgtggggttgtaatgtctctgatcagaggggaagttaccttggggctaaacatctctctgggcagagaggaggttacctca

SEQ ID NO: 44773 - DNA, 201 bp, Homo sapiens
ctgattctttgaaaatttagtaaaataaacaaagcccttgcaggactgaataatttttttttaatacagggaatatttaactgtgaaggagaactcatacwgtaaataaagtagtgcataaatagaatttgagaatactgtgaaaaaccttaggaatgcagcttcaataaactggaaaatttagatgaaatgaacaatttt

SEQ ID NO: 44774 - DNA, 201 bp, Homo sapiens
cttctttaaactttttgtatatcacccaactgaaaggaatgcattgtgccactgggcaggaaaataatatggaaataaataagatagaggctactttgctrttatatgtaggtatatatgactatacaatttaatgaaaacaattccatatgaatatgccagaacatataatgaaaattgcttagcataacattctagtcc

SEQ ID NO: 44775 - DNA, 201 bp, Homo sapiens
atgtgtgtaatgctatgtcattgcttattagactctggtagtggttctgaatattgtagacaaagtcgttgccatatgagctcacaggagctcacagtgtratcgacagcataaaatattgcatttctccacgttcgtacagacgcttttatattagcatcacagctgctttcttcaggggtaggcacttttctaaggctg

SEQ ID NO: 44776 - DNA, 201 bp, Homo sapiens
ctgtttgcagacaatatgattctatatctagaaaatcccacagtgtcttctcagaagcttcttgatctgataaacaacttcagcagtttcaggatacaaartcaacgtacaaaaatcactaacattactatacgccaacaagagccaagctgagaggcaaatcaagaatgaaattttgaattagtagccacaaaacaataa

SEQ ID NO: 44777 - DNA, 201 bp, Homo sapiens
cagactcttttaaacaactagatctcatgggaactgagcaagaactcacttgttatcatgaggacagcaccaagacattcataagggatgcaccctcatgrcccaaacacctcccactgggtcccacctccaacactggggattacatttcaacatgagatttggcggggataaacatctaagcgatatcagtcagggatt

SEQ ID NO: 44778 - DNA, 201 bp, Homo sapiens
gaggctgagtgggaggattgcttgggcctgggaggtggaggttgcagtggtgagctgtgatcacgccactggcactccagcttgggcaacagagtgaccckgcctccaaaaaaaaaaaaaagtggaataacatgacttttcaccttaactctttggcaattatatatcttggcatattgaggaaacaatgaaagaagcaaa

SEQ ID NO: 44779 - DNA, 201 bp, Homo sapiens
gtacttggccaatttcaagcttctatgatgtgtatataggctagcatcttattctttctttagcttttctcatgtgattgagagattagttaaaagcccakggaggatgctttcaaaatacaaaacaatctgctgttttgcccataatgaactaaatagcaaatgcttataatacttttacacacgtcagtgtgaaattga

SEQ ID NO: 44780 - DNA, 201 bp, Homo sapiens
tttttttccagctatatataagctgattctaaagaaagaattacaaaaatacatttatatggaaaggcaaaggaaccagaatagccaaaaaaaaaaaaaaacaaaacaaaacaagcaaacaaatttggagcatccactgtacctgattttgagacttgcactataaaactatagtaattaagagtgatatttgcaaaagag

SEQ ID NO: 44781 - DNA, 201 bp, Homo sapiens
agtctccacccactctgatgccagtggccatccctttacctggttgcccattttcctgctactgtgagtgttggctgctaacatctcacagctgctccttyttctggataatgttgtcagccaagcaggagtcactatgtatgagtggttatgcaccaccacccctgcatgctctgacaaccaatcgctaataactgactg

SEQ ID NO: 44782 - DNA, 201 bp, Homo sapiens
gcgcctggccgcgcacatggtatttcttatcactgactacaaaattgactttgtctcatgcaagttttaggaccctcacttatacttccaaccagctgtaragttcaagtctattcctcttcaacacagagataaattatgtatatgctagcctcaggctctcattcacataacatggaatgaatatgattgaaaaacgtg

SEQ ID NO: 44783 - DNA, 201 bp, Homo sapiens
acaaagggaaccattttgggaagtcctgacatagacatttctatacatttttgaaaggggatattttacaaataattatcaaatgaagaaagttggttggkcagttatccagttgggcagagattggattatcagtaactggtgtgataaattcattttcttaaagaaacaaaggccttttatagcattaactgcaatgcc

SEQ ID NO: 44784 - DNA, 201 bp, Homo sapiens
tctattatcctttattcagcaggagtttattttatttttcatctttcttatgatttttaagatatgtactgaatgcacaagagggctaaaatacaaccttrtcttggtctagagacttgccacccagctggtagttttattgtaagaacagttacctggggaggtgatttactggtaagaataaaggtagtatatcctatt

SEQ ID NO: 44785 - DNA, 201 bp, Homo sapiens
tatcactagctttggggaaaaggggttctggcttctgtgacctgccttggagaaggattctagtatttatgactagcctcaggggaaaatggaactgagcmacaggagaacagaaaaaaatcagagaaaaacttttgcttctgaagctgcttctaagtccttcattttggcgtatattttttttttctgagccccaacagg

SEQ ID NO: 44786 - DNA, 201 bp, Homo sapiens
tttcaaatttcttcctagaaggtaaggaactaggagcagagtggtagaggatggggtgactgggaccttgacacttagcattgagtattcacacattcatytaatcaccctgttgttcataaaatgtaccccacccctaaaataagtctaaagacccacaatgcaaagaccattttatcctcttcagagaataatatctgg

SEQ ID NO: 44787 - DNA, 201 bp, Homo sapiens
gataggatgagtagcttcctaggtgggaaagtggaagcagcattccccagagaaggaatatggaatgtagggcacagttagaagaaaagaagcaggagatwacatggtgtgaattgggaacacatcatgaaaggattggaatcaaaacttaatattataaaaatctaaggagccggacatagtggccctagcctgtcgtcc

SEQ ID NO: 44788 - DNA, 201 bp, Homo sapiens
gactccctctcttgctaaaggaaaaaaaaaaaatgcatgaggatgtcaagtattttaaaatgactctaatgtgttgtgcatggataatcgagaaaaatatkggtgctatttttttttttactgaaatgtgaattaaaggaaaaagataattctgaggatgatagagagttcaaaatcagatattttggatttcagaaaaaa

SEQ ID NO: 44789 - DNA, 201 bp, Homo sapiens
atttttttccagctatatataagctgattctaaagaaagaattacaaaaatacatttatatggaaaggcaaaggaaccagaatagccaaaaaaaaaaaaaaacaaaacaaaacaagcaaacaaatttggagcatccactgtacctgattttgagacttgcactataaaactatagtaattaagagtgatatttgcaaaaga

SEQ ID NO: 44790 - DNA, 201 bp, Homo sapiens
agtcagtgcaataaggcaaaagaaagataaaaggcatatatattggcaaagaaaaaataaaatttttctatgtgcagatgacatgattgcgaattccaaasatctattatatttatacgtgctagcaatgaacaattggaaaccaaaattataaaagaataccagttaccaaaacttcaaaaattgatatacgtaagtata

SEQ ID NO: 44791 - DNA, 201 bp, Homo sapiens
ttaaaggttctagtcagtgcaataaggcaaaagaaagataaaaggcatatatattggcaaagaaaaaataaaatttttctatgtgcagatgacatgattgygaattccaaagatctattatatttatacgtgctagcaatgaacaattggaaaccaaaattataaaagaataccagttaccaaaacttcaaaaattgatat

SEQ ID NO: 44792 - DNA, 201 bp, Homo sapiens
gggactttcctaatttgataaaaggtatcaacaaaaagcccacagctaacatcattcttaacagtaaaagaatgaatgctttcttcctaacaacaggaacwtgacaaggctagttatttcactggtcctttttaacattacattaaaggttctagtcagtgcaataaggcaaaagaaagataaaaggcatatatattggca

SEQ ID NO: 44793 - DNA, 201 bp, Homo sapiens
attgaccctttatcatgctgaattgatcctttataatgatttttttgtctctttgtacagtttttgtcttgaaatctattatgtctgatgtaagtatagcyactccttttttggggggctgttcattcagatagagtatcttttatcattcctttgttttcagtctatgtgtatttttgtaagtgaagtgtgtttcttgta

SEQ ID NO: 44794 - DNA, 201 bp, Homo sapiens
cttatagcatcattattaatagccctaaagtgagtataatagtactgatacatactatataataaagtatgatacatactacattattccaagtataatartacttggaaacattatactgagtgaaagaagccagtcaaacactacatattttatgattccattaatataaaatgttatttcatagcagactccaatagg

SEQ ID NO: 44795 - DNA, 201 bp, Homo sapiens
tgttaaagtctctagttgttattatattgaggtctacctgtctctttagctctaatgatatatatctgggtgctctatcattgggtgcatatatatttacratttttatatcctcttgctgaattgaccctttatcatgctgaattgatcctttataatgatttttttgtctctttgtacagtttttgtcttgaaatctat

SEQ ID NO: 44796 - DNA, 201 bp, Homo sapiens
atgaaggagaaataaacactttccagacaagcagatgctaagagaattcatcaccaccagaccagacctacaagaaattcccaagggaatcctgaacttargctgagcatggtggctccaatctatgatcccagcactttgggaagcctaagcagtagcatcacttgagtccaggatttcaagaccagcctgggcaacata

SEQ ID NO: 44797 - DNA, 201 bp, Homo sapiens
tgtgttactatctgacacagcaattcagttcctatctgtatacctaagagagataaaaacatacacccacacaaaaacttacacatgcgtacttatagcakcattattaatagccctaaagtgagtataatagtactgatacatactatataataaagtatgatacatactacattattccaagtataataatacttggaa

SEQ ID NO: 44798 - DNA, 201 bp, Homo sapiens
cacacacacacacacacacacacacacacacacacacacacacacaagttagctgggtgtcatggtgcatgcctctggtcctagctacttgggaggctgargtgggaggatcacttgagcctgggaggtagaggctgtagtgagttgtgatcaggccactgcactccagtctggacaacagagccacagcctgtctcacac

SEQ ID NO: 44799 - DNA, 201 bp, Homo sapiens
gggttgcagtgagccgagatcatgccactccactccagcctggcgacagggcaagactctgtctctgtctctctttctctctctctctctctctctctctmtatatatatatatatatatatacacacacacatacttactattcaatttaatttcctatattacaacaaattggaggatgtattccacattctttctaac

SEQ ID NO: 44800 - DNA, 201 bp, Homo sapiens
tcccaaacaggtggaaacccttattttcaatgtacagatattgaataatgtaaagctacatgatagagggatgagaaattgactgagtttaaaaaaaaaaaagttcagtgtttttatatatagatataatgctttaaaagttttcaaatgctgaacaaatttagtaagatgagggccaggtgcgatggctcatgcctgtaa

SEQ ID NO: 44801 - DNA, 201 bp, Homo sapiens
tgttgtttattaccaagacttttccgtctttgcaaagtttgccttaaagtattgtcataaatgatgaaatataagccatacttatctaaatcacaaagaargtttttagaacatagcacctttgattttaatcagactttgtagctcattagtacattttcaaaatttgatgatcttctaagtgttttctcagcattaaga

SEQ ID NO: 44802 - DNA, 201 bp, Homo sapiens
aggaaggaaggaggaaagaaagaaagaaaaggaaggaaggaaggaaggaaagaagaaagaaagaaagaaagaaagaaagaaagaaagaaagaaagaaagagaaagaaagaaagaaagaaggaaagaatacattagaggtaagcctcagagttgtttccctgtcccacctggaaagcacatactggtccaaaaaattcagca

SEQ ID NO: 44803 - DNA, 201 bp, Homo sapiens
ccagatagaagcataatattgtaatcttcatgtgaaattctttattccaccccatttatccctgttactaagctcctcctcctgtcaggaattcttaataragaatatagaatatattagctttttaaataaataataaaccttctggactgtattgtgaaggcttacaaattatactcttagtgtcaacttcagttcttt

SEQ ID NO: 44804 - DNA, 201 bp, Homo sapiens
aaggaaggaaggaggaaagaaagaaagaaaaggaaggaaggaaggaaggaaagaagaaagaaagaaagaaagaaagaaagaaagaaagaaagaaagaaagagaaagaaagaaagaaagaaggaaagaatacattagaggtaagcctcagagttgtttccctgtcccacctggaaagcacatactggtccaaaaaattcagc

SEQ ID NO: 44805 - DNA, 201 bp, Homo sapiens
ttgaaaaacgtgtaagaaaggtttgtttcagtcaataacactgaattaggcaatttaggctaggttatgctgtggtaacaaacagctaccaattctcagtkactcaacacaacaaaagtttaaatttcacttgcgtttaagtttaatacaggttggtagggagcttttctctacatttttacacatggaccagggattatg

SEQ ID NO: 44806 - DNA, 201 bp, Homo sapiens
tatcatttttagatcattattgtaatgagtctgaattcttttctgacctatttaattccataataatgtatcctcacctactttcaaatgcacataataartttatcaaggattaagaagggatgaaatatttttgggctactaccagacagaagctcaaggcctaggagaacttggctgtgtaggtctgttaactgcatt

SEQ ID NO: 44807 - DNA, 201 bp, Homo sapiens
attattctgaatatatgaataccaagttaaaagtgataagtgaatttgagattagttataaatataggtgttttaatatatcatattttgtgcttgtttakaaggaaacactggagctcctgatcctaccttctccctgaaaagtgttgcaaagcaacgaacctcttccttgaactggcattgaccttggaaaccattata

SEQ ID NO: 44808 - DNA, 201 bp, Homo sapiens
tgcaaaagagttcagaactggttctgaatttggctgtgtaaaatagacaagatactttgaagtcgccggggtgttgaccaaaaggccgcctttgtttgatmaatctacactccaaagttcagaacagcttatcctacctggcatttccattgattagaatggatgtgtttaaggtatccctctctttgatcaataattcta

SEQ ID NO: 44809 - DNA, 201 bp, Homo sapiens
ttaaaaactggaattcagtaaaagctgattaaatttatttaattattatgtcattgtggatttgcagatctgacttctctttgtaattcagcacaaaattstgcatccctcttgtgtgctatttcatagtttaaggtctgattcagatttgttggttttaccatgacaaatctctttatctagagctaagatatggaaatg

SEQ ID NO: 44810 - DNA, 201 bp, Homo sapiens
tgaaggccaccaaattgcttcttgcaggcttctactattcagaaattattaaatactttcaaaaaagtttaattttaaaaatctgagcttaaatgcacccmaaacacgtttctgtagggcattctttgtatgtagcgtaggactttcattttgttactccccttctgtgcattcattcctagcccatgataaaaataaaaa

SEQ ID NO: 44811 - DNA, 201 bp, Homo sapiens
cggcctgaagtacagatttgcatcctctaatactcattcacaaatttctcctgagggaatattgcatcttgagattgtttttaatgacattatcattagcmagatatttaaaatagtttcttttatctttacttgatctctttaaaatgtatatttctgtatacatcttatacataacttagtagcatgataatgcaggta

SEQ ID NO: 44812 - DNA, 201 bp, Homo sapiens
tgtggcattgcttgtatctctgtctttattttattggttaatttgtatctgtaaatattttatcttcccatattgtaaggttcttgaaaacagaaactgtstcttatatttctttgtaactgttccaagagttcaataaataaatatttgttgttgtgggggctgatttgtgggactccccaacctctgcaaataatgtga

SEQ ID NO: 44813 - DNA, 201 bp, Homo sapiens
tctgtgtttttcaaactctttagtgcttcctagaagcactgctcatgatctccaggagtttgatgcagctgccaaattagcttttccactaatggactctkccctggacccttctgtgttaacctctgttttatttttgtagtgccaatgaaaagtgatgtttctctttaactgaggcaaagcaaaatgccccaaagtgtg

SEQ ID NO: 44814 - DNA, 201 bp, Homo sapiens
tcactgtttaatgagatgacattaaaaggctatgctatctggaaatacttatttcgttagaatatccatgtaggatatccatttaggaacccaatgattcytaaatgtaataaaaataaaaatagtctctattatctaaatttgtaagggagggatatttttgcttctaattatttataatgagaaaattattctttgtca

SEQ ID NO: 44815 - DNA, 201 bp, Homo sapiens
aaccaatgctcattaactcttctgaaaattctggggcccttgaattatgctaaacccacactgtcctctataaatgaaacaacaaagcctagatggcagcrtgtctgtttactgcatgttgtactaaatattttaaacccagcgttgaaacctgctcagaacaaaagattcctttcaaaatattgctcattgacaatgcac

SEQ ID NO: 44816 - DNA, 201 bp, Homo sapiens
caagcatctctcttaaatcccaccaatcctgtacttacctttatacagaatgaacgttatttgcccataattgagagtcccaaatgattactaactggctytcttttttgaacaatttcatttattctctgagatgggtttatgtgagtgctataatatgtgtggctataatatgcatgaacagtgttgtgtatatatttt

SEQ ID NO: 44817 - DNA, 201 bp, Homo sapiens
catagttactttcctgtattttgattttttggtttgcatatcactttttcactctggactatgggaccctgaaagcaagaagctcataataaattaatgayggaatgattagatgaacagatgatatatactttgactctcctggcttgtagtgtatgaaccctttagatgttaatttttggttttacaatgtccattcat

SEQ ID NO: 44818 - DNA, 201 bp, Homo sapiens
gctcttgtgccttcccattagacatcctgtggtacctaggggtgaggaaggtcaagagagaagctggcagtcaccactgtcttggtgaggtgtgtgagtgytaaagcaggttgaaatgggatttggggctctgctcttcctgcaggaatgggacaacctgctggaccctttatcagttatatgtacagctcttcacactgc

SEQ ID NO: 44819 - DNA, 201 bp, Homo sapiens
acaatatttttatattatgcttagtcttggaatttacttggaattaggttagctgataaatcctgaaataggcatagttgaaacttaaagtataacttatwtggggttgtatttttcaggtgaagctctgaaagtatcagctgagagatttacagatgacccctgttttctcccaaaaagggaggctgtggttcaagctgc

SEQ ID NO: 44820 - DNA, 201 bp, Homo sapiens
aaagaaaaggaaggaaggaagaaagaaagaaagaaaggaaggaaggaaggaggaaagaaagaaagaaaaggaaggaaggaaggaaggaaagaagaaagaaagaaagaaagaaagaaagaaagaaagaaagaaagaaagagaaagaaagaaagaaagaaggaaagaatacattagaggtaagcctcagagttgtttccctgt

SEQ ID NO: 44821 - DNA, 201 bp, Homo sapiens
ttagtagagacggggtttcaccatgttagccaggatggtcttgatctcctgaccttgtgatccgcccgccttggcctcccaaagtgctgggattacaggcrtgagccaccgcgcctggctgaatgttactctgtttttaagcggttttggaaaagtttatttcttactcttgatataagagctgtgcacagtgctgctata

SEQ ID NO: 44822 - DNA, 201 bp, Homo sapiens
gtttgcaaatattttatcgcattctgtggttgtctcttcactttgtggatagtttctttgctgtgcagaagattttttaacttgatctgatctcatttgtycttttttgctttggtttcttgtgcttgtagggtactactcaagaaatctttgcccacactcatgttctggagagtttccccgatgttttcttttagtagt

SEQ ID NO: 44823 - DNA, 201 bp, Homo sapiens
aaagaaagaaaaggaaggaaggaagaaagaaagaaagaaaggaaggaaggaaggaggaaagaaagaaagaaaaggaaggaaggaaggaaggaaagaagaargaaagaaagaaagaaagaaagaaagaaagaaagaaagaaagagaaagaaagaaagaaagaaggaaagaatacattagaggtaagcctcagagttgtttcc

SEQ ID NO: 44824 - DNA, 201 bp, Homo sapiens
gtagctttcttcaattaagaaaaattcttttgtcttactggattctgattttccctttcttatttcttcttatgttcactgtgtagtttccagagtgcttytccattcctttgttacccttctctctcccaaggcctttctaagaccacctcttagagccccacatactcattcctccttctagtaggctctgatctacca

SEQ ID NO: 44825 - DNA, 201 bp, Homo sapiens
aaagaaagaaagaaaaggaaggaaggaagaaagaaagaaagaaaggaaggaaggaaggaggaaagaaagaaagaaaaggaaggaaggaaggaaggaaagaagaaagaaagaaagaaagaaagaaagaaagaaagaaagaaagaaagagaaagaaagaaagaaagaaggaaagaatacattagaggtaagcctcagagttgt

SEQ ID NO: 44826 - DNA, 201 bp, Homo sapiens
taacaaacaatccattttaagctggtaaaagttaagttgatggcaagcttctctcacttttttcttccagtacaagtttcttgaaattgtcttgctcagaytttagtccttcagatatacatatttttttacctcatgcagtctattcttttcaagagaattaatgacattttaattactaaatgttcagtgctggtttcc

SEQ ID NO: 44827 - DNA, 201 bp, Homo sapiens
gaaagaaagaaagaaaaggaaggaaggaagaaagaaagaaagaaaggaaggaaggaaggaggaaagaaagaaagaaaaggaaggaaggaaggaaggaaagaagaaagaaagaaagaaagaaagaaagaaagaaagaaagaaagaaagagaaagaaagaaagaaagaaggaaagaatacattagaggtaagcctcagagttg

SEQ ID NO: 44828 - DNA, 201 bp, Homo sapiens
tttcatttcctgtctttcccttcctctcctccccaaacagtctgttaccccatgctgtcccttgttgcccaagaacctccaatttcgaaactcaacgaggktctgtatgtatgatttcttaacatctacctccctcacaaacatacttagatgcatgaatccctattaaattgttagacagtgtgagcgggatgctctcct

SEQ ID NO: 44829 - DNA, 201 bp, Homo sapiens
aagaaagaaagaaagaaaaggaaggaaggaagaaagaaagaaagaaaggaaggaaggaaggaggaaagaaagaaagaaaaggaaggaaggaaggaaggaaagaagaaagaaagaaagaaagaaagaaagaaagaaagaaagaaagaaagagaaagaaagaaagaaagaaggaaagaatacattagaggtaagcctcagagt

SEQ ID NO: 44830 - DNA, 201 bp, Homo sapiens
aggaaggaaggaaggaagaaagaaagaaagaaagaaaaggaaggaaggaagaaagaaagaaagaaaggaaggaaggaaggaggaaagaaagaaagaaaagraaggaaggaaggaaggaaagaagaaagaaagaaagaaagaaagaaagaaagaaagaaagaaagaaagagaaagaaagaaagaaagaaggaaagaatacat

SEQ ID NO: 44831 - DNA, 201 bp, Homo sapiens
aagaaagaaagaaagaaagaaaggaaggaaggaaggaaggaaggaagaaagaaagaaagaaagaaaaggaaggaaggaagaaagaaagaaagaaaggaagraaggaaggaggaaagaaagaaagaaaaggaaggaaggaaggaaggaaagaagaaagaaagaaagaaagaaagaaagaaagaaagaaagaaagaaagagaa

SEQ ID NO: 44832 - DNA, 201 bp, Homo sapiens
aggaaagaaagaaagaaagaaagaaaggaaggaaggaaggaaggaaggaagaaagaaagaaagaaagaaaaggaaggaaggaagaaagaaagaaagaaagraaggaaggaaggaggaaagaaagaaagaaaaggaaggaaggaaggaaggaaagaagaaagaaagaaagaaagaaagaaagaaagaaagaaagaaagaaag

SEQ ID NO: 44833 - DNA, 201 bp, Homo sapiens
ggttgcagtgagccaagattgtgccactccactccagccagggagacagaacaagaccctatctctaaaaaagaaagaaagaaagaaagagagaaagatgmagagagagggaaagaaggagagagagagagaaagaaaaatagaaagaaagaaagagaaagataaagaaagagagaaagaaaagaaaagaaagaaggaaag

SEQ ID NO: 44834 - DNA, 201 bp, Homo sapiens
tactgtaatccagataatttctgcagataacttttccaattcactaatcttttcttcagttgtgtatgatatgatgattcatccatttgttaacttttttwaaacatatatatttcttcaattttagatatttggtagattcttgctgtctgcttttttttttaagataggttctcactctgtcacccaggcaagagtaca

SEQ ID NO: 44835 - DNA, 201 bp, Homo sapiens
acaataactgagtaccctatgacacagtcattccaagtatacacccaatagaaagcatatatgtgcaccaaaagacaagtactagccaaaagttggaaaaagaacaaatacggaaatgaccataatagctctaagtagtaaatattcatcaacagttgaattaataaataaactgccttgcatttacacagtggaatacta

SEQ ID NO: 44836 - DNA, 201 bp, Homo sapiens
ttgatgggaaaatatttttaaaagaatatatcatcgtctttaccctcaagcagctcaccatctgatagatacataaatgagtttagagagaaggagaattygctataatgcgagagtgtgggaagataaagatatggatcctgggcatctgaaaagagtttgtggaagagacaatatttgatccaggccttgaagtatagg

SEQ ID NO: 44837 - DNA, 201 bp, Homo sapiens
tattgttgcttgtgggtatttgtcagtgtctgggcattgaagagttaggtatttattgtagtgttctcagtctgggcttgtttgtgcccatctttcttggraaggcttcccaggtatttgaagggatttgggccccaggcccaataatgctgtggttcctgcaaacttatagaggtgcagtcttggtggtcttgtatagaa

SEQ ID NO: 44838 - DNA, 201 bp, Homo sapiens
tctgtctggaagatctgtccaattctgaaatgaaagtaattcaagatggattaaagacttaaacattagacctaaaaccataaaaaccctagaagaaaacytaggcattaccattcaggacataggcatgggcaaagacttcatgtctaaaacaccaaaagcaatggcaacaaaagccaaaattgacaaatgggatctaat

SEQ ID NO: 44839 - DNA, 201 bp, Homo sapiens
caactagaaaaaattctttggagactaatgctaatttaaaaaggagaaaactatgtttaattcacagtgtaacaattttataagattttataagtatgcakaagtttctgcattctaaaggacaatcttttcttaattttgctctaggtattcactggttacaagactttaacttggtgtacagaactgaactctgattaa

SEQ ID NO: 44840 - DNA, 201 bp, Homo sapiens
aaattccaaccatttttcacaattgagccaaccatagcctttgaactcttggtaacttttatgctcatgtcttctctccctctcactatatatatatatayacacacacacacacacacatttatagaagaggtatttgcctacatataaaaatgcatacatatataaattagttgttctaaacaaggtaaatttgtgcct

SEQ ID NO: 44841 - DNA, 201 bp, Homo sapiens
ttgaacaggatataatcccaaaatttaactgggaatctgaaaatccctcaactgcttagagtataattttttaaatcagaaaaaaaaattgtttcactgcmgggataaaggcctatgcatctcaattctgtttttgctaaaaccacatgtgtgtaatcacaggtctctaagtaaaatgaactcacatactttctgaataaa

SEQ ID NO: 44842 - DNA, 201 bp, Homo sapiens
agaaatatggatgtcccacctaaccttagagttatcacaagttaagaggttggaggcatatcacaaattaggctatcttatctgcctcatggatcaaaaamcagtgagttaaaagactatcaagtaatattttagtgatctcacagaagaaccacactggcatcttgaggtacacaagtagaaatagagcaaagccccttt

SEQ ID NO: 44843 - DNA, 201 bp, Homo sapiens
atctaagatagaacagataagaggggaaatgtaattctatgtatagagtgattagtattcatatctctgtgtagaagtgcagagatatgaaatataggtgmaagtccaggaagtacaaatactttaatatggctggagtgtaggctgctgtaaatcaaacttctctcaaaagtttgtgagttcctttatgagtgaatctat

SEQ ID NO: 44844 - DNA, 201 bp, Homo sapiens
atttttcagatatcaaaagttactgcttataatgacaccacatgcataagactttattattttaaatgatgcaaaatgtcactgaatctttccagcttgaractaaaatgcttccatggcacttgacagaagcaacgctaattctcaattacccatctatggttatgagagacagcaaaaacacaggcaattgccttcata

SEQ ID NO: 44845 - DNA, 201 bp, Homo sapiens
ggctcatacctgtaattccagcactttgggggaatgaggaaggaggattacttgaatccaggagtttgagaccagcctgggcaatatagtgagatctcatytctacagaaaattagaaaatcaaccaagtgtggtggtgcacccctatagtcacagctacttgggaggtttaggtaggaagatcccttgagcccaggaggt

SEQ ID NO: 44846 - DNA, 201 bp, Homo sapiens
agagacagcaaaaacacaggcaattgccttcataaagcattaaaaatcttttaggtatttgttactatttctcccccattaaacttttctcccccgaagcytctaagaaggaagaatactgaatgatctgtactttctttttcttttttttttttcttacctacagttttgaagaggatgataagaaacggtcaatgtgga

SEQ ID NO: 44847 - DNA, 201 bp, Homo sapiens
acgactaccctaatctcaaaaagaatggttaggttgggcatggtggctcatacctgtaattccagcactttgggggaatgaggaaggaggattacttgaayccaggagtttgagaccagcctgggcaatatagtgagatctcatctctacagaaaattagaaaatcaaccaagtgtggtggtgcacccctatagtcacagc

SEQ ID NO: 44848 - DNA, 201 bp, Homo sapiens
gatgataaaggttaatgatggaaacgactaccctaatctcaaaaagaatggttaggttgggcatggtggctcatacctgtaattccagcactttgggggamtgaggaaggaggattacttgaatccaggagtttgagaccagcctgggcaatatagtgagatctcatctctacagaaaattagaaaatcaaccaagtgtgg

SEQ ID NO: 44849 - DNA, 201 bp, Homo sapiens
ggatgataaaggttaatgatggaaacgactaccctaatctcaaaaagaatggttaggttgggcatggtggctcatacctgtaattccagcactttgggggratgaggaaggaggattacttgaatccaggagtttgagaccagcctgggcaatatagtgagatctcatctctacagaaaattagaaaatcaaccaagtgtg

SEQ ID NO: 44850 - DNA, 201 bp, Homo sapiens
gcccacaggttttgctgtatgatttccccaacaaagttgcttgtcttctgaatgccatcaaggaagagagagactccatcaggacaagaaatataatcttrtgtaacgaattgtgaagtaacgaacatgtaatcaaatatatcccatcaacttttccgttttctgtttgttacaaacaagtcacaaactcaggaagaaagg

SEQ ID NO: 44851 - DNA, 201 bp, Homo sapiens
ctttgggaggccgaggcaggcagatcacgaggtcaaaagatcaagaccatccaggccaacatggtgaagccccgtctttactaaaaatacaaaacttagcygagcatggtggtgcatgtgtgtagtcccagctactcaggaggctgacgcaggataattgcttgaactcaggaggcgtgggttgcagtgagccgagatcat

SEQ ID NO: 44852 - DNA, 201 bp, Homo sapiens
ataataatggaaattacaatcaattaaaagagatatcctattttatgtttgtaggtgctactgacatattgttctcaagggttagagggaagcgtcattcrtggagggtttataatgtatcgaaggtactgctaggtgatttgcatttgccattacatttaatcctggtaacagccctatgagcataatattattttcatt

SEQ ID NO: 44853 - DNA, 201 bp, Homo sapiens
tttaaattacaatagaaaactcttaaaagaaaacataggataaatttttgtgattttggtttggcattgttagatacaacaccaagtaatgacataaaaaattataatttgatttccttggaagttaaaaaaaatcctctgtgaaaggcactgttaaaagagtgaaaagtcataatagagtgggaaagaatatttgcatat

SEQ ID NO: 44854 - DNA, 201 bp, Homo sapiens
gcctgatattcggacatgatgtgaatacatcagccttggatttgcatgctctaccaatttctgattacatgagaagttgcactgtagatcattgtcatttsttctacactcatactaattgggggaaaggattctattatttgggtgaaaatattgagtgtattagagcaaggacagtgagtttctactgatggcactgtt

SEQ ID NO: 44855 - DNA, 201 bp, Homo sapiens
ttatgccttacattatatacaaaaaatgagtcaaattagataacagctttaaattacaatagaaaactcttaaaagaaaacataggataaatttttgtgaytttggtttggcattgttagatacaacaccaagtaatgacataaaaaattataatttgatttccttggaagttaaaaaaaatcctctgtgaaaggcactgt

SEQ ID NO: 44856 - DNA, 201 bp, Homo sapiens
aacttcagaaaaattctccattccaattagcctgtaagagacaaattgttaattccagtttaataatcttattttcctgaggtgtttttgtttttttttttattttttgagacagtctcactccgtcacacaggctgaagtgcagtggcatgatctcagctaactgcaacctctgtctcctaggttcaagtgattcttata

SEQ ID NO: 44857 - DNA, 201 bp, Homo sapiens
tgctaaggagagcagaaataattatgcgttatttccctggtatcattaggttaaattcagacaatcctgtagctttggtttcagatggtttacgaagcacrtttaagtatcaaaatcaggaaagtgaaacaaagcattaagattctagtatcaacggaatcaaatactccaggatacaatatctacctaattctgagggca

SEQ ID NO: 44858 - DNA, 201 bp, Homo sapiens
tcaggaaagtgaaacaaagcattaagattctagtatcaacggaatcaaatactccaggatacaatatctacctaattctgagggcaattcattttctaaayttgctccagaaataactgtttcccctcagcttcaacatactcattgagatggcccctgatcattgctttccttcaaaatctttgcaggatatttgaatca

SEQ ID NO: 44859 - DNA, 201 bp, Homo sapiens
cccctgatcattgctttccttcaaaatctttgcaggatatttgaatcagcagcctccctctttttaatgttcttagttcttatcaaagacaacatcagaakaactaatacatggtttttgtttgttttttgagtttttttggatataggacagggcagtccatctgaacctgttttgattaaggtagcattcttctctcac

SEQ ID NO: 44860 - DNA, 201 bp, Homo sapiens
cagctctaaatttcatgtttttacaccatcacttaagaagtaagagactgagcattctctttatatgacatgcaaaaaagaatctgtgccagaaccactcyagcagatttcctcctacccagctggtcgggactgggtcacatgaaacacctctagaccaatcagttgtaaaaggtcaggtctggtttaattgcctgaata

SEQ ID NO: 44861 - DNA, 201 bp, Homo sapiens
taggcccatttcactgaacactgtcttaataaggtgggcttctaagcttgattcctaggaaactagctttagcccttcccctttctttcctgctccaggargtatatcagaatgcaagtgagtaaaagggcataattagagggataaccttgaagccactccaatttgtgagaaaacagtaaatcattttctaatttcaat

SEQ ID NO: 44862 - DNA, 201 bp, Homo sapiens
gcaccattcagaaaaaccaagtggggacaaagttcaatgatgaaggatttttaaaaaattttaaaaagactcccaaactagagaggaagaatatcttagtrcaaagtattcagaggtagaataagaagactgtgttgggagaccttagccaggacaaaacagtcccaattaagagatcttttcaatgagctacaaaatatt

SEQ ID NO: 44863 - DNA, 201 bp, Homo sapiens
atcagtcactgttacactaaatcttaaaatgagttgtcacacactatgttctatgtgtggttaagttttacaatgtatctattgggacattttgttagctyctaacaggcaatttatttgtggtatagctgtagctttaaaatctgttttaatcattaggcagtctcttgtttctgaaattttgctatcatttgtctatgt

SEQ ID NO: 44864 - DNA, 201 bp, Homo sapiens
gcaggggtgaaagtatattggtcggagttctccggggaaacagaaccaatagattgtgtgtgtgtgtgtgtgtgtgtgtgtgtgtgtgtgtgtgtgtgtgtataggtgggtgcgtgtatgtgtgtgtgtgggtgtaggtgggtggagagagaaaaatttattttaagggattgacttgtacaatttcggagactggcaagc

SEQ ID NO: 44865 - DNA, 201 bp, Homo sapiens
tgcaggggtgaaagtatattggtcggagttctccggggaaacagaaccaatagattgtgtgtgtgtgtgtgtgtgtgtgtgtgtgtgtgtgtgtgtgtgtgtataggtgggtgcgtgtatgtgtgtgtgtgggtgtaggtgggtggagagagaaaaatttattttaagggattgacttgtacaatttcggagactggcaag

SEQ ID NO: 44866 - DNA, 201 bp, Homo sapiens
caggagttcgagaccagcctgccaatatggtgaaaccccgtctctattaaaaatacaaaaattagctgggcatggtggtgggcacctatagtcccagctaytcaggtggctgaagtgggagaatcccttgaacttgggaggtggaggttgcagtgagccaagatcgtgccactgcactccagcctgggcgacagagcgaga

SEQ ID NO: 44867 - DNA, 201 bp, Homo sapiens
ttgcaggggtgaaagtatattggtcggagttctccggggaaacagaaccaatagattgtgtgtgtgtgtgtgtgtgtgtgtgtgtgtgtgtgtgtgtgtgtgtataggtgggtgcgtgtatgtgtgtgtgtgggtgtaggtgggtggagagagaaaaatttattttaagggattgacttgtacaatttcggagactggcaa

SEQ ID NO: 44868 - DNA, 201 bp, Homo sapiens
cttgcaggggtgaaagtatattggtcggagttctccggggaaacagaaccaatagattgtgtgtgtgtgtgtgtgtgtgtgtgtgtgtgtgtgtgtgtgtgtgtataggtgggtgcgtgtatgtgtgtgtgtgggtgtaggtgggtggagagagaaaaatttattttaagggattgacttgtacaatttcggagactggca

SEQ ID NO: 44869 - DNA, 201 bp, Homo sapiens
ttaaattgtggtagatttatacttaaagtcataaaatatgcatataaaactattgaaaaaataccagaaaattcgactgtgattatctctggactgtggcrttataagtgcttcttattatttatttttcagctttattaaggtataattggcaaatattttttatatttacagtatataacatgatgtttgatatacgta

SEQ ID NO: 44870 - DNA, 201 bp, Homo sapiens
tacccattctccttgagtaatacaatgaatgcctcaggtttccaccaaaatccatgtttataactgctttagaatgcttcattcaaatgcttccatcttgsatgattccaactatccacttttccatgtctagagccaggtggccaagagcttcaagagacaaagcacaacaggcagattgacattgctataaattaatgc

SEQ ID NO: 44871 - DNA, 201 bp, Homo sapiens
acttctacctacttatctgtctcttttgctggcttgtccaactctaatatattcttcctttttctttattagtctacccattctccttgagtaatacaatkaatgcctcaggtttccaccaaaatccatgtttataactgctttagaatgcttcattcaaatgcttccatcttggatgattccaactatccacttttccat

SEQ ID NO: 44872 - DNA, 201 bp, Homo sapiens
cgagattgcgccactgcactccagactgggtgacagagcgagactttgtctcaaaaaaataaataaataaataaattattttgccaacatctgaaaattakgtaatatcattggagtcattgtaaagtctctgatcacagaggctaagtttctgttttataatgacatatatccagtgcctatttgtcgaaagaataaatg

SEQ ID NO: 44873 - DNA, 201 bp, Homo sapiens
ggacaatcagctgaacctgtgagacggaggttgcagtgagccgagattgcgccactgcactccagactgggtgacagagcgagactttgtctcaaaaaaawaaataaataaataaattattttgccaacatctgaaaattatgtaatatcattggagtcattgtaaagtctctgatcacagaggctaagtttctgttttat

SEQ ID NO: 44874 - DNA, 201 bp, Homo sapiens
catttagaagatagaacatggcttttaaaaagtcttatcatctacgtaagggtcaggagatgggagaagttaaaaatcaggaccctgaaattccccaggaragtaactatcagggagcaacgtaaaaaaaattattttcccatattccttttccatatacaagagttctatgcatataggagccccatgtagaaattttta

SEQ ID NO: 44875 - DNA, 201 bp, Homo sapiens
agagtggatgacatttaggatgagagttaagaggagaaggagccagacactgtacaagctgggagaagagaactctaggcagaggatcaacagcagcaaaygccttgggaacacagtgttttatctcccagctttagagtctgaaaacaaagttaatgcaattgcagcctacttgaataaaaggaagatgatattggcaaa

SEQ ID NO: 44876 - DNA, 201 bp, Homo sapiens
atgtgtatacacaaatctaagattagctgttatcacattaaatcttaataaacaatactgaaatgtatttgtattgtaattatgctgaaaggaaactgagyccaagatatgctaattgatttctccccaggctttgtatttagaatgtggcagagttgggactcaaacacaggttgtcgactataaaactgatgttttgtt

SEQ ID NO: 44877 - DNA, 201 bp, Homo sapiens
agctatgatgaaacaggggcccctgctgagatgtttcctatgactggtgaaggctaagcagcctgcatacactggtaatcctatgtatgtatgtatgagtrtatttatttttgcttcaattgtctgttagacctaaagtttctgggccagggaggatgagatagtttgtatgtctcaaattcaggaattaaaatagagcaa

SEQ ID NO: 44878 - DNA, 201 bp, Homo sapiens
agtccaagatatgctaattgatttctccccaggctttgtatttagaatgtggcagagttgggactcaaacacaggttgtcgactataaaactgatgttttrttcttgggccaataagacatatttctcaagaagttagtttttaataaatgtccaacaatgatagactggattaagaaaatgtggcacatatacaccatgg

SEQ ID NO: 44879 - DNA, 201 bp, Homo sapiens
ataggagagaattgaacaatgagaacacatggacacaggaaggggaacatcacacactggggcctgttgtgggtgaggggaggggggagggatagcatttrgagatatacctaatgttaaatgacgagttgctgggttcagcacaccaacatagcacatgtatacatatgtaactaacctgcacgttgtgcacatgtaccc

SEQ ID NO: 44880 - DNA, 201 bp, Homo sapiens
gttgaatgggtaacacagtgagatttagtaatagtagtattgaatttaaagtgagtaaaatcagagatggaattgaggccagctcactgctgttgaagggrcagaggaaagagcactagttgttaagatctcagtgcagttcccatgctcttttgacttaaaaattaagaagcttatttttttctgcagggcatccagaat

SEQ ID NO: 44881 - DNA, 201 bp, Homo sapiens
tttcattcatgaattagtatgaaattcaaaggttatgacatgcctctgcaataatacttaagtatacttagaaaatatttaaattaggccaggcatggtgsctcacgcctgtaatcccagcactttgggaggctaaggtgagtggatcacgaggtcaggagatcgagaccattgtggctaacagtgaaaccccatctctac

SEQ ID NO: 44882 - DNA, 201 bp, Homo sapiens
aataattagtaagtatttgttgaatgaatggatgaataatgaatttgttcatttatttttagttttgtcaataatatctgatttttaaataatctacagcwaatcaaattaatgggaaacttgcattaaaaaactgtaaagtgtattttatttttaaataccctctcagtgctatgaatttttaatacagtaaccctgaat

SEQ ID NO: 44883 - DNA, 201 bp, Homo sapiens
aaaaaaaagcaatcgtatacaggtaaactgaattgttagtgcatactttgtacaaaggaaatattatcttaagaatattattattataatatattggtttracgcatcagctcagaaatctcctacttaaaagcagtgcggccaatgataaactgaaattcccctaagctttggtttcttcatctatccaatgtctgtaaa

SEQ ID NO: 44884 - DNA, 201 bp, Homo sapiens
aggaggcagaggttgcagtgagctgagatcctgccactgcactccagcaggggtgacagagcgagactccgtctcaaaaaaaaaaaaaaaaaaaaaaaaaaggcttttctttcaaaatggaatatgagctacaggagaaaaagacactcatattatttttctttgaatctctcccagggcctaccattgtgtcgtatgtta

SEQ ID NO: 44885 - DNA, 201 bp, Homo sapiens
actgccatcactctctttttaaatatctctaccccttgtttctcacatcaaattctatgcatatttcaagaaaaagcttatattcatgtcctctagaaatytttggcaataatgaattctttctgttctcgtgcactgtagctcttaagggacgtgccaactcaattacatcatcccagacaagtatatgctcttgatgaa

SEQ ID NO: 44886 - DNA, 201 bp, Homo sapiens
ccacaatagaagtttaaatcatttatgagcatgaacagcaaagaagatggtgacctgggcaacatagcaagaccctgtctctaccaaaaaaaaaaaaaaaattagctgggccttgtggcgtgcgcctgtagtcccagctactcaggaggctgaggtgggagaattgcttgagcccaggagttgaagattacagtgagctat

SEQ ID NO: 44887 - DNA, 201 bp, Homo sapiens
ggcggaggttgcagtgagccgaggtggcgccactgcactccagcctgggtgacacagcaagactcagtctcaaaaaaaaaaaaaaaaaaaaaaggccggcrcagtggctcacgcctgtaatcccagcactttgggaggctgaggcgggtggatcacgaggtcaggaaatcgagaccatcctggctaacacggtgaaacccc

SEQ ID NO: 44888 - DNA, 201 bp, Homo sapiens
tgtcccaatcagagtgagtgtgggtgtgtgtttagtacttgctgtgtgtgatggaatggtgtcctgttcagggctggttcccttcttgtgcactgagtttyggggataggctccagccacctgtgacccagaactggaattaaaaaattaatgagttaattaatatatattactgtaaaataaaagttcataaagtagaca

SEQ ID NO: 44889 - DNA, 201 bp, Homo sapiens
aatagcagttggtaacccctctcaattccctttcatttaatatggtttacatatacatatcttgcattttgtagcttgattaaaacatgctttttttttttggcattgcagctctgtcctacaatcttaaatatttataaaaactaaaggttttagttctagcagtccttaccctctgcagtccggcagtgtttgaaaatt

SEQ ID NO: 44890 - DNA, 201 bp, Homo sapiens
gtgatgacaaaaactgcaactacttttgcaccatcctaataattttgactgtgcactataacttttatcactttctgccttctatgatagttatttttatrtattttcttctctattatgttgaaagtcttggagggcaagaacgctttattatgtgctgaattatgtctccacccaaatttatatattgacatcgtaacc

SEQ ID NO: 44891 - DNA, 201 bp, Homo sapiens
tttattccaccccatttatccctgttactaagctcctcctcctgtcaggaattcttaatagagaatatagaatatattagctttttaaataaataataaascttctggactgtattgtgaaggcttacaaattatactcttagtgtcaacttcagttcttttgtactacgttggggaaaaacctaaactggaagtggacgg

SEQ ID NO: 44892 - DNA, 201 bp, Homo sapiens
tgactgtgactaattagagaacttaattaagctgtcaagaaggaataaagataatcagtctcagtcagttcccactcttttgcacccaggagcatgagcarattcactcaggccaccacataatccttgctctctcacttgatattgatgtaacctcatatgcaccttcctgaggtgatgcaggttatacaagtaaatgac

SEQ ID NO: 44893 - DNA, 201 bp, Homo sapiens
cctagaacctataatgtgatttgtttatggttcttctttgccttattgatatgtgtattgagacccaggttttaaaatttaaaaatgttttgttatgaaakagtcttaatctaaatgtctttaaatggtttggggcctataagggtgactgagtacttctatttgctcttccaaagaaacacaacttggaaattagtatat

SEQ ID NO: 44894 - DNA, 201 bp, Homo sapiens
aaaacacattacataattagcataagagttaattgaacataatcacttatccatctagatacaaaaaaatgaggcagaacttattgatttatgtttgggcrtagacaatattgagcagcttattgtgacattaatagactatcaggctcagttatttttatttttattatttatttatttttttatatggggtttcactgt

SEQ ID NO: 44895 - DNA, 201 bp, Homo sapiens
aggatggtctcgatctcctgacctcgtgagccgcccgcctcggcctcccaaaatgctgggattacaggcgtgagccaccgcgcctggcctgaaattgattkttgacagatgttgcagaaggtaaaagttaagatacaattttccccatgtggatatcctatagacctagtaacaattatcaaatcaatcatcttttctctt

SEQ ID NO: 44896 - DNA, 201 bp, Homo sapiens
tccaaagaacaggacacagcatagcagatggcttcaattgcaggaatcaaatgagaaagtgagaaagagcctgtgaaggagattaaagtcacagtcttttrgaaggtaatctcggaaatacctctcacttttgcttcattctgttcataagaaacaagttaatagttcaagcctatactcaagagaagggagttttgcata

SEQ ID NO: 44897 - DNA, 201 bp, Homo sapiens
gcacttttgttcaacctgtcccaataatagactatatagttaaccaaaataactgaagaattatcttaagagctagggtgcatgactatcagatattaaaagtaaaaaaaatctgataatttcaattattagatgtgatatacttaaaagagtatgctcatacaatacttctgggaatgtaaattgttacaatctcagtga

SEQ ID NO: 44898 - DNA, 201 bp, Homo sapiens
tcagactttgtagctcattagtacattttcaaaatttgatgatcttctaagtgttttctcagcattaagaagcagggctgacctattatatctcaggaatytatattgttcacaaactctagtgaaatgtagtcaacatctggaatgctacatttcacccagatagaagcataatattgtaatcttcatgtgaaattcttt

SEQ ID NO: 44899 - DNA, 201 bp, Homo sapiens
agaatttattatgctcaacatcactaatataattttattagttatttaagaaacaaacccaagaaactcttccacagaatctaaatgaaaggaaatgattwaaaaaaaatgctaacaaggatgtggagtaaggggaattcttatgtactgttagtgggaatgttaattagtacagctatttattatggaaaatactattga

SEQ ID NO: 44900 - DNA, 201 bp, Homo sapiens
aaaaacaagagctgctcctgcaccaccacactcttaattggacaaagattggatcagattgtaagaatttattatgctcaacatcactaatataattttawtagttatttaagaaacaaacccaagaaactcttccacagaatctaaatgaaaggaaatgatttaaaaaaaatgctaacaaggatgtggagtaaggggaat

SEQ ID NO: 44901 - DNA, 201 bp, Homo sapiens
gtgaacgccgtttctaaataggatcccaatgcctggtgggagaggcagcctcactctaccgtgcaggctggacaaaggtcccagccctgaagtcttagackctgagagtcaacgaaattgttaaaaaaaaaaaaaacagaaaacaaaacaaaacaaaaaaaaaaaacaagagctgctcctgcaccaccacactcttaattg

SEQ ID NO: 44902 - DNA, 201 bp, Homo sapiens
agagctgcaagtgttatcaggagttttcagcaaactatttaaaatagtcaaaaactgagcagttaaaaagtaccttctgaagtgaacgccgtttctaaatrggatcccaatgcctggtgggagaggcagcctcactctaccgtgcaggctggacaaaggtcccagccctgaagtcttagactctgagagtcaacgaaattg

SEQ ID NO: 44903 - DNA, 201 bp, Homo sapiens
caactttaaaaacaagagctgcaagtgttatcaggagttttcagcaaactatttaaaatagtcaaaaactgagcagttaaaaagtaccttctgaagtgaaygccgtttctaaataggatcccaatgcctggtgggagaggcagcctcactctaccgtgcaggctggacaaaggtcccagccctgaagtcttagactctgag

SEQ ID NO: 44904 - DNA, 201 bp, Homo sapiens
aaaggaaaatagccacagttaaagtagtataaaattatatataacaaagtcccagaagtttatacattataaaagtggcaagtaccaaaattgtggctcawatagggaagctgttgcaccaggagtgtggcaacagaagtctttaagaccatactcaaactgaaagcaactttaaaaacaagagctgcaagtgttatcagg

SEQ ID NO: 44905 - DNA, 201 bp, Homo sapiens
atatgaaagctttaaaaaaggaaaatagccacagttaaagtagtataaaattatatataacaaagtcccagaagtttatacattataaaagtggcaagtaycaaaattgtggctcatatagggaagctgttgcaccaggagtgtggcaacagaagtctttaagaccatactcaaactgaaagcaactttaaaaacaagagc

SEQ ID NO: 44906 - DNA, 201 bp, Homo sapiens
attgtatcatgtgggacaagctggattaaaggattggtagcaaataatgaaacatgtcagcagcttaaaatgaaaagtgaaaaggtttatttctcactacrtcatatattcgttgttcattggaggtcagcaaggggtgtcagcatgtattagtcacgcagagacccatactgatgaagactatatcttgaaacttgcttc

SEQ ID NO: 44907 - DNA, 201 bp, Homo sapiens
agcaagaacacgccaaacccaaagttaatagaggaaaataaataataaagatcagcacagaatgaaacaaattagaggcaaaaaagcaaacaaaagattcrtgaaaaaagttagtttttgaaaagtaaaccaaatcaacaaactattatatagattaagaaaaagacctaaataaataatatcagaaatgaacaatgagat

SEQ ID NO: 44908 - DNA, 201 bp, Homo sapiens
agtttggagtggagagatgctggattgggctctgatagacaatttgctttatcaaaaaggcctcgacatgtagaaaaaaacctacacaattgatcaggcaraaataagggatttggatgtttttatactttttcttgatgttgccttttgtttctctgtttctagcaaatacaaatggaaataaataatgatcagactatt

SEQ ID NO: 44909 - DNA, 201 bp, Homo sapiens
gttggaggtggggcctggtgggaggtgtttgggtaataggggcagattcctcatgatgagctgtcctcaggatagtgcattatcagaagatctggtcattkaaaagtgtgtggcacctcccacttccctcttgctcctgttctccccacgtcgtgcacctgttcccacttcatctcctactgtgagtaaatattccctgag

SEQ ID NO: 44910 - DNA, 201 bp, Homo sapiens
tataaattacccagtctgaagtatttttttgtagcaattcaagaatgacctaactcgtaccatttacccatttttaatgggattgctttttgcttgctcarttgtttaagttccttatagatcctggatagtaaaactatgttagattcatagtttgcaaatattttcttccattgtgtgggttgtctatgtactctgttg

SEQ ID NO: 44911 - DNA, 201 bp, Homo sapiens
tctcatattaaattgtaactctcacaattcccatgtgtcatcggaggaacctagtgggaggtgatggaattaagagggtgggtcttttctgtgctgttctygtgatagtgaatgagtctcatgagatctgatggttttaaaaagaggagtttccctgcacaagctgtctctctttgcctgcctccatccatgtaagatgtg

SEQ ID NO: 44912 - DNA, 201 bp, Homo sapiens
aaattatattttaaaaatgtaagaataaaatcatttgtagtcttatcacccagagataactatttcaagtgttttctgtgaagatatttgaaaaaaattatatatatatatatatttggacatttattagtattccaaaatgggatcagattatacaaattattctccaatctgtttttactcccatttaagtctgccacc

SEQ ID NO: 44913 - DNA, 201 bp, Homo sapiens
ggagcctttgggagctaattaggccatgagtgtatagtcctcatcaataggattagtgtccttataagaagagacatgatgtgttctgctatctgccatgygaagatacagagagaaggcagccatctgcagaccagaaagctggccctcaccagacaccagatgggccagtaccttgaactaggacttcccagcctccag

SEQ ID NO: 44914 - DNA, 201 bp, Homo sapiens
ttagttgaagtacatacatccaaaaggagtatatccctgaaccctaaaatgatctttagatgtgataacagaaactttcttgggaatccctgagaaatggyagacctgccagaaagcagagtgctctggagtgaatgtttgtatcttccccacctgccactgcaaatccatgtgttgaaatcctaactcccagggtgatga

SEQ ID NO: 44915 - DNA, 201 bp, Homo sapiens
aatgaaaacagaaacaagacataccaaaaaacctatggaacacagaaaaaatagtacaagagggaagtttaaaggaataagcacctatataaaaaaaaaaaagatttcaaataacctagtgatacacctcaaaaaatagaaaagcaagaacacgccaaacccaaagttaatagaggaaaataaataataaagatcagcaca

SEQ ID NO: 44916 - DNA, 201 bp, Homo sapiens
gaatgacaaatgagttaatgaagaaattaagaaggaaattttaaatacttcttgaaagaaatgaaaacagaaacaagacataccaaaaaacctatggaacrcagaaaaaatagtacaagagggaagtttaaaggaataagcacctatataaaaaaaaaaaagatttcaaataacctagtgatacacctcaaaaaatagaaa

SEQ ID NO: 44917 - DNA, 201 bp, Homo sapiens
tcttgtgatagtgaggttaattctcacgagatctgatggttttataaaggcttcttccttcactgggctctcattctccttcctgccatgatgtgaaaaargatgtgtttgcttccccttccaccatgattgtaagtttcctgaggcctccctagccatgtggaactgtgagtcaattaaacctcttttctttataaatga

SEQ ID NO: 44918 - DNA, 201 bp, Homo sapiens
atatggcttggctatgtccccaccaaaatctcatcttgaattatagttcccataattcccacatgttgttgtgggagggaccccatagagataattgaatyacaggggtggtttcccccatcctgttcttgtgatagtgaggttaattctcacgagatctgatggttttataaaggcttcttccttcactgggctctcatt

SEQ ID NO: 44919 - DNA, 201 bp, Homo sapiens
ttgtgaagaatgattgatatggcttggctatgtccccaccaaaatctcatcttgaattatagttcccataattcccacatgttgttgtgggagggaccccrtagagataattgaattacaggggtggtttcccccatcctgttcttgtgatagtgaggttaattctcacgagatctgatggttttataaaggcttcttcct

SEQ ID NO: 44920 - DNA, 201 bp, Homo sapiens
atctagctggccctctagatcttttttgtaccagcctagatgctgtaggtccaaaataaaaccaatgaatagatgggttacctttttttttttttttttttttcagataactaatcatagtttgaatagctgtgatgagaattggcacaatcttgcatcttctgtaggggacagattttcttagaaaagttacagatgtgt

SEQ ID NO: 44921 - DNA, 201 bp, Homo sapiens
aatctagctggccctctagatcttttttgtaccagcctagatgctgtaggtccaaaataaaaccaatgaatagatgggttacctttttttttttttttttttttcagataactaatcatagtttgaatagctgtgatgagaattggcacaatcttgcatcttctgtaggggacagattttcttagaaaagttacagatgtg

SEQ ID NO: 44922 - DNA, 201 bp, Homo sapiens
gaatctagctggccctctagatcttttttgtaccagcctagatgctgtaggtccaaaataaaaccaatgaatagatgggttacctttttttttttttttttttttcagataactaatcatagtttgaatagctgtgatgagaattggcacaatcttgcatcttctgtaggggacagattttcttagaaaagttacagatgt

SEQ ID NO: 44923 - DNA, 201 bp, Homo sapiens
agaatctagctggccctctagatcttttttgtaccagcctagatgctgtaggtccaaaataaaaccaatgaatagatgggttacctttttttttttttttttttttcagataactaatcatagtttgaatagctgtgatgagaattggcacaatcttgcatcttctgtaggggacagattttcttagaaaagttacagatg

SEQ ID NO: 44924 - DNA, 201 bp, Homo sapiens
tctgattcacatgcctctgacagttcaaggttattttatttatttatttatttattttgagacagagtctctctgtgtcacccaggcttgagtgcagtggygcaatcttggctcactgcaactccacctcccggattcaagcaattctcctgcctcagcctcccaagtagctgggattacaggcatgtgccaccacacctg

SEQ ID NO: 44925 - DNA, 201 bp, Homo sapiens
taccaccttacccgagccagaataaccattattaaaaagtcaaaaaaaaaaaatccccaaaagatgctcgggtggacgtggtgaaagaggaacacttatakgctgctggtggaaatacacattagtacaacctctatggaaaagagtatggagatttctcaaagctaaaagtagatctaccatttgatccaggaatctcac

SEQ ID NO: 44926 - DNA, 201 bp, Homo sapiens
atgtcattttatagagttagtcaaaaagcaataaaatatatagtggctgccctactagtaactaatgtacacaaactataacaactaaaataattcagtcrtggtgtagttataaaagccacagtacagaaggatacactgaagctgacctagtacacttagaaaatctttcatttgtattaccatgtagtattcatgtat

SEQ ID NO: 44927 - DNA, 201 bp, Homo sapiens
cacctaccatcaaagttcatgttctgagaataataatgtcttattataatttttgaataaatatgtcctgcttattaattaaaattgttctgtgcacaaarcatgttattactgttttcttccagctaatgagtcatagtactgagatgattacttttgagattaatcatttttaaatattgcaaagtatatctgttgcat

SEQ ID NO: 44928 - DNA, 201 bp, Homo sapiens
ttgaaatgtaaatggataactggataaacaaaaatttgatcccatttatatataaagaatacttgcagacataaaaaattaatattgtagtggaagaatgracaaagaatatggttatattattaaccactttctccttataaaagttatggcagacaaatatttgaaaaatattaaaaataaaatagttagaataagatg

SEQ ID NO: 44929 - DNA, 201 bp, Homo sapiens
tacggcactataagattcctgaagtgcctgcgagggattttgacctcccttttccctttgctcactctatctgggggtgcctaccatggatagagggcctrcccttgcctggatgagcagtctaggcctgcccttgtttgagtgatcagctcaaacctaatgtgaaggagaacttgtccgtgacttgcgatgtgatgtctg

SEQ ID NO: 44930 - DNA, 201 bp, Homo sapiens
gacataagccttatagtaatttgggaatatgcgtaaaatgaaaatctttataaacttttcatacgtgcatcatctgtatccatatctgtactatacttcasggaacctatccaaaggaaataatataaagtgataaactttttatttttttttgagatggagtctcgctctgtcatccaggctggagtgcagtggcacgat

SEQ ID NO: 44931 - DNA, 201 bp, Homo sapiens
ccctcaattgccaaagagtacttaagctggttcactggtaattcaaaaatggaaaagaaccctggccagtttctcggccccaagggcagagacagacagayactccttctctagggcttcaggatcccactgaagagtggcctcagccaaagatcattggtttctaagagtaaagtaccagactgttgagggaagcagaga

SEQ ID NO: 44932 - DNA, 201 bp, Homo sapiens
gtgaagggccattcctacagtcacataaactgtgttacattgttaacattgagaaggtggcatcttctaacaacccagcattccttttatacatcttctgrtattttctagaatcagagtaaaggatttaaaactttctagaggaaagcaagtatttcttcttgtactaatcactttctttcccagaaaaacatctttcaa

SEQ ID NO: 44933 - DNA, 201 bp, Homo sapiens
tatttcttcttgtactaatcactttctttcccagaaaaacatctttcaaatttcttcctagaaggtaaggaactaggagcagagtggtagaggatggggtractgggaccttgacacttagcattgagtattcacacattcatttaatcaccctgttgttcataaaatgtaccccacccctaaaataagtctaaagaccca

SEQ ID NO: 44934 - DNA, 201 bp, Homo sapiens
gcttgcatttacaaagcatttctgcccccgctgtcttttctaagatacaaccctgagagatggaatagaaaatgaagcgagggagggaggaaactcacctkgcctcacttctgctagggtttcagaattaaatctttctgaaagcatagttggagtatgtgaaatctgtatgttctatggctcatatctttttgttcatta

SEQ ID NO: 44935 - DNA, 201 bp, Homo sapiens
tcattaaataagaaatctctttgcacatgactcgttttgctttctgaggtgaaacatttatattctaatataatgtgttaatgacaatagcaatttaaatrttgtagcacacacagcaaagggaattagaaatattggtaagttttatgttttccccatttagaaacagtctatgtcttatgatttaaactgtaaaggcag

SEQ ID NO: 44936 - DNA, 201 bp, Homo sapiens
cagtactttaatgaatatattctatgcatagaatttttttcagaaatgaaattttaaatttcaacttctgtctctctccaaaaaaaattgtaataccttawcctcaacctcgtcatgtctcattttagattttgtcattctctccaaacttatttagatacttaattctttatttattttcttattcagaaagaatgcttt

SEQ ID NO: 44937 - DNA, 201 bp, Homo sapiens
agttttggaggagacaaatattcaaatcatagcagtcttgtcctaaattaaaaataataataattaaaacagaaaaactggcagctccaaggttttgaaartattctcctgtattttgttttaggagtggaatggtcttagatttatatttggttatattagatttttagtattcccatgtatttggagttttctaacgtt

SEQ ID NO: 44938 - DNA, 201 bp, Homo sapiens
tgcagatgagggctttctgcagagttctgaagtggcacagggaatcacatggcaggggggctgagcatactcatcatcttaaggccccacctcttactgcygccacattggggattaaatttcaacttgagttttggaggagacaaatattcaaatcatagcagtcttgtcctaaattaaaaataataataattaaaacag

SEQ ID NO: 44939 - DNA, 201 bp, Homo sapiens
aatggtgtcttttaataagtgaaaagctgattttggtgaaatccagtttagttttatttttaacggttaatgctgtttttttctctctttgtattaatctrttttctgttgtttcaggtaacaggatacctcaaactgggtaatttataaagaaaagaaatttattttttacagttatggaggctaagtccaaggtcaaag

SEQ ID NO: 44940 - DNA, 201 bp, Homo sapiens
gaaacacacatacatacaccacaaagacatatcttgaacacctaaaaaatgcaaaactattgtgaaagaaaccttcatagcaccagtactgtggtgcacamagtttaaccagtttgaggtgcctgcctgctactgagatacagcagtgaactcttctaccatttcaatgagatatccttctgagttctcacaggctgttta

SEQ ID NO: 44941 - DNA, 201 bp, Homo sapiens
gcaatatatttacttgtttaaaaagatgattgtgctctggtcattcagtatctcttccctaactaaatttaagcactcctttcatgttggtcaaaaccacrtacagagttttctgtgtccctgatttttttctaccttctgagaatagaatgtaagtaaaagaagaatgtaacaggggttttttttttagacaaataaaaa

SEQ ID NO: 44942 - DNA, 201 bp, Homo sapiens
tctcatcctgtgacttagaatgcattaactgtctaggaatgcagcccagtaggtttcaaaatcattttaccaagctcctattcaagatggagttgttctgrttcacatgcctctgacagttcaaggttattttatttatttatttatttattttgagacagagtctctctgtgtcacccaggcttgagtgcagtggcgcaa

SEQ ID NO: 44943 - DNA, 201 bp, Homo sapiens
gatttctttttgtttactaatttgaaaaaaaaatctgttaaaggcatccatttctcaccagttaataatgtaaaaaagactggattggcatgtttaaattmccagaatcatcagttaaggattgattaaatgcctgatatcatcacttagaaaagtgtcttgaacttgatggagcttatggtaacaaagtttatatttaaa

SEQ ID NO: 44944 - DNA, 201 bp, Homo sapiens
gtttgacaaaattaaccaaaactttaacagaaatatgcccaagaatgtgtcaacagaatgtccttcttcaccattacagtgcttctgctcatttctctccygaaacaagggcaatgtttcaggaatatccatgggaaatcactgggcattcaacttacagtcctaatttggttctttctgatttctttttgtttactaatt

SEQ ID NO: 44945 - DNA, 201 bp, Homo sapiens
caaaacctttactgaaaatgtgttttatgaaaaaattatgcatagaattcaacatttttgcacaaaaataaacttgtgctaacttgtgataacgtgcgtggacaggatctagtttgatgggttaaaaatcagagacatcagtttgaaaagagccctatattagtctgttctaatgctgctaataaagacagaactgagact

SEQ ID NO: 44946 - DNA, 201 bp, Homo sapiens
tgtttatttttgtctttctttctttcttttcttttcttttttttatttgaaatggagttttgctcttattgcccaggctggagtacaatggtgcgatctcrgctcaccacaacctccgcttccctggttcaagcaattctcctgcctcagcctcccaagtagctgggattacaggcatgcaccaccacgcccagctaattt

SEQ ID NO: 44947 - DNA, 201 bp, Homo sapiens
tttgcctgtttatttttgtctttctttctttcttttcttttcttttttttatttgaaatggagttttgctcttattgcccaggctggagtacaatggtgcratctcggctcaccacaacctccgcttccctggttcaagcaattctcctgcctcagcctcccaagtagctgggattacaggcatgcaccaccacgcccagc

SEQ ID NO: 44948 - DNA, 201 bp, Homo sapiens
tctaggtcaagttgacaacttctccttaataacttggtaaccttacctgaaaatggagatgacaacacctacctacctcattgtggtgtaaaaattaggtkaaaaaaattaggtgaatatgtagaaagtgtttggaacagtggtgcatgatgcaaagtatggactttgttagtattttattattatcgttattagcatttc

SEQ ID NO: 44949 - DNA, 201 bp, Homo sapiens
cagcaatttgttcttgcacataatcttctttgattgcataagaaatgtggaaccactcttttgtgttgattgcagcactcaggttagtattttcgaaaaaycagccagcaaatgcttagttcttgaatccctcagtgaaatggcattttaacactattgttaacctttctccaagaaacttacagaagtgtctgaattcat

SEQ ID NO: 44950 - DNA, 201 bp, Homo sapiens
gtttcaccatactggtcaggctggtctcaaactcctgacctcaggtgatccacccgccttggcctcccaaagtgctgggattacaggtgtgagccaccacrccattatttcagatgtgggatatttcaagatgattcagaaactttctgctgctttcagaaatgtatgcatagcttgtcattataaaaagggacttttcaa

SEQ ID NO: 44951 - DNA, 201 bp, Homo sapiens
ctcttaccttcatctgcagtctgtttgcaaaacagcaatttgttcttgcacataatcttctttgattgcataagaaatgtggaaccactcttttgtgttgrttgcagcactcaggttagtattttcgaaaaaccagccagcaaatgcttagttcttgaatccctcagtgaaatggcattttaacactattgttaacctttc

SEQ ID NO: 44952 - DNA, 201 bp, Homo sapiens
tcttggaggaaagtcagggccaagcccaggcaccatgaatgacagcaggaggtggacagattgctgggtggaagggggtacatccctggtgaggccccacytttgggccatagagggcctgaaagctggggcctgggctgccagtcccacagactagagtgggaacttgtggtgccttttctgggcccaccaatggttgcc

SEQ ID NO: 44953 - DNA, 201 bp, Homo sapiens
acctttgggccatagagggcctgaaagctggggcctgggctgccagtcccacagactagagtgggaacttgtggtgccttttctgggcccaccaatggttkcccatgagccaaatcagtgcacacttcctcccatttgaggcccataaaagccaaagtctcagccagaggtgagcagacaatgggatgaccagctgcagag

SEQ ID NO: 44954 - DNA, 201 bp, Homo sapiens
ggaccctaagcccagttacactagggttattgcagcctcataaatgtgccgcctttgttgtcttggataagatccagaagaattctccgaattaccaggcrgattgtttttctcttttcttactttctctcaaatgttgtttctctctgagctgagccacttggagctggaagtgggatgacacagggccccactgtggcc

SEQ ID NO: 44955 - DNA, 201 bp, Homo sapiens
taataattaaaacagaaaaactggcagctccaaggttttgaaagtattctcctgtattttgttttaggagtggaatggtcttagatttatatttggttatrttagatttttagtattcccatgtatttggagttttctaacgttattttaatattttaatttgattttacataggttttttgcttaggttaatatttaaga

SEQ ID NO: 44956 - DNA, 201 bp, Homo sapiens
tgaacttggggattcagattgctgttgaatagtagtgaatttaaatgctcaattcaaatgccaaattttcttctggtaaatgtacaattaggaatcaaatrtgaattcccctagcaatttgctcctgtttttatatatggccttccttggatttcagaggaagactgaatctattgaacaatttattgtgtatttggccct

SEQ ID NO: 44957 - DNA, 201 bp, Homo sapiens
aaaccaacataattttttttaattcaggacatgaatgaaaacttttctaaagagatggatattttaaaggaaagccaatcagaacttctatgaaagactacacatttcggcaactacaaaatgcagtgaaaagcttttaaaatagattagaccaagcagaagaaagaatttcagaactcaaaaacaaggctttcaaattaa

SEQ ID NO: 44958 - DNA, 201 bp, Homo sapiens
agagcagctagggttcaggagaatattcattatacatccaaatttgggaattattctcagaggcataattattaaagctttgagagccaaagagcttctcrgggtaggctatgtgaaaagagaagaaaatgaatctacaggttagatattagtctttattttgaaatataatatattgtaataccaaatactaatttggcc

SEQ ID NO: 44959 - DNA, 201 bp, Homo sapiens
acaatatcacaatcagaaaatcaacagtgatacatttcattgaccttactcaattttgccagttttacatttacccaattgtgtatgagcatttattttgtttttttttaacccttttaagaagacaattaatatttaaggttttgtttgtttgtggttgttctggttcagtatgaatgagtttgaagggctcatttttct

SEQ ID NO: 44960 - DNA, 201 bp, Homo sapiens
aatggaaaccaaaagcaagcaggagtagctattcttaaaacaaataaaatagactttagagcaacaatattaaaaaaggacaaagaaggtcattatgtaawtaaaataggataaattcaacaagaagatataacatgtctaaatttatatgcaccgaactctagagctcacagattcataaggcaattcctaccaggtcta

SEQ ID NO: 44961 - DNA, 201 bp, Homo sapiens
aagtaaactgtgaaatgctgctagtgttgtaattatagcctcattttatttctgaatgatgataaagtgcttttgtttttgttgatgttgttgttgttgasagtgcctaatctattaggctttttcaacacggtttctgaaagaggctatcgaaagacaattgtagtactagtccattgcaaaagtgaacagtctacccac

SEQ ID NO: 44962 - DNA, 201 bp, Homo sapiens
agtcagagtagtttttagggtcaaatgctaaactactgaaacaaataaagtaagattcaatagctcagacaagatagaagtgtatttttctcacataacarttgcaaatgagtattctgggttagcagtgccttccttccacatagtcactcaaggtcttattctggtagtgcctctgccttattcaccatgtgatataaa

SEQ ID NO: 44963 - DNA, 201 bp, Homo sapiens
tttagtagagatggggtttcgccgtgttagccaggatggtcttgatctcctgacctcgtgatccgcccgtctcagcctcccaaagtgctgggattataggygtgagccaccgcgctgagccttgagttgatttttgtatgtggtataaggaagaggtccggcttcaatcttctgaacctggctagcctgttatcacagcac

SEQ ID NO: 44964 - DNA, 201 bp, Homo sapiens
atgatgctggccttatagaaggagttagggaagagtccctcctcctccattttatagaatagtttcagtaggaatggtaccagctcttctttgtacatctrgtagaattcggctgtgtttccatcaggtcctgggctttttttggttggtaggctatttattaccgagttaattttgtagctccttgttgacctgttcagg

SEQ ID NO: 44965 - DNA, 201 bp, Homo sapiens
gcttctctaattttttcagttgtgagattaggttgttaatttaagatttttctaaattttgatgtggccatttagtgctatgaatttccctcttaacactkccttagctgtgtctcagagattctggtatattgtatgtatgggggtctaacctcccactttgctggacctgcagctacttttgctggaaagcccaagtat

SEQ ID NO: 44966 - DNA, 201 bp, Homo sapiens
tatattgtatgtatgggggtctaacctcccactttgctggacctgcagctacttttgctggaaagcccaagtatctaaggctccagggtctccacatatgrctgagcagctgctcttccaagactccaagtgtctctgtctgtcagactgaaggccctggtacaatgggttcacaaggagatctcctgacctgaaggttac

SEQ ID NO: 44967 - DNA, 201 bp, Homo sapiens
gtgggggaggttctccttgctctgtgttgttcccaggtgggcagttgtcctgtcttgcccttctttgttctctgtgggtcaagttgtttccttgattagtygtaatcatccagtgagtaactggatgtttcagttgagggcattgtattactcacccctttcattcttctccctgacagccatgcacaccagctgcatcta

SEQ ID NO: 44968 - DNA, 201 bp, Homo sapiens
gtttccagattagagcttagtagcctagaagaaaaaaaggaatactcatattttcagtagttcttcaatataaccaaaaaggaaatttagctttgaatttmtaccacaatattcttatctgctctagggtggaaatacatagtagcaacagggttaaagcaatgaacactttctttttttattccacttttaagcaggagt

SEQ ID NO: 44969 - DNA, 201 bp, Homo sapiens
gaagaaaaaaaggaatactcatattttcagtagttcttcaatataaccaaaaaggaaatttagctttgaatttctaccacaatattcttatctgctctagrgtggaaatacatagtagcaacagggttaaagcaatgaacactttctttttttattccacttttaagcaggagttagagcaccttctattattaaaaagaa

SEQ ID NO: 44970 - DNA, 201 bp, Homo sapiens
gggtgatgattgggggatgaagcagatggaaagggtgtaggtaaagtgggagcaggatgaggagagtgtgagaggcaaatggaaggatcatctaagacatyagaatcgggtagagaagaagttctttggaagattatgcaatttttatgtaattttacgtatcagataaagcccaaaagacctgaacatatggggtctctg

SEQ ID NO: 44971 - DNA, 201 bp, Homo sapiens
tttactgttaaaaagatgtggctgaacatgacctttaaaagcctaaccaaatgcacggtgagttcctttccatgttgtagtgatttctttataaattttcyacttacggtctttggaatataagaaaagggtaatgattcatttatagaaaagtaagagccttcccacaatcaagtatagatattttcaaatggaatgtta

SEQ ID NO: 44972 - DNA, 201 bp, Homo sapiens
tcattgctggtgtctactctggttgtcagtggccatgccatatgggttattaaatgttttgactgccacaccttcctataccagtcatgaattctgtggtsaaatatgtttttacggcccaaatgcttgtaaatagtctgtctaataatcagcacgtgaattagaatcacaccattcaatataacatctactgaaaaagag

SEQ ID NO: 44973 - DNA, 201 bp, Homo sapiens
aggagagagataatagaacttactgtattatggatgtcaataacacaagtatatttaagagacagcctgaatggaggaatttctaatacaaataagatgamagtattcacaaggccacaaaccagtggcaagaagtgggaaatgttatctactagatccatagatctcagatgatattcagtatggctcatactcatcagc

SEQ ID NO: 44974 - DNA, 201 bp, Homo sapiens
aatggattggagggcagagatgattaactttaagatatttctccatggaatttgaatgagcctgagagacagacattatcttgtgaaagggtctattcaartgtggttacatttttggccttcttttctgtaatagataatgagataatagtaaggagaagaataaacagttgttctcctggtggatcagtactttaggca

SEQ ID NO: 44975 - DNA, 201 bp, Homo sapiens
acgttttggtgggaaggtcatgagtttggtttggacatgaagatattctttggtccaaattctgttaggacgattaaaatatgtggttggaatgaccaatmctgtatcctaagatgagaataatatactcatataataagattagttatggcataccacaaaaatataattaccagtaattaatggggccattgaaagcat

SEQ ID NO: 44976 - DNA, 201 bp, Homo sapiens
tatggcacttcacggctgacagtgaggggatccacgttttggtgggaaggtcatgagtttggtttggacatgaagatattctttggtccaaattctgttargacgattaaaatatgtggttggaatgaccaatcctgtatcctaagatgagaataatatactcatataataagattagttatggcataccacaaaaatata

SEQ ID NO: 44977 - DNA, 201 bp, Homo sapiens
gagaattttagagcaaaatcctataattgtagaaacagagacatgaaaaacatttgctaaaaatctgcaattcaatcccagcactttgagaggccgaggcrggtggatcacctggggtcaggggtttgagaccagcctggccaacatggtgaaaccccgtctctactaaaaatacaaaaattagccgggcatggtagcagt

SEQ ID NO: 44978 - DNA, 201 bp, Homo sapiens
aaagcagaagactagcatacattatattttagaattaaaataaaatgtaattaaatttaattaattaattatattttagcattaaaataaaatgtaattawttgtaaaatcaattgactaattaaatgtacttaatcaattaattataaaataaaattgtaattaattgattaattgattattgaaaactaccatgtttcc

SEQ ID NO: 44979 - DNA, 201 bp, Homo sapiens
aattatattttaaaaatgtaagaataaaatcatttgtagtcttatcacccagagataactatttcaagtgttttctgtgaagatatttgaaaaaaattatatatatatatatatttggacatttattagtattccaaaatgggatcagattatacaaattattctccaatctgtttttactcccatttaagtctgccaccc

SEQ ID NO: 44980 - DNA, 201 bp, Homo sapiens
attatattttaaaaatgtaagaataaaatcatttgtagtcttatcacccagagataactatttcaagtgttttctgtgaagatatttgaaaaaaattatayatatatatatatttggacatttattagtattccaaaatgggatcagattatacaaattattctccaatctgtttttactcccatttaagtctgccaccca

SEQ ID NO: 44981 - DNA, 201 bp, Homo sapiens
aaggataaggtagatgttatccaggagaagtaggaggtgaagatgaaaaaacacattcctaaaaagataacagtttatgcagacatcctcctggggaaaakagctcagtgcccgtgaattctggaaagaactgagtggcttcagttcagagattgagggggcatatagtgttagatgagactgggaggcaggtaggcaagg

SEQ ID NO: 44982 - DNA, 201 bp, Homo sapiens
cagctaaacaaatcctaaatgaacaaaagcatgttggaaagataaacctggaaaaatattttttctttgtatctcctgtgtattttttctctgaaaacccrataaattatcataaagttgaagagggtgggaaaacaatttcagaaacaaaatataaaattgctactgatttgatgattttacattttccttaaaaattat

SEQ ID NO: 44983 - DNA, 201 bp, Homo sapiens
tgtgtcctgcttaaaatataattgctaaactttaaggtcatgaagatactgtgtagaaactttattgtttttcctttcatatttaaatgtatcatacaccygaaattttttttttttttttttttttttttttttttgaggtggagtcttgctctgtcacccaggctggagtgcagtggcgcgatctcggctcactacaag

SEQ ID NO: 44984 - DNA, 201 bp, Homo sapiens
atctattccaaaagattgagaagaagagaatcctccctaatacattctacaagcccagtatcaccctggtaccaaagcaaaggaaagacttaacaaaaaakagaaaactacagaccagatctctgatgaatatagatgcaaaaatgctcaacaaaatagtagcaaaccaaatccaacagcgcatcaaaaaaataatccact

SEQ ID NO: 44985 - DNA, 201 bp, Homo sapiens
actgaaatctttaaaatattgaatcaaaattgtattagttttaatttacttaaattttaaatttattagttttaaattacttaaattttaaaattattttwaaaatttgcacagaaaggtcctgggatttttatgtacattgcattgactctgttgattaacttaagagaactgaaatctttacaatattgaactaaactg

SEQ ID NO: 44986 - DNA, 201 bp, Homo sapiens
ataatccactatattcacatggatttcactttagggatgcagagatggtttaacaaattcaagggaataaatgtgattcatcagataaacagaattttttwaaataaatatatgatcatttctatagatgcagaaaaagcattcaataaaatccagcatgactttatgataaaaaccctcaacaaactagacatagaagaa

SEQ ID NO: 44987 - DNA, 201 bp, Homo sapiens
ttgggtcctcttcacctccaaagacccaagctgccacagcatggccccatttttagagaagagccaccacctgagtttattcttccctggggcccaatagcccctgcacctccatatccctggggcttgctgaccttccacctcatctaccaggaaagctgcagcatcatgacaaaagatgaacatagtggtgcagctgta

SEQ ID NO: 44988 - DNA, 201 bp, Homo sapiens
caagggaataaatgtgattcatcagataaacagaatttttttaaataaatatatgatcatttctatagatgcagaaaaagcattcaataaaatccagcatractttatgataaaaaccctcaacaaactagacatagaagaaacatacctctaaataattaaagctgtatattccaaacccatagccaacatcatactgaa

SEQ ID NO: 44989 - DNA, 201 bp, Homo sapiens
acctgaaatcttgaaattgaaaaattcaataagtgaaataaaaaatacaatagaaaaacttcaatagtagaactgaattaagcagaaaaaaaatttctgarggtgaatagagaaattacccaatgagacaaaaaagaggagaaaagaaaagaaaaacagaatgaaaaagaatgaagaaactctataggatataagagacat

SEQ ID NO: 44990 - DNA, 201 bp, Homo sapiens
atggacaaatcaattactctttctcaattccaattttgtcattattaaaatgaggaaagaagatccatgataggtttgctgtgatgattatataataatgyatataaaatgtatggtacagagtgacgacacaataaatggtgattgttattttcaaattacttcaaattctctaaaacagaatgtaaacagacaggagaa

SEQ ID NO: 44991 - DNA, 201 bp, Homo sapiens
taatcaaaattgaacagttgttagtgagacaaacaaagaaaaaagagagatgacccacataaatcaaaaatcataatgcaggcattacaacagataccacrgaaatataaaggatcacaagagaatattgtgaacaactatatgccaataaattggaaaacctagaggaaatgaataaatttttggatacatccaccttcg

SEQ ID NO: 44992 - DNA, 201 bp, Homo sapiens
agaaaaaccatagcgcagagctggtgtggaatttaaaattctttacagaatcccacaaaacttagaatatggggcaaacccacataatgccatagctggaygatgaaaaagtttatagtcaacagctgatgacagaaaaaggataaaaacattttggccaaaaaaacagcatagaatagtcatcatagatagctaattcat

SEQ ID NO: 44993 - DNA, 201 bp, Homo sapiens
agacaaacaaagaaaaaagagagatgacccacataaatcaaaaatcataatgcaggcattacaacagataccacggaaatataaaggatcacaagagaatrttgtgaacaactatatgccaataaattggaaaacctagaggaaatgaataaatttttggatacatccaccttcgaagactgaaccaggaagaatttgaaa

SEQ ID NO: 44994 - DNA, 201 bp, Homo sapiens
ggctcctccaatctatgacattccctcagtcttttcttgtctttcatgaccttgccacttttaaagaatactagtcagttatattgcagaataactgccarttggggttggattgatgttttctcattattggattgaagttatgcatttttggcaggcatgctacagtgatataaccttctcagcctatatatcagggag

SEQ ID NO: 44995 - DNA, 201 bp, Homo sapiens
tctcaaatcagagtgaaataaacatttaattacctggagtgcatgggatagggtattcttctttaagctagtatttatatttgtatgtatgcattcatacatgtaagttaggaactgcttaaccatcaggaaaaggttttccttccactttacccttttctttcacttgctactttgtcccccattgtgaaaaagctttct

SEQ ID NO: 44996 - DNA, 201 bp, Homo sapiens
gaaataaacatttaattacctggagtgcatgggatagggtattcttctttaagctagtatttatatttgtatgtatgcattcatacatgtaagttaggaaytgcttaaccatcaggaaaaggttttccttccactttacccttttctttcacttgctactttgtcccccattgtgaaaaagctttctaaaagcctgagtcc

SEQ ID NO: 44997 - DNA, 201 bp, Homo sapiens
aaatgatgaattttagaaaacagactttgatgtagctaatggagggagactgggaattttataactccagtatctgtaaactaaataatggagtttcaacrggaaaaatattctggagtctgatagcaaaagttctctaagtgaatagaggcacttgaggtcctatactggtagggaaagtcacagcaagagattcagggt

SEQ ID NO: 44998 - DNA, 201 bp, Homo sapiens
ctgaactgatagaattgatagtctgcaagaaaaataggaataaaagtggaaacaagtgatttgtaggaatgagaacactaaatataatattttgtcctttsaacattaaaagtatttttgtttattacaatttatcctcacttgtagagaattcattcaaaactatcttcagatagcttaatgtaactgtttggaaatcac

SEQ ID NO: 44999 - DNA, 201 bp, Homo sapiens
aaaaacacctaaatatctgaagggattgatcatattcctgaagttggagattcaatattaagatgtcagttattcccagattgacttacagattgatttaycactgtcttaaattctcagcagactcttttatgaaaaccgatcatttgaggtggttacattggaggatacgtttgccaaaactcatcaaactgcatttaa

SEQ ID NO: 45000 - DNA, 201 bp, Homo sapiens
aggatgcccacttttataactccccttcaggattctagtactgaaggttatcagccagagcaatcaggaaaaagaaagaaaagtcatccaaattggaaaaygggaggccaaattgtccttctttgcaatgaaattatcttatattaagaaaaacctaaagactccaccaaaacactcttagatttgaaaaattaaggaaag

SEQ ID NO: 45001 - DNA, 201 bp, Homo sapiens
agggtagcaggtgcttgctgtaggaagattcagtgggactggtgaatataatttttaagtatgaatagaattcaatttttaagcctctggacttaactgtyagtaagtctgtaagatggatatagaagtgctgagaatatatgagtggagcatcagtagtattaatatctgataggcctgaatgtcactggctatactgag

SEQ ID NO: 45002 - DNA, 201 bp, Homo sapiens
ctgcagcattaacttctcgggctcaggcaatcctcccacctcagcctcctgaatagctgggaccacacctggctaatttatttttattttttgtagagatrgtgtctccctatgttccccaggctggtctcaaattcctaggctcaaaggattttcctgtttcagcttcccaaattgctgggattataggcatgagccact

SEQ ID NO: 45003 - DNA, 201 bp, Homo sapiens
gagtaaggatgttaaatcagaaataaaaaatctcccaataacaacagcacaaagcctaggaccagatgacttcactgctaaattctaccaaatttttaaaraactaaaatcagttctcacaattttgcaaaaaagtaaaaaggagtacaaactttcttactcattttataagggaagcattaccctgataccaaaaccaga

SEQ ID NO: 45004 - DNA, 201 bp, Homo sapiens
cagaccaatattttgaatgaacatagacgcaaatatcctcaacaaaaaactaacaaatgaaatccaacagcatatcagaaggattatacattgcaattacrtgggattatttttctaggaatgcaaggatagtttaacatatgcaagtcaataaatgtgatacatcacagcaacaattgaatgatcacctcaatagtggca

SEQ ID NO: 45005 - DNA, 201 bp, Homo sapiens
tactgaatggagaaaactgaaagcttttccttgaaaaactgggataggacaatgatgcccactttcaccactcttatttaacatagcactggaagtcctarccagaataattaggcaagagaaaggaataaagtgcagctgggtgcagtggcatatttgtgtagtcccagctactcaggaggctagaatgagaggatcact

SEQ ID NO: 45006 - DNA, 201 bp, Homo sapiens
ttttatcaatgtggtcttcaattatatatttgtgaccaggatggaaaagtggaggttggatgttagtacaattggggaacattgtaggaggttgacacaamgggttttggtaagtaggtaaattttatcctgaaggagattctgaacttgcttatgtccttttcaaatattttttgaagaaaggaaaataatctgacattt

SEQ ID NO: 45007 - DNA, 201 bp, Homo sapiens
tgtatggaaccacgaaagacctcaaataactaaatcagttctgagaaaaatgaataaagctagaggcataatactgcttgtctccaaaatatactacaaakctatagtaatcaaagcagtgtgatactgatataaaaacagacacatagacaaatggaacagaatagagaacccagaaataaatccacgtatgtatagcca

SEQ ID NO: 45008 - DNA, 201 bp, Homo sapiens
aggtggaagaatgaaactagatctctatctctcactatatacagaaatcaactcaaaatgggtgaaaacttaaatgtaagacccaagtctataacactacyagaagaaaactagagatattggcctgggcaaagtttttgtggttaagagttcaaaaacataggctataaaagcaaaaatagaccaatggattatataaag

SEQ ID NO: 45009 - DNA, 201 bp, Homo sapiens
atgttcaatatcactaatcatcaggggaatgcaaattaaatccagagaggtataatttttccccaattagaatggctgttattaaaaaaaaatcagaaatrttggtgaggatgtggagaaaagggagctcttatacactgttgatgagaatgtaaattaggacatctattttgaaaaatagtataatgtttcctccaaaaa

SEQ ID NO: 45010 - DNA, 201 bp, Homo sapiens
attctctatagtcaagatatggaatcagcctaattgcttatcaccagattaatggataaagataatatagtatatatacacgatggaatactattcattcwtatatatatatatatatatatatatatatatatttgaataaaatgaatgaaatcctgtcattcttggaaacatgggtgagtctggaggggattatgttat

SEQ ID NO: 45011 - DNA, 201 bp, Homo sapiens
agcaatctacagattcaatgcaatttctatcaaattaccaacactattttttacagaattagaaaaatcaatcctaaaattcacatggaaccaaaaaatascccaaatagtcaaagcaacctaaacaaaaagaacaaatctggaggcatcacattacctaacttgaaattttactacaaggctaacgtaaccaaatcagca

SEQ ID NO: 45012 - DNA, 201 bp, Homo sapiens
aggccaaataattctcttttaacaactgctaagtaaattcaactttgtatatgtggatagttttaataaaagtaaaccaaggagttagtaaaaacggttgytctcaaactgtaatcaggaatgcctggcaagctggacgtggtggctcacccctgtaatcctaacacattgggaggctgaggtgggtggatcacctgaggc

SEQ ID NO: 45013 - DNA, 201 bp, Homo sapiens
ttctctatagtcaagatatggaatcagcctaattgcttatcaccagattaatggataaagataatatagtatatatacacgatggaatactattcattcatatatatatatatatatatatatatatatatatttgaataaaatgaatgaaatcctgtcattcttggaaacatgggtgagtctggaggggattatgttatg

SEQ ID NO: 45014 - DNA, 201 bp, Homo sapiens
tttgcacagcatatttggagaacattgagtgatttgatacactgaagtcaaagtataagtgcagaacggatagcgcagatcatggaagacggtagtacctrgaaagcaatgtaaattaatgactttccaccacacacagactttctatgttactttagtggtaaatgtgttgcacaaaaagggaaaataaagttatttgaa

SEQ ID NO: 45015 - DNA, 201 bp, Homo sapiens
gtaaaaacggttgttctcaaactgtaatcaggaatgcctggcaagctggacgtggtggctcacccctgtaatcctaacacattgggaggctgaggtgggtrgatcacctgaggccaggagtttgagtccagcctggccaatacggcaaaaccccatctctactaaaaatacaaaaaattagcagggcgtggtggtacatgc

SEQ ID NO: 45016 - DNA, 201 bp, Homo sapiens
gaaggaaaaaatgttaagggcagccagagagaaaagtcgggttacccacaaagggaagcccatcagacttacagctgacctctcggcagaaactctacaarccagaagagagtgggggccaatattcaacattattaaagaaaagaattttcaacccagaatttcacatccagccaaactaagcttcataagtgaaggaga

SEQ ID NO: 45017 - DNA, 201 bp, Homo sapiens
aagctggacgtggtggctcacccctgtaatcctaacacattgggaggctgaggtgggtggatcacctgaggccaggagtttgagtccagcctggccaatayggcaaaaccccatctctactaaaaatacaaaaaattagcagggcgtggtggtacatgcctgtaatcccagctactcgggaagctgaagcaacaagaatca

SEQ ID NO: 45018 - DNA, 201 bp, Homo sapiens
tatcttataaaggaccttctgagatttctatgtttggttcgtattttaagaaagccacatccttccttttggagtagacatttcttagtacttaaggaagyctattagttaatgtatagatgaattccttcatttcatcttctcaattacattagacaagttaactgggccagtgagaattggatcagtgtctgactcatc

SEQ ID NO: 45019 - DNA, 201 bp, Homo sapiens
tccaccacacacagactttctatgttactttagtggtaaatgtgttgcacaaaaagggaaaataaagttatttgaaatgattttaacaaacaattgtcagygacataacaattgtcaaatcaattgttaaaatggtgttaatcaattgttatgtgattttcatttaacaagtattcattgatcacctgctatgacaagcac

SEQ ID NO: 45020 - DNA, 201 bp, Homo sapiens
tctactaaaaatacaaaaaattagcagggcgtggtggtacatgcctgtaatcccagctactcgggaagctgaagcaacaagaatcacttgaacccaggagrcagaggctgcagtgagccgagattgcaccatgagactccagcctgggcaacaagagtgaaactccatctcaaaaagaaaacaaaaacaaaaacaaaaaaa

SEQ ID NO: 45021 - DNA, 201 bp, Homo sapiens
gacataacaattgtcaaatcaattgttaaaatggtgttaatcaattgttatgtgattttcatttaacaagtattcattgatcacctgctatgacaagcacwgtttttggcctttggggtacatcggtgaacaaaatgaatgaaaatcactgtcctcacaaagcttacattctctttattataagtttattttattatatta

SEQ ID NO: 45022 - DNA, 201 bp, Homo sapiens
ccttttaaacatgcatggttttcgccgtctagagacttactgaggttgaatgtcaaagtatagcatttgagaatattttatgccttccagttgattctgcygtgagctgtttgagaaaatactaggttaaactgcatgattaatattattcactattaactggagaagatagtaatgttacaaatccatatgctggtagat

SEQ ID NO: 45023 - DNA, 201 bp, Homo sapiens
gagactgtataatgagaaatgttcagaagctccagaaattcaacagcaaatttttccttgttttcattctcagaattctctagtagaatgaatcagatatkgatgaaaattgaatagagaagtatgccgagaacttcacagtatcagtcagtctctactgcataacatttaaatattttcaggtaatgcttcccatgaagt

SEQ ID NO: 45024 - DNA, 201 bp, Homo sapiens
ttatataatataatataatataattaatataaatagtatgagtactttcaattcacgttcactcacactatctaattcaaatatctagatcacctgtgagraagataaaaatagttataatttatttattgtcatatcatttcaaagcctgttctaaattcttttcttaactcatttaagtaaatcctatgaggtatatac

SEQ ID NO: 45025 - DNA, 201 bp, Homo sapiens
caaaactctagtactttaactctctgcagacgataatctgatattgtaaaaaataaatagtcttatgaagaatgcttttgcattttcttaacatcatttgwaaagactattgttcattttattatttaataaccaataacataaataaatacatgatacatttattcctcttagtatacagcattgagaaggaaaagtctt

SEQ ID NO: 45026 - DNA, 201 bp, Homo sapiens
gagcttttcagttgttaacaaaaccaaaatcacatttaaatgcaagctggacatgtttcattgtacctactctttgcttgattttacatattaattaattmattcattcattcatttaatcacttaattcattcgatcatttatttactgcatgccaacctatgcacttaggatataaacaaagaaaagcttcaaggaaca

SEQ ID NO: 45027 - DNA, 201 bp, Homo sapiens
gaaatgaaatgcttaataaacaataggctataataagaagatagctactactactattattaccacatagagttagtacttactagacctactgaagctamttaatatttttgtatatcttgacgaatattaactacataagcatgcttgtagagcaacatgaagggcaaagtcctaaatcaagaaatctcttcttttata

SEQ ID NO: 45028 - DNA, 201 bp, Homo sapiens
actgaaggaaataattttacaatgcatttttattttaggaggacagatttttttagaatggctaatcaacaacaacaataaaataatacaatatattttawattcaggaggattatccaactgaatttcagataatctttataaatataataacttgctctgaaatgcttgctctacaatactcatataaacagtactatt

SEQ ID NO: 45029 - DNA, 201 bp, Homo sapiens
taataaacaataggctataataagaagatagctactactactattattaccacatagagttagtacttactagacctactgaagctacttaatatttttgyatatcttgacgaatattaactacataagcatgcttgtagagcaacatgaagggcaaagtcctaaatcaagaaatctcttcttttataaggcaatgtttaa

SEQ ID NO: 45030 - DNA, 201 bp, Homo sapiens
tgcattattattttttttcacaatttttatccaatgttttatatattttgcttttatcctactttaatattcatttcccagagttagaattatatgtgttktgagggaagaaacttttgtctctgctcactgttgtatctctagaattgaaaaaagataatatttattgcataaataaacaaatgaatgggcacagcctcg

SEQ ID NO: 45031 - DNA, 201 bp, Homo sapiens
ccacatcatagtaaatgggatatctgccttctcaagcatttatccttggtgtcataaacaaattgtgtactcttgtagttattttaaaatggacaagtacrttattattgattatagttactctgtcatgctatcaaatactaggtcttattcactcattctttctattttttgtacccattaactatcctcacttccccc

SEQ ID NO: 45032 - DNA, 201 bp, Homo sapiens
cataacttgaattaaaattctaatgttggctactaaatagggaatatagaataatgtactggacagtttctttgtaaaatgcagacgcatgcttcagctayggattttttttaaagcaaatgttgataaaagctataagaataacattaaagctcaatacagtgaaagcatttctgtgatgtactcagctgatgtggttca

SEQ ID NO: 45033 - DNA, 201 bp, Homo sapiens
ggcaaccagaacattttattgggcattgtatcctcatcacttacaagtgtgaggcacataaaaggcacttgatttgtgcttgttgaatgactgaataaatkattgcttggcaaatgattgcttggcaaatgattacacagaataagctccagtgtggttaaagaaagtgatcccggttgccctggcaaccaggcaaaggat

SEQ ID NO: 45034 - DNA, 201 bp, Homo sapiens
agaagcagtataggccgggcgcggtggctcacgcctgtagtctcagcacgttggaaggccgaggcaggcggatctcttgaggtaaggcatttgagaccagsctggccaacatggggaaacctggtctctattaaaaatacaaaaattagctaggtgtggtagcgcaagcctgtaatcccagctattagggaggctgagtga

SEQ ID NO: 45035 - DNA, 201 bp, Homo sapiens
tctgatgcttaatacctggcagtatgtgaggcaaacataaaagaaatctgtagagagtatttttacctgatttgtgatatcttctcattaactatagcagkacctccacaaatcccacccatattctttttttcctcctcttaaattttgtaaaacaaactcatactttggaaatcaacccgttaaatatgattttattgg

SEQ ID NO: 45036 - DNA, 201 bp, Homo sapiens
tcctagccagaacaatcagtcaagagaaagaaaaaaaaatgtatccaagtaggaagagaggaattcaacctatctttctttgcagacgatttaagcctatrcttagaaaacctcatcgtctctgcccagaggctcctagacctgataaacaactttagcaaactttcaggatacaaaatcaacatacaaaaatcaccagca

SEQ ID NO: 45037 - DNA, 201 bp, Homo sapiens
gaagtcaagtatgacggggtaaaatgtgtgttcagaggctgtgtgtgacacagctaagttatttatttatttatttatttttttgagacggagtttcgctmttgttgcccaggctggagtgcagcgatgcaatctcggctcactgcaacctccacctctcgggttcaagcaattctccttcctcaaccacctgagtagctg

SEQ ID NO: 45038 - DNA, 201 bp, Homo sapiens
aacaatgtgctcctgaatgacttttgggtaaacaataaaattaagggagaaatcaagaaatactttggaataaatgaaaacaaagatacaatgtaccagawtctctgggacacagctaaagcagtgttaagaggaaagtttatagcaccaaatgcccacatcaaaaaggcagaaggctctcaaattgacagtctaaatttt

SEQ ID NO: 45039 - DNA, 201 bp, Homo sapiens
tagtttgctaaatattaagggaaaataaactccaagaactttttttttttttttttaagtagaactagcttgttgtatcagttatctctgacttccttctyggcctggaaaattctcattgcacatgctgtttgacataactacattctattttcaaaatgtctgctcgatttcattgactatttgcctaaagtctttact

SEQ ID NO: 45040 - DNA, 201 bp, Homo sapiens
tgttaccactagacctgtctttcaagaggtccttaaaacccatttacacctagtgttccatcattggaacaataagcatatgggaattatttatatcctaytactcaaggtcatcaccaaggtctgattgtaaaaattaaaaaaattgcaacctcaggtataaatgggttaagggagtgctaaacatggaaacaaaagact

SEQ ID NO: 45041 - DNA, 201 bp, Homo sapiens
acaacaaacaaacaatgacaaaccacaaaactgaagaaataagagtggatgggaaactccagtgaaaagaaaaggttgggctccatataaagttgtccaaygcagtgcagcatacactcatcagtagagaaaagcaaaatgtctcaggatcagaagaataaacgaatatagcagtgtgaccttggatagttccctctgaac

SEQ ID NO: 45042 - DNA, 201 bp, Homo sapiens
aggcctatattcagcatgcttaatccttgaagaaaagaaattccaaccaggaagttcatattcagtcaaactaagcttcataagcaaaggagaaataaaamcctttttagaaaagcaaatgctaagggaatttgttaccactagacctgtctttcaagaggtccttaaaacccatttacacctagtgttccatcattggaa

SEQ ID NO: 45043 - DNA, 201 bp, Homo sapiens
gagatgacattgattctgtcatgtgttgccctgaaataagaggaaaataagcattttcccaattgacccttcagcaatttctccaggctttttttttttttcaggagcccctttccaatttcccatcatttttcaataagatgtgggaatttcttccccaattttttttttctggagctacgttttgatttattttgtgtt

SEQ ID NO: 45044 - DNA, 201 bp, Homo sapiens
aacctctctatgttagaggccaaaaggataaggtagatgttatccaggagaagtaggaggtgaagatgaaaaaacacattcctaaaaagataacagtttaygcagacatcctcctggggaaaagagctcagtgcccgtgaattctggaaagaactgagtggcttcagttcagagattgagggggcatatagtgttagatga

SEQ ID NO: 45045 - DNA, 201 bp, Homo sapiens
tttagaagacttatatgcattttaaaaaaaaggtttagaatccagattaaacaaacaattatgccgggcacagtggctcacgcctgtaatcccagcacttygggaggctgaggcgggcagaccacgaggtcaggagatcgagatcatcccggctaacatggtgaaaccctgtctctactaaaaatacaaaaaacaaaatta

SEQ ID NO: 45046 - DNA, 201 bp, Homo sapiens
atgtctttttggtaggatttattttcctttgggcatgtacccaataataggattgctgggtcaaattatagttctatttttagttctctgaggaatctccwatcgagtttccatattggctgtactaatttacatcctcttcaacagtattcaagtgttcccttttctctacatcctcaccaccatctatcagttttcgac

SEQ ID NO: 45047 - DNA, 201 bp, Homo sapiens
tctttttggtaggatttattttcctttgggcatgtacccaataataggattgctgggtcaaattatagttctatttttagttctctgaggaatctccaatygagtttccatattggctgtactaatttacatcctcttcaacagtattcaagtgttcccttttctctacatcctcaccaccatctatcagttttcgacttt

SEQ ID NO: 45048 - DNA, 201 bp, Homo sapiens
cccagcaccatttattgaatagggaatcctttccccattgcttatttttgtcaatttttttgatgttcaaatggttgtagatgctcacctttatttctggmttctctattgtttcaattgtgtctgtttttgtaccagtagcatgctgctttggttactgtagccttgtagtataaagtttagtaatgtgatgttttctgc

SEQ ID NO: 45049 - DNA, 201 bp, Homo sapiens
ttctggcttctctattgtttcaattgtgtctgtttttgtaccagtagcatgctgctttggttactgtagccttgtagtataaagtttagtaatgtgatgtyttctgctttgttctttttgcttaggattgctttggctattcaggctctcttttgattccatacaaattttagaacagtttttttgtaattctgtgaaaaa

SEQ ID NO: 45050 - DNA, 201 bp, Homo sapiens
aaagaagttttaagcaagcaaatgacatgattggttttgccttttaaaaatatgactttagaaccttggttttcaaattttaaaatgcatgataatcactyggagggcttgttgaaacacagatggctgggccccacctccagagcttctgactcagtagttctggggtggaacccaagagtttgcatttctaacaactcc

SEQ ID NO: 45051 - DNA, 201 bp, Homo sapiens
tctaacttcattaaagcaactttattttgttcctctggttctttaggatctttaatgatacgctctcaaaaattcaaaacaggtgactgaagggggagatrtaaaacaaactaatattagacaatggcactcacattttgatttttagcttgagtgtgcgtgtgtgcacatgtgagtgtgtgtgtatgttcatactgtaca

SEQ ID NO: 45052 - DNA, 201 bp, Homo sapiens
agtacctaactgaatttgcaaggtctggataaggaagacacaagtgttgaggataactgtgtatctggcttgcttgtttttgaatgtatgaaagagcccargtctgtaatctagagaaagagagaaagagaatggatttccattttaattgtagtcattggcgtaaaggtgcaatttaattgaatatcatgcaacaactgg

SEQ ID NO: 45053 - DNA, 201 bp, Homo sapiens
tcaggcttgtcatagattagtttcatcatttgactctgtttaattagttccccaggtctgccactcatctctgaaagcctatgttccatttcttaatccakccattgtttacattatcaaacagtttagtcttgacctcatatgttacctaggaaaaagagttcagtgattgtttcttaatttgactggtcatgaaagtgt

SEQ ID NO: 45054 - DNA, 201 bp, Homo sapiens
atacaacaaagtatggacattttcaaaccattatcaatctatgaaactgtatcaacgactttgggtaaattttgattttttaaaagttttgcatggggtcrggcgtggtggctcacgcctgtaatcccagcactttgggaagccgaggtgggcggatcacgaggtcaggagatcgagaccatcctgactaacacggtgaaa

SEQ ID NO: 45055 - DNA, 201 bp, Homo sapiens
gattttttaaaagttttgcatggggtcgggcgtggtggctcacgcctgtaatcccagcactttgggaagccgaggtgggcggatcacgaggtcaggagatsgagaccatcctgactaacacggtgaaaccccgtctctactaaaaatacaaaaagttagctgggcgtggtggcggtcgcctgtagtcccagctacttgaga

SEQ ID NO: 45056 - DNA, 201 bp, Homo sapiens
caagctgaggaaggaatctcagagcttgaaggatggttctttgaaacaactcagtcagataaaaataaaggaaaaagacaaaaaaggagaaaacctctgaraaatatgggattatgtaaagagaccaaatctatgactcattggcatccctgaaagagagggaaagagagaatgccttggaaaacatatttgaggatattg

SEQ ID NO: 45057 - DNA, 201 bp, Homo sapiens
accaagagaccacaccgtcaaaatcagcacattctgaacagtacttcggaaggaaggcattgaaagtggttggaaggagaatgcagatcctgggctgaagkggggaggaagttgggaaccctgcatggggttgccaagcaccaggactcattcctggccctgagaggctcccagggaagggatgagttaaataggcataga

SEQ ID NO: 45058 - DNA, 201 bp, Homo sapiens
taatccagtctatcattgttggacatttgggttggttccaagtctttgctattgtgaatagtgccgcaataatcatacgtgtgcatgtgtctttatagcgrtcatcagtatttgagtaaaaattaagaacatatgttaatgggcattataacttgtctggattttcaaaatgtaactaagaacaatacttgttgttgttgt

SEQ ID NO: 45059 - DNA, 201 bp, Homo sapiens
ctcatacagctgggtgaccctctgagatgaagcttccagaagaaggatcaggcagcaacatttgccgttctgccatatttgctgctctgtagcctccactrttgatactcaggcaaacagggtctggagtggacctccagcaaagtccaacagacctgcacctgagggtcctgactgttagaaggaaaactaacaaacaga

SEQ ID NO: 45060 - DNA, 201 bp, Homo sapiens
gggtagaagtgtagagattcagcagaggtggttcacattgtaagtaatacttatagttactcatgatcttatggcttactcctacactaccaatacaatgrcaaagtattaaatttgacattttctttaaatagttttagaatattcgtatagcagttacccaggaattaggtaagagttgtttataatgtctagattaca

SEQ ID NO: 45061 - DNA, 201 bp, Homo sapiens
tagagacagggtttcactgtgttagtcaggatggtctcgatctcctgacctcatgatctgcccgcctcggcctcccaaaatgctgggattaaaggcatgarccaccgtgcccggccttcagtgtatatttaaaatttttcatcatttgtggttggtaaaaaatagtatacttacctttgtatattgactttgtacactgca

SEQ ID NO: 45062 - DNA, 201 bp, Homo sapiens
gcacatacatgatgagtcaacatcagtagctcaagaatggaggaactctgatttaagatggttagcatcaaatctatctatggataaaaaataacagcttyagaaattagagaatagcatataaatggtataaactatgataatgaaagcatgttaatgaaaatgattaatatgtgacaaggtaatattggaagaggtatc

SEQ ID NO: 45063 - DNA, 201 bp, Homo sapiens
ctgcaaggtgacagtgaggctcagggagggacatctgccattgctgaggcttgaataggtaaacaaagtggctaggaaacttgaactgggtgaagcccacygcagctcaaggaggcctgcctgcctctgtagactccacctctgggggcagggcatagctgaacaaaaggcagcagaaacttctgcagacttaaatgtccc

SEQ ID NO: 45064 - DNA, 201 bp, Homo sapiens
cttacacccattagcatttttgactttagtcttttcacctaacttctctgagccttaatttctccatgtagaaaatgaaagatgatgtctttcctatctcrtttaggattgctgtaatataataatatgtataacagtattgcttaaagaatattacctagtggccattgcagtgcataagaactggtaagatgccttacc

SEQ ID NO: 45065 - DNA, 201 bp, Homo sapiens
aatatactagtaacaataagctttatgtcacatgtatgatacaggggatttaaaaaaaatttttggccgagtgcggtggcccatgcctgtaatcccagcastttgggaggccaaggcaggtggattgcctgaggtcaggagttcaagaccagcctggccaacatggtgaaaccccatctctactaaaaacacaaaaattag

SEQ ID NO: 45066 - DNA, 201 bp, Homo sapiens
gccattgcagtgcataagaactggtaagatgccttacctggaaaatataagggaaaagtgttggtttttttaaaatcatgaaaagataagattgaaaatgrcgtgtctttgctgctaattaatgattgctttatgttcatggagctgtaacatttttcccacctgcagaacatattatagtaagctctagttatattttct

SEQ ID NO: 45067 - DNA, 201 bp, Homo sapiens
aagggaaaaagatcaatgacaaatgggtaccccaaaaagtcaagggtcacacaaatataaattcaaaataagtaattcaaacttcttttttttttttttttgagacagggttttgctctgttgcccaggctaaagtgaagtggtgtaatcatggctcatagcagccttgatctctgggctcaagccatcctcctgtctcag

SEQ ID NO: 45068 - DNA, 201 bp, Homo sapiens
cgcttttaataaaactttaacaaacactcgtgaattccaacaaaaatcttgatcattttacagaagtgtatatccaaaaccaccgtgaagctggaaatacrtcaaagacgtgattacatttgtccaagttaagaggacaaccaatgagggcacaatggacagggttctttaggtatgttgggtataaattgtgataatttt

SEQ ID NO: 45069 - DNA, 201 bp, Homo sapiens
gaagggaaaaagatcaatgacaaatgggtaccccaaaaagtcaagggtcacacaaatataaattcaaaataagtaattcaaacttcttttttttttttttttgagacagggttttgctctgttgcccaggctaaagtgaagtggtgtaatcatggctcatagcagccttgatctctgggctcaagccatcctcctgtctca

SEQ ID NO: 45070 - DNA, 201 bp, Homo sapiens
actcctggggctccatagtgggtttcaagggcaggtgtttatgaagccaggttctggggcctgatgatctgggactgaattccacctctgccacatgcaayctgtaggtccttgggcaaattacttcctcaagttctgcttccattttctcttctgtatgtatggttgatgataatacctacctcctagggttattatgag

SEQ ID NO: 45071 - DNA, 201 bp, Homo sapiens
aaaaaatcataaataatcatttcagtcttttatcagttcagtcccatgtaattaattattgttctgcttgatggtagtttagcaattttatgagtccagtktttttttttattagagttctggaatttttacacagttcattgattcacttatacagtttcagagttgtcagaaacctttatttgtcagtgttattcccat

SEQ ID NO: 45072 - DNA, 201 bp, Homo sapiens
aattagttcatacatataaagtgcttagaaaagtacctggtacatgtaagcactctatatatttgctatcgtcatcattatcatcatcattattaaagttrcacatagcctagggtgaaattctactaaaaattttagggaaaaaatactcatttatattatcaccaacatgtacatgttatggaatagaatgaaagtttc

SEQ ID NO: 45073 - DNA, 201 bp, Homo sapiens
ttctaattgtccatcttggtgccggcagcgaggttggggctccaaatctagccgccgccatctaccccaggggaggaggagaaggagtgttttttttttttaatatatttaatggacaggtaatgaggcaaataaaaattctgtacattcagggtgtacgatgtgatgatttgatgtatgtatgcaatgtgtaatgattac

SEQ ID NO: 45074 - DNA, 201 bp, Homo sapiens
agaatctatactagaatgacagggttcttgcttagatccaagtttcagaaccagagaatgccagagatgaagaggagtgaagaaggaagaagagacagtaygtacaaaccataacatagaaagtctctgatgcaaaaggatatgtttttagccactcactccagatggagaggtgtgacctgggaaaaggaaataagagat

SEQ ID NO: 45075 - DNA, 201 bp, Homo sapiens
attgtatgctcatatcaagatagcacatgtaccccattaatatgtacaattatgtagccataaaaattaaaaataaaaataagcaaaggggaagaatgtcrccaaaggagaataaaaaaatagaatgttacagcaaagaaatcaaagaagaatgaaatagaaatgttagaactaaaaatattaaccaataaaataataatt

SEQ ID NO: 45076 - DNA, 201 bp, Homo sapiens
acatttattgggcactcaatgtgtgcacaacagtactctgtatctcacctatataatcctattcatccccacaaacatctatgttctaagttctgtttatrctccccattttactgatgtggcaattgagggatagaatggttaacaaattcttccaggtcgcatggccagaagtatggcagagtcattatcaaagccccc

SEQ ID NO: 45077 - DNA, 201 bp, Homo sapiens
caagacttgtacacaaaatgtataaaacagtgccaagagaaattaaggaagacctaaataaatgcagattatgatgttaaactgtacagtgttgaaactgyaacagtgttaaagtggtcttctcttctcctcaattgatctgtagatttaatggagtccagatcaaaatcccaacattcatttggctagtaattgaaaaac

SEQ ID NO: 45078 - DNA, 201 bp, Homo sapiens
atggttatcaagatagtgtagtgttaaaggaaactcagaaaaatagatcaatagaaatgactagagtccataaagatctacatggatgtagacaactgatrctcaaccaaagttcaaaggcaattcagtgggcaaaggataatcatttcaacaaatggtgctggaacaactggttattaatataaaaaattcaatcaataa

SEQ ID NO: 45079 - DNA, 201 bp, Homo sapiens
caaattgtttgcctagtcagccctaatgcaagaacctggatacttcagttgaaggtgctgaattcacttgctcctttccttcctctctgagtgcgcagacsgcagctgcttctaattgtccatcttggtgccggcagcgaggttggggctccaaatctagccgccgccatctaccccaggggaggaggagaaggagtgttt

SEQ ID NO: 45080 - DNA, 201 bp, Homo sapiens
gactcctgttgggagggctcacttggtcaggaggaatgggatcagaagcagtctggatgctttctggtggagcagatatgctgcgttggggcggggagtgrgggatccttcttcatctggaccgtttgtattctccaaagctggcaggctagaatggctgagtccactgaaccacagagatggtgtggcaacccctcctcc

SEQ ID NO: 45081 - DNA, 201 bp, Homo sapiens
gtttcagaaccagagaatgccagagatgaagaggagtgaagaaggaagaagagacagtacgtacaaaccataacatagaaagtctctgatgcaaaaggatwtgtttttagccactcactccagatggagaggtgtgacctgggaaaaggaaataagagatttggtgacagaggaatggagtaaaaaagtctagcaagagaa

SEQ ID NO: 45082 - DNA, 201 bp, Homo sapiens
gcctcatagaatgagttagagaggagtcccttcttttcaattttttgaatagttttagtagaaatgataccagtcctttttgtacctctggtagaattcakctataaatccttctggtcatgggccttttttttggttggtaggctatttattgctgcctcaatttcagaactcattattggtctattcaggcattcagtt

SEQ ID NO: 45083 - DNA, 201 bp, Homo sapiens
gaagagacagtacgtacaaaccataacatagaaagtctctgatgcaaaaggatatgtttttagccactcactccagatggagaggtgtgacctgggaaaargaaataagagatttggtgacagaggaatggagtaaaaaagtctagcaagagaaacaagagactgcaaactgctcctgttttttctctcaatctacaacca

SEQ ID NO: 45084 - DNA, 201 bp, Homo sapiens
tgtaaggtaggggtccagtttcaattttctgcatgtggctagccagttctcccagcactatttattaaataggaaatcttttccccattgcttgtttttgycaggtttgtcgaagatcagatggttgtaggtttgtggtcttatttctgagttccctattctgttccattggtctacgtgtctgtttttataccagtacca

SEQ ID NO: 45085 - DNA, 201 bp, Homo sapiens
tgtagctaaaagactgcatatgtttgttagtggcctatgaacataaccatggcattataaatagtatcataattaccgtgaaagcaatactgcatctgatkaatgtattttattcggcagccacaagtcttacgaagagtatattttaggtaatgaaaacttgagccttggtatgtttagaataataatgatactaagttt

SEQ ID NO: 45086 - DNA, 201 bp, Homo sapiens
atggtgtaaggtaggggtccagtttcaattttctgcatgtggctagccagttctcccagcactatttattaaataggaaatcttttccccattgcttgttwttgtcaggtttgtcgaagatcagatggttgtaggtttgtggtcttatttctgagttccctattctgttccattggtctacgtgtctgtttttataccagt

SEQ ID NO: 45087 - DNA, 201 bp, Homo sapiens
agaccttgttttcctgggtatcagcagtggagtctgcagaacagcgaatattggtgaacagcaaatgttgctgcctgatctttcctctgggttactttttrtatatggtgtaaggtaggggtccagtttcaattttctgcatgtggctagccagttctcccagcactatttattaaataggaaatcttttccccattgctt

SEQ ID NO: 45088 - DNA, 201 bp, Homo sapiens
ctagtcatctggaaggccctatatttttacaatagagccttccagagttgttagaaatatggagaaaatgctatcatgatcatttccatgtatactaaagyttcagtagttttaattgtgaaaaacagctatcccataaattgaagtgttagtaagacaaatggatgcattgtattaaagctgacagagcagtgactggga

SEQ ID NO: 45089 - DNA, 201 bp, Homo sapiens
gatttttagaattttcagtttttctgctctgttttttccccatctttgtggttttatctacctttggtctttgatgatggtgacgtacagatggggttttsgtgtggatgtcctttccgtttattagttttccttctaacattcaggaccctcagctgcaggtctgttggagtttgctggaggtccactccagaccttgtt

SEQ ID NO: 45090 - DNA, 201 bp, Homo sapiens
attcagtcacaggtcttttaactgataccttttaatgcataaaatcatgtttaaattcttgaaataactgaagtcttaatgaaatatttgagtgcaaaccrtcaattgaaaatgataaataaaagtagtacaaatatctttaattttgaaatatgagggttttctgtgtttctatagtgttccaattttattaacttttgc

SEQ ID NO: 45091 - DNA, 201 bp, Homo sapiens
ttcctttggagtaggagaggtgctctgatttttagaattttcagtttttctgctctgttttttccccatctttgtggttttatctacctttggtctttgawgatggtgacgtacagatggggttttggtgtggatgtcctttccgtttattagttttccttctaacattcaggaccctcagctgcaggtctgttggagttt

SEQ ID NO: 45092 - DNA, 201 bp, Homo sapiens
ttaatgaaatatttgagtgcaaaccatcaattgaaaatgataaataaaagtagtacaaatatctttaattttgaaatatgagggttttctgtgtttctatrgtgttccaattttattaacttttgccctgtcttccgttttctttataactaaaatagtaataaatacatttctaatttaattgtcttatatgcacagaag

SEQ ID NO: 45093 - DNA, 201 bp, Homo sapiens
tgtcttccttaagattgatgtcaatgttttcaaaatagtcactgatttcttaaaagtactttggtataaaacatcaacgtctcaggtataaaaatgattttatggtcttagcaatactcaagtgatattaaattaaaatattaataatttatataatatcaacttatgcaataactatcttataaagcagaattctattta

SEQ ID NO: 45094 - DNA, 201 bp, Homo sapiens
atttaattgtcttatatgcacagaagttctgagtgatactgaatttttggtgttgattgagatttgctttatgtatatgttcagttttaaagcttattatrtatttaagtgaatgtgtgttctctaattgtagggtccatggttttacatatagccattggaacaaacttcttagttgcgttatttgtatctcctacaatc

SEQ ID NO: 45095 - DNA, 201 bp, Homo sapiens
tggtgcgtttacttccagtacaataaagttgtgggagatttttatcatctttgtactttgtaatattaaagaatatatcttctttatatatatccttacaygtatatatattatatatatatatatgaagaatatatatatattaacaagtggagctagtactatatatgcagggtttaatcccacttttccattttaaat

SEQ ID NO: 45096 - DNA, 201 bp, Homo sapiens
ttcagttttaaagcttattatgtatttaagtgaatgtgtgttctctaattgtagggtccatggttttacatatagccattggaacaaacttcttagttgcrttatttgtatctcctacaatccactaatgccttctgctgcctgatgtatcagttataagaaaagtgcattgaaatctcccattattgttgatctgtgaca

SEQ ID NO: 45097 - DNA, 201 bp, Homo sapiens
gtgacaatgacatagggtcattatagatttatcttatttaactgcataacaaggttgttatgggtcattacagatttatctcactgttaacaaggtcgctrtggggttaaatgagataaatctataatgaccctattatctataaagttcttatgagagggactcttgtataataaatactgtataaatgttacttttctt

SEQ ID NO: 45098 - DNA, 201 bp, Homo sapiens
tataatgaccctattatctataaagttcttatgagagggactcttgtataataaatactgtataaatgttacttttctttttgttcattagtctgccataygtatactaccttgaacccaaaagacttagggtgataattttaaaacactgaataaatacgtgttttcttgaactgggcttagttatgagtcagaggtcca

SEQ ID NO: 45099 - DNA, 201 bp, Homo sapiens
taacatgcattacttcacatagttaacatttttttgtggtaagaacacaaaatactttctaagcaattttcaggaatacagttctattaactccactcacygggttgtacaatagatctcttgaacatgttcatcttatccagctgcaatgttgtatcctttgaccattatttccccaactccaccccatcccacagccca

SEQ ID NO: 45100 - DNA, 201 bp, Homo sapiens
ttgccttaacaacccagctatatgcagatggatctcaaatacacatctcccatctgtaatgatttttctcctgaatttccaacctgtgtataaaccactaygtaatatatatacccaaaaatcagcatatctaaaggagaacttctgtcctcatctaattccgctgccacgcctgtacttttttctccattacctctcgat

SEQ ID NO: 45101 - DNA, 201 bp, Homo sapiens
ttgatgggcatcagccgctgtgggcaacacagggtcccttaccccaaaccagtggaatcagaatccctggggaagggacacaagtggaaggcttttgtaaragttcttctggtgatgctaatgagctgtcagggtttaaaacctctggttgagagctgttaggccaatggaggatacataaaagcagggccaatgggatgg

SEQ ID NO: 45102 - DNA, 201 bp, Homo sapiens
ggaagaagtcaaaatgcaagggtaggaatcttcttttagatttcatatatttttactttaattctaccatatattttttatttctaggatcttttaccctsaaaacagcttctcatttggtgtttgacacaatctctcttcctttcttcttccaagctcagcaaatctaaaaacttcaacacaattaagtaagttatccta

SEQ ID NO: 45103 - DNA, 201 bp, Homo sapiens
caaaatcctggcaagtttttggaaatataaatgcatgtggtctaaatttacaatgaatagcaaaaatagttaaataataaaaagaggtaaataaagtgggraaaagtactctacctgatattaagttttacactatagctgcaataatcaaagtggtgtgacattgccagagcatagacacatagatcaatggaacagaat

SEQ ID NO: 45104 - DNA, 201 bp, Homo sapiens
cattaattgtgagcttcccctgggaagagacattgccttggggaaggtagtttcctacaacctaggacagttcctagtgaacgactatgccatgagtggtyaatagcagttatccccagcagctgaaagatggatgtatccaatatgaagaggagatatggccagagctctgtgatatgcaatagaggggagaaaagacac

SEQ ID NO: 45105 - DNA, 201 bp, Homo sapiens
attaattgtgagcttcccctgggaagagacattgccttggggaaggtagtttcctacaacctaggacagttcctagtgaacgactatgccatgagtggtcratagcagttatccccagcagctgaaagatggatgtatccaatatgaagaggagatatggccagagctctgtgatatgcaatagaggggagaaaagacaca

SEQ ID NO: 45106 - DNA, 201 bp, Homo sapiens
gttataagaaaagtgcattgaaatctcccattattgttgatctgtgacaattgctctttctaatctcaattttactttgtatattctggacaatgttattwctcacatatgagtttggaattactatattttttgctgattccttctttattgttccgtagaaacttctttatttccaatgtgccttttttgcctctctac

SEQ ID NO: 45107 - DNA, 201 bp, Homo sapiens
ttctaatctcaattttactttgtatattctggacaatgttattactcacatatgagtttggaattactatattttttgctgattccttctttattgttccrtagaaacttctttatttccaatgtgccttttttgcctctctacaagtgtctcactttcttctgttcattgtcattcttcatctttttattttcaactttt

SEQ ID NO: 45108 - DNA, 201 bp, Homo sapiens
gcacttatttctgcttatagaaaaagaattgtagcactggagtatatgggaaggtagatgagacataaatctggtgagatatgcaaaggctgtgctaaaaygccgtgttaggaatttggtttgcatcttatttatgtaggggaatggcatcagccatctcattttagaaatataattacaattgttgtagaagaatgagct

SEQ ID NO: 45109 - DNA, 201 bp, Homo sapiens
gggtaactttatctgcttcgtgttttaaaaagatcacttggtgaatgtttggagaatggattaaaagaggtacatctagaagcagggggtcctgctagctsactgctaccatgggccatgtaagagatgatgaggacttgaaccaaggctatggcagtgggtatgaagaaaaggaaaaagatgagatcctgtgtaattccc

SEQ ID NO: 45110 - DNA, 201 bp, Homo sapiens
tctgtcatagaggcctgggtggatggtggttctattcacggagagagaaatacaaaaggaggagagtatggaaatcatgggttatgtttgagattatggartgtgcattatttctgtgacattcaagcaatgacacctcagaggaattggaaacatgggtctgttgctcaactgacacatcttgggctagagatctagatt

SEQ ID NO: 45111 - DNA, 201 bp, Homo sapiens
aaatcatgggttatgtttgagattatggaatgtgcattatttctgtgacattcaagcaatgacacctcagaggaattggaaacatgggtctgttgctcaastgacacatcttgggctagagatctagatttaggagtatttagcatatacttggaatgagaaggcatgaactctgggaaataccaggacagaagtagcagg

SEQ ID NO: 45112 - DNA, 201 bp, Homo sapiens
  misc_feature (1)...(201): n = A,T,C or G, or insertion/deletion polymorphism (see Tables 1-2)
ttagctgagcccatgttttccacttgttgcatttgggtttcctagttttacatttcatattgtaacatttggcagattttaaataacttgtacaatgtatngaaattctcaaaggactgatgttttgtaaaacttcttcacaataattattagatatacaaagccctgcagctgtattctataaatagtattgaatgtagt

SEQ ID NO: 45113 - DNA, 201 bp, Homo sapiens
aaaacaaaggctttagttgaaaaccccagctgagctcccatttgtcagctagcactgtggtagtcaaccatgcgaatgaggctattttggacctcatgatygtccagtgcctgggctgataccatgggaaacggaattttgtggctgcccacaaaatcatggaaaataatgattttttagaaaacctccactgttttgttt

SEQ ID NO: 45114 - DNA, 201 bp, Homo sapiens
gcatcatgaatgctgaagtttaaccctggatgccactatttctgacttcaagaatatattggattttttcactttaaaaagtttagaaggaaaaatatcaytgttgaattctacttcttggttatttcaaattatttcaaataggaagccccctgtaaaagtgtccagacttactataaatgcattatagttctcatctat

SEQ ID NO: 45115 - DNA, 201 bp, Homo sapiens
tgagatttctttggtataaaataatcataactgattaaatgaaagtatttgatattattctggcatatatacagaagagactagaaaactagaaaatatcmtacatgtgatatactttatgaagtttaaacagcacagagttctggcaaatgttactaatgatgaataaaatattttgttttctggtgcatgcctctaatc

SEQ ID NO: 45116 - DNA, 201 bp, Homo sapiens
aaatgagaatccctgcatagtttgcaatgaagtagcagagaacaggagtctgtgggtccttatattactctaaaatatatcagcctatatgtcaaaccagwggatccttccttatactgttagtacttggtagctgtagctgtggccattcccagttgaacagttcccttaagaatgttggggaatgcttaggatactctt

SEQ ID NO: 45117 - DNA, 201 bp, Homo sapiens
aaggtcagaggttattttctgaaggttcttctgcagcgtgtcttgtaagacttgtaccactagcaaatacatttccatcattagcagatatttgtttcacyaaaatgttcaatacatgccatcatgattactcaaaaactgttaaatgttcataggaataatgatgctttgtttgcctcaccattcaaaacaaattaacta

SEQ ID NO: 45118 - DNA, 201 bp, Homo sapiens
aagggaaagaggtgatgtagaaaacctctctatgttagaggccaaaaggataaggtagatgttatccaggagaagtaggaggtgaagatgaaaaaacacaytcctaaaaagataacagtttatgcagacatcctcctggggaaaagagctcagtgcccgtgaattctggaaagaactgagtggcttcagttcagagattga

SEQ ID NO: 45119 - DNA, 201 bp, Homo sapiens
gggaggttagaaggatttaaaatgtgagaaggacacagcctattgttgctgcctttaagatggaggaaggggacgctgagccaaggaaagtgattgatctytggaagttaagaaccatccctggagaagagccccaaggaaattgagatgtcagttctatggtagcatggaattgaattcagccactgaccttggcgtgga

SEQ ID NO: 45120 - DNA, 201 bp, Homo sapiens
tgtttttatttagtaaaaaagagtatatttttgtacaatgcctattaaggaaaacatacaggtgataaaaatgaagaatacttctggggtaaaatcaaatytattggagtggaatgaagttcctcaggcaaggcatgctgaagtaatcacacccatctgaagccttcagttactgttgatcaacttattttctctagtcca

SEQ ID NO: 45121 - DNA, 201 bp, Homo sapiens
aaacttaataggatcaaacctccttccagcacagttagggattgggctcttgcaggtgctactgacactcactacaaaggacctgacacgcccacaggttkctagctgcagtggccttgtactagtatgctgctatgctactgtggagaaaattgccattttgactgtgatcaaaacacaattcttttggctatcaaacat

SEQ ID NO: 45122 - DNA, 201 bp, Homo sapiens
ccctctgctcccaaaactcttaccagtggttttcaaaccttactaagcttgagaatcatttgctgggtctggcttattgaaacgcatcctagatttgcacragacagccactggcctatccatcacctttgtgttaattagaaaaagaggaactctttgggcagatgcagcccccacatgtaggaaatatgaaggctaaca

SEQ ID NO: 45123 - DNA, 201 bp, Homo sapiens
aatattgattgtgtatttaaatagtggatccattaccattgcagtgaacacttgtcacttaatggaatacgaatcgggagacaagcaaagatctataatgwggaaatgaatattgaagggaaccatgagtactcaacaggctggctgcagaaaattaagaaaaactatgatattacatttttaaagatttgtagtgataaa

SEQ ID NO: 45124 - DNA, 201 bp, Homo sapiens
attttttatttctaggatcttttaccctgaaaacagcttctcatttggtgtttgacacaatctctcttcctttcttcttccaagctcagcaaatctaaaawcttcaacacaattaagtaagttatcctacaaactctatagtataattgacctcaatatcatttttttcctcaataaattatggaatatatgaaatgcctc

SEQ ID NO: 45125 - DNA, 201 bp, Homo sapiens
gtttggaccattgcttcatgcatccaaaaccagatagatcaacattacattatcatgtacttcgtatagctcaaacatatttgaatcttcatatctgccayggtgaacaactgtccgtctgggaagatttcaaaggtggagtaactgggcaatgttgttataccagtgtagaattgctagtggatatttactcttgattct

SEQ ID NO: 45126 - DNA, 201 bp, Homo sapiens
atataagataacagtaaataaagttcattctgtctggattccaatacctatactgccatttctccttttttcaaatcatactgcttcctatattcatagcrcaacctctacttcatcagcacctgctaacagagcaaggataaatacgaatactttattggacccactaataaaaatggccactgtaactaggatgcagat

SEQ ID NO: 45127 - DNA, 201 bp, Homo sapiens
attagatgaacaccttggcactaccagatccaccctgctcaccacctagatatcctacatcatgctgctagagtgatcttttaaaaacaaaacattgaccrtattacacccttacttaaaaccttttaatgagtcaccagtgtgctcaggatgaatccagaatccttagggaaatatacaagaagcttcatgacctggtgg

SEQ ID NO: 45128 - DNA, 201 bp, Homo sapiens
gagacataaaattccagattatctacatgaatctcaacaggttcaatgttaactttgctataaacatccattatccacatggtgtagagaaaaggacactkatctggtccacactggctcctaacttgctgagtcatcttgagcaacatttgacctctttatttctcagttaccttgaatgctaaatgtgggtattagact

SEQ ID NO: 45129 - DNA, 201 bp, Homo sapiens
attggccccacctcattacttttgccatggaagagaacctgacttggttcatgaagcagattcaactgagcaagagaaggaatctcataacagcttaatgwtgtctactgacaagcttgagtataaactcttaaagaaaatgaagacttctccaacccatctcatagtgagatgagcttctcatctgttttatgcaaggat

SEQ ID NO: 45130 - DNA, 201 bp, Homo sapiens
ctattgattatattattattaggaaatgagaataagtaggaaaaaaattgcacctgtctcctttcttcttagctgtggtctcattttagttcctagtattsagaggtgacctaatcagactgcagaatgttctgaaaggttttaaacatgaactgttggttttggcaatcagaagcactgacataacatagtgtatcaaac

SEQ ID NO: 45131 - DNA, 201 bp, Homo sapiens
ctgaatcaatgtgatactcttataactgtctctctaattctgccttgctcccctgttacaatgtcaatcaggtcatgtcatgtgccactttgtggccaccygtttcattcagagaaaaagttaagtccttacaacatattctgcttccctctcccttagtcctgccctgtgtccgtgtttcaaaacctacgcacgtggctc

SEQ ID NO: 45132 - DNA, 201 bp, Homo sapiens
ttaaacagatgcacaaactaaaaagaaaatatcaaaattgtaagtacaatgcaaataattaaaagaaggaatgtgaggccaggcatggtggctcacgcctrtaatcccagcacttttggaggccaaggccagaggatcatgaggtcaggagatcgagaccatcctggccaacatggtgaaaccctgtctctactaaaaata

SEQ ID NO: 45133 - DNA, 201 bp, Homo sapiens
gcgagcacctgtaatcccagttacttgggaggctgaggcatgagaatcgcttgaacccaggaggtgaagattgcagtgacctgagatcatggtactgcacyccagcatggtgatagagtgagactctgtctcaaaaaacaaacaaacaaacaaataaacaaacagaaagaatgtggtaggaagtgactaggggcaatggga

SEQ ID NO: 45134 - DNA, 201 bp, Homo sapiens
atgggaattccagaggctccttctagagatacatagaattcagtgtgtaaagaagttagaatgtttctttctgcatctttaatctatcttctcttaggtgytttgagactagcttaaaaattaattcttgattgcactttgcaactataaacatggggattggtgattgaataattagtgcttatcttctctctttgaaat

SEQ ID NO: 45135 - DNA, 201 bp, Homo sapiens
tgtaaagaagttagaatgtttctttctgcatctttaatctatcttctcttaggtgttttgagactagcttaaaaattaattcttgattgcactttgcaacyataaacatggggattggtgattgaataattagtgcttatcttctctctttgaaattggctacctttgaggttttacagtttttaacaatatcatgataag

SEQ ID NO: 45136 - DNA, 201 bp, Homo sapiens
catctattgcctttaagattttctgtgggatttaggtctcaggggtaatgtggagagacactgaacccacacagagctaaaacttctaactgaagtatccytaaaagggtccattggactgttttggtaacatatctcctgtctataccagaatgacttctcttacacctcattttggaaaggcaagagatgagagtcatt

SEQ ID NO: 45137 - DNA, 201 bp, Homo sapiens
ggataattatgagagcacaaaagcatagatgagggaactagtaggtcagggagcagatggcctaggttctagtggtaagtagtcctacaggctttccctcrtttttatccttgttgttcagggaacataaataatcaccagtgacaagggaaagcatattttgttgtcattgtcattattatttacaatctttcattgcat

SEQ ID NO: 45138 - DNA, 201 bp, Homo sapiens
gcaagtgagattgtatggttttggcaggaggagttgaggcagaatggacatagggatatctgttttttacatagaaagttttaagattatagctggaaggraccttagactagttgtactcaaagtttgacctatggtccagttctggtcagtccattacaatgacccaagttgataggaagattttaaaatcttttgtat

SEQ ID NO: 45139 - DNA, 201 bp, Homo sapiens
ttcacaatacagatgaacgcagggacattgtaatgtcagcaatagaaaagcaacagagaactgtcatagtgttggtcttttttcctctaagattcgttttrtacatttattaaggtgttatcaaagtcgtccttttcaatgaggctgtgggtggaaggcacgtcttggaatgtgttctctttacacatctgaatgaagtgt

SEQ ID NO: 45140 - DNA, 201 bp, Homo sapiens
attgtatggttttggcaggaggagttgaggcagaatggacatagggatatctgttttttacatagaaagttttaagattatagctggaagggaccttagamtagttgtactcaaagtttgacctatggtccagttctggtcagtccattacaatgacccaagttgataggaagattttaaaatcttttgtattagtctatt

SEQ ID NO: 45141 - DNA, 201 bp, Homo sapiens
agatcattttggagctttaaggtttgacttccctgctggatttcacgcttgcatggtgcctgtagccccttcgttttggccaatttctcccatttggaatkgctgtatttacccaatgcctgaacctccattgtttctaggaagtaactaacttgcctttgattttacaggatcataagcagaaggaaattgccttgtctc

SEQ ID NO: 45142 - DNA, 201 bp, Homo sapiens
cctaagcctcgattatcatcaactataaaattgagataataatagtatctaccatttaccgttgttctaagaattaaatgacatagtgcatgcaaaggacktagcatagagcctatcacctagcaagtgctaaaacattagctattatttttaacattaattatttttcaaccctagaatggtacatttttaacaggtagt

SEQ ID NO: 45143 - DNA, 201 bp, Homo sapiens
gaagctgttggcattgggccaggggttgagtggcagaataatctccttatcaattttgttatgtttgatgttgtacaaaataaatagctcaataaaaactscagtttagatgttaccatggttgggaagaaaatggcagtggctacctattaagaaccacaatcacaaatgcagtccttctgtattttatatccttggtta

SEQ ID NO: 45144 - DNA, 201 bp, Homo sapiens
ccgagggcgccttcagagctggaaggctcaagccctctgcagacagtctgcttaagatgtagcttgcattgtgtccctggggtcttatgcttctccccttyttcctaccaggtcagctgaaggacttcagcttctctcttagggtccctaatgttctcataatatcttactggaaaggcaagactccattcatacctgtat

SEQ ID NO: 45145 - DNA, 201 bp, Homo sapiens
cttttattcttccttgtcttattacttagcttatcttttgccatctgaccttatctattcattgatctcttttattctattttatataacctcacaaggtkaacaatttttttctatttcaattgtctttgtctaatttcagtacctactgttttattcttaagataatattttatacctcttcctgccaaagcctgctat

SEQ ID NO: 45146 - DNA, 201 bp, Homo sapiens
gagtcaccccactactgaggggcaaggctggtatttgaaactaattctgtttgactccaaagcctgtgtttcttttttccagtacaaaatgattattccarttggcctctgttttacattaaatgcttaactagcaaaatctagctcttggctgcccttaaaggggctcattctctttagtgccattcttccaaataactc

SEQ ID NO: 45147 - DNA, 201 bp, Homo sapiens
agttttaaagcaggaggtctaatcagaacaatatttagagatatagatgaaggtgtaaagaaaacagctataaatgtaatcattcatttttaggatgcttractgtagtcaggatattgatttaggaataaactactagaaaaactggatgtggctgggcgcggtggctcacgcctgtaatcccagcactttgggaggcca

SEQ ID NO: 45148 - DNA, 201 bp, Homo sapiens
tacattttttttttttttgagacagagtttcactctatcgccaggctggagtgcagtggcgtgatcttggctcactgcaacctctgcttcccaggttcaarcaatcctcctgcctcagcctcctgagtagctgggactacaggtaccagccaccacacccagctaattttttgtttttagtagagacggggtttcaccatg

SEQ ID NO: 45149 - DNA, 201 bp, Homo sapiens
ggtgaaaccccatctcagtaaaaatacaaaaaattagctgggcatggtggtgggtgcctgtaatcccagctactgggaaggctgaagcaggagaatcactkgaacctgggagatggaggttgcagtgagccgagatcgcaccactgtactccagctggggtgacagtgagactccgtcttgaaacaaaataagtaatttaa

SEQ ID NO: 45150 - DNA, 201 bp, Homo sapiens
tccatggggaggaggtttccaatgcagctagcatttgcgctataaactctctttctggatctcaatctccagaactagaagatgaaaggagtggatgaatrcatgattgctacaatttttgtagcccaaagccgttccacctccaactttgaaatcttctttgaatttcccaagaactctgttagatatggcaagtgttac

SEQ ID NO: 45151 - DNA, 201 bp, Homo sapiens
ttcataaatatgtagattacaagactatgaaatcaatttgaacaattagaaaaagaactgttcatttgatcttagccaaaaggctgagaagcaataaaaaragaaccatttttaaccctcctcaagtgtattactattatagcatattttgtaaacatgatgtaaaactgcttgtggttgacttagtttttaatactgaca

SEQ ID NO: 45152 - DNA, 201 bp, Homo sapiens
ggaaaataatatggaaataaataagatagaggctactttgctattatatgtaggtatatatgactatacaatttaatgaaaacaattccatatgaatatgycagaacatataatgaaaattgcttagcataacattctagtcctttcacatcttgtccctacctacatttctagtcctgtctcataataattcctctttta

SEQ ID NO: 45153 - DNA, 201 bp, Homo sapiens
aaacatgatgtaaaactgcttgtggttgacttagtttttaatactgacatttctgaaatgttatttctctctactgtatttatttatcctactttttaatytatgaaacttgtcaacatggtgaaaccccatctctactaaaaatacagacaattagccaggcgtggtggcaggcgcctgtaattccagctactcagaagg

SEQ ID NO: 45154 - DNA, 201 bp, Homo sapiens
cacatttctctaatgcttgtctctaccttcttccctctcctcaccacaatgcttcagtttaaatatttttcattgacttttcttcagatttactaattttktattcttctatgtccagtactgttagttctgtccaataataagttcttaacttcagatattctatttttcagttttaaaatatctatctcataaatgatt

SEQ ID NO: 45155 - DNA, 201 bp, Homo sapiens
ccccactgcaggactcgcctggtaatacagcttttatattttgccatttacttttatggtatcccgttttctagtggacagtctgctgccgaaaccattcycaaatcaagttctgagtgttggatactcaggataatggagctccatttggggaaatttactatgagttttattgtgagaaatggatcttcacatgactct

SEQ ID NO: 45156 - DNA, 201 bp, Homo sapiens
tgcctttttgacaatagccattctaacaggtgtgaggtgatatctgctgtgcatttccctgatgactagtgatgttcagcccctttcatgtacctgttggkcacgtttatgtcttctgtggagaaatgtcgattcaggttatattcagtgcatacctttgttctttctttcttctcattgcctagtatgccatcctttatt

SEQ ID NO: 45157 - DNA, 201 bp, Homo sapiens
gattttaaaaaacatatccaacttatttgtatagcagaaccctgtgtagctacatacataaagaaaaaaatccccaacatgaactagaggcagcatcactraaaatgagccatttttctctgatttctcttttctgaattgtttttctggaccaattaccccttgctgaccatcctgactactatagttttgagattttat

SEQ ID NO: 45158 - DNA, 201 bp, Homo sapiens
gtcatcgcaaaatgcctcactcttggcaaccacagtgttggtatttctgacataaagtttcccaaatgttgtttttgaagaccattcatatatttttcacrtttcatggttaattttaagaccttttaactccttgaactcagttaaattgcaggtggtttgctgagcacttctgtccctcttgattttaaggcttggctt

SEQ ID NO: 45159 - DNA, 201 bp, Homo sapiens
tatcttactgcatagttctgactttacacctaccctttggatcttatgattaatatttatttagtcttaatactaacaactgagggtataaaatattagartgagtaaataagacctagtattggctagcacaatggggtgactatagtcaataatgaattaattgtgcatttaaaaataactaaaagtataattggattg

SEQ ID NO: 45160 - DNA, 201 bp, Homo sapiens
cactgcataaagttgaataccttttcctatcccagcagccattttgacagcctgcctacacagaacaagccagtctaacctctttctctgtcaccgttttyttttttcccccagtccatttcacaacctggaaggaataagataaattgcagttgtgtgtgtgtgtgtgtgtgttttaaaggttttaactctaacatgtag

SEQ ID NO: 45161 - DNA, 201 bp, Homo sapiens
tggttttatgtaaacaatagctctgagaccttgcacctctctttggtccttttgattttatatagtcaggttgcaacttctgtgtttccagattcaaattyctgggtggcatagcctttgctttctccagatagtatctcccaaatattctgtcatagccacagggattgaaatcttattttcatgtattaggctgaagat

SEQ ID NO: 45162 - DNA, 201 bp, Homo sapiens
acatcaaaggtggcctaagcagagggagcccgtatcaaccactaggatgggcaatctaacgctgaacgcatacatatgaacagataataaagtattacccrtcattggagagaatagggataaagctgggaattagaacaaatgaaatatagatattacaggtagacaaaagataatgatttagaattctaattgatgtcc

SEQ ID NO: 45163 - DNA, 201 bp, Homo sapiens
tactgccttaatttcattgtttacccaaaagtaaatttattagtccattttcacattgctatgaagatactgagactagctaatttattaaaaaaaaaaaragagaggtttaattgactaacatttcacatgtctaacacttttagtgagttgttgaagttcctcaacattatcgtgtggctatctaagcctttttgtaga

SEQ ID NO: 45164 - DNA, 201 bp, Homo sapiens
ttatttatttatttttgagacagggtctgactctgtcgcccaggctggagtgcagtggtgccatctcagctcactgcaacctccaccgcccaggtttaagygattctcatgcctcagcctcccaaatagctgggattacagacgtgcaccaccacacccggttaatttttgtgttattagtagagacgggttttgccatgt

SEQ ID NO: 45165 - DNA, 201 bp, Homo sapiens
ttatattttaatatattttaaaatacatatattttacctaatatgttatatatattatattttaaatatattttaaagtacatatattttatctaatatartagccgctcctcttttttgttgtagtttaatctgcaagatagatatttcttcaaccctttactttgagcttattgatgccattatgtgtgagatgggtat

SEQ ID NO: 45166 - DNA, 201 bp, Homo sapiens
agattttttctttagtattgaccttggatagtctggtgattatatgccttggtgacgttcctttttgtatagtatctctcaagtgttctctggatttcttrtatctagatgtctacctctctagcaaaatttgaaacattttcttgatttatcacttcaagtattttttctaggttgttatctttttctcagtctcaggaa

SEQ ID NO: 45167 - DNA, 201 bp, Homo sapiens
ctggatttcttatatctagatgtctacctctctagcaaaatttgaaacattttcttgatttatcacttcaagtattttttctaggttgttatctttttctyagtctcaggaatgtcactaatttttaggtttggccactttacataatcccatatctctcaaagactttgtttattttataaaaattactttttctttatt

SEQ ID NO: 45168 - DNA, 201 bp, Homo sapiens
gactggttttgcatctttaggcaaagtgcttaaactttctgaacttcagtattcatatatgtgaaatggtgacctcatgttatatttgttgagaattaaawaaaacaatgaaaagattcttactgccctttgcacatagttttcaatcagcaaatattccaaataattctttacatatagttgtcattgaacaaataatac

SEQ ID NO: 45169 - DNA, 201 bp, Homo sapiens
taaagaaaagaatattcaacccagaatttgatatccagccaaactaagcttcataagtgaaggaggtataaaatcctttacagacaagcaaatgctgagakattttgtcaccaccaggcctgccttacaagagctcctgaaggaagcactaaacatggaaaggaacaaccggtaccagccactgcaaaaacatgctaaatt

SEQ ID NO: 45170 - DNA, 201 bp, Homo sapiens
tgagtgtctgttttaataaaactgtgagtgacaatgtcgtaaaaaagtcttaaggaaattttgatacataacccccaaagcattgatagcacctcaacttygacatctcatggtaccattttcatcttttttccctaatttttattactttcaataggaaagtggctttcttgttcaatttaaatcagtgagtcaaaagga

SEQ ID NO: 45171 - DNA, 201 bp, Homo sapiens
atcctttacagacaagcaaatgctgagagattttgtcaccaccaggcctgccttacaagagctcctgaaggaagcactaaacatggaaaggaacaaccggyaccagccactgcaaaaacatgctaaattgtaaagaccatcgaggctagaaagaaactgcatcaactaacaagcaaaataaccagctaacatcataatgac

SEQ ID NO: 45172 - DNA, 201 bp, Homo sapiens
ttatataaagaggacaaatccaattcagtagctgttaaaaaacccattcatcaaaaagcattcctaaatgtttgaaacacactgaatcatagattttattrctattcagtagtacaatgacttcctcccttctaagaacctattaactactcattgttgtagaattgaacctttcgagggggtatattctttcttaacagg

SEQ ID NO: 45173 - DNA, 201 bp, Homo sapiens
tgggtatataacaaaatgaaggcagaaataaagatgttctttgaaaccaatgagaacaaagacacaacataccagaatctctgggacacatttaaagcagygtgtagagggaaatttatagcactaaatgcccacaagagaaagcaggaaagatctaaaattgacaccctaacatcacaattaaaagaactagagaagcaa

SEQ ID NO: 45174 - DNA, 201 bp, Homo sapiens
gactcagtcctgtgatggtcatcaaaggtgtcagttcctccgaagtgaatccaccatcacctgacagatacatttattgtttaaatgtcatgatgaaagtkcccaagagccccactggtctaaagtgaggtttctcccaggctgagcacattccttaggaaataggaatcctggtccctaatttatgaatatttacaattg

SEQ ID NO: 45175 - DNA, 201 bp, Homo sapiens
gagatctacaaaccactgctcaatgaaataaaagaggacacaaacaaatggaagaacattccatgctcatggataggaagaatcaatattgtgaaaatggycatactgcccaagataatttatagattcaatgccatctgcatcaagataccaatgacttccttcacagaattggaaaaaaaatactttaaagctcatatg

SEQ ID NO: 45176 - DNA, 201 bp, Homo sapiens
gaaagtgcccaagagccccactggtctaaagtgaggtttctcccaggctgagcacattccttaggaaataggaatcctggtccctaatttatgaatatttrcaattgttatcatctgatgaacattttatctattttcttgccttctcccaagacagtacttttgtgccagtttaaaaatgtatgtaattttaaagtatga

SEQ ID NO: 45177 - DNA, 201 bp, Homo sapiens
ggagaaaatttttgcaatctacccatctgacaaaggtctaatatccagaatctacaaagaacttaaacaaatttacaagaaaaaatcaaacagccccatcraaaagtgggcgaaggatatgaacagacatttctcaaaagaagacatttatgcagccaacagacacatgaaaaaatattcatcatcactgacgatcagaga

SEQ ID NO: 45178 - DNA, 201 bp, Homo sapiens
tacgaaaattagctgggcatggtggtgcatgcctgtaaacccagccactcgggaggctgagacaggagaattgcttgcttgaaccagggagttggaggttkcagtgaaccgagattgcgccactgcactccagcctggcaacagagcaagactccatcttaaaaaaaaaaaaaaaattgatgtctatgcactgataaaaca

SEQ ID NO: 45179 - DNA, 201 bp, Homo sapiens
aaaaaaaaaacaaaaacaaaaacaaaaaacaaaacaaaaaaaaacttagaggagttgaggaggcagacatttggggcaagagtattataggcagaaggagktgtaagtacggagaccatgaggaagttctcttcctgtaataagccaaagagaggctagtgggtgataaggtcagtgagaaaatgtatattgtatgaaatt

SEQ ID NO: 45180 - DNA, 201 bp, Homo sapiens
tgctttctattaatagctttcaagagtttttctaaataaccttcaggcacaggcattttttttttttttttttttttttttgcaagaaagcaggtggaggraaaaaagacctgtggtttgttaaccaataaatgctaagttgctaaatcttcctgtttcaaataaatcagttgggccaattagaatatttattttcttcct

SEQ ID NO: 45181 - DNA, 201 bp, Homo sapiens
ttttaaacacagtcagaatactgagatttactctgcaggaaaacagagcaacaggtaaaaataataagaggaattaatttcactctgaaatgacagcattrtgccttttgactattgactttttgcagagaacatttcactggagggaactgacaactcttactagctgcctgcaaagcttgcctcctccttgctaaggag

SEQ ID NO: 45182 - DNA, 201 bp, Homo sapiens
agtgtgatgttccctgccctgtgtccatgtgttcttattgttcaattcccacctatgagtgagaacatgtggtgtttggttttctgtccttgtgatagttkgctgagaatgatggtttccagcatcatcgatgtccctgcaaaggacatgcactcatctttcttatggcgtcatagtattccatggtgtatatgtgccacg

SEQ ID NO: 45183 - DNA, 201 bp, Homo sapiens
atgcactcatctttcttatggcgtcatagtattccatggtgtatatgtgccacgttttcttaatccaatctattattgatggacatttgggttggttccargtctttgctattgagaatagtgtcacaataaacacacgtgtgcatgtgtctttatagtagcatgatttataatcctttgggtatatacccagtaatggga

SEQ ID NO: 45184 - DNA, 201 bp, Homo sapiens
gcgttcctatttctccacatcctctccagcatctgttgtttcctgactttttaatgatcaccattctaattggcatgagatggtatctcattgtggttttratttgcatttatctgatgaccagtgatgatgagcatcttttcaagtgtgtgttggctgctgcataaatgtcttcttttgagaagtgtctgttcatatcct

SEQ ID NO: 45185 - DNA, 201 bp, Homo sapiens
ttaataaaactgtgagtgacaatgtcgtaaaaaagtcttaaggaaattttgatacataacccccaaagcattgatagcacctcaactttgacatctcatgrtaccattttcatcttttttccctaatttttattactttcaataggaaagtggctttcttgttcaatttaaatcagtgagtcaaaaggaaggatggcttgg

SEQ ID NO: 45186 - DNA, 201 bp, Homo sapiens
actgtgaactccgtaagagcagaaaatcttataattttaaaattcaactctttatatcttcttcacacagagcctataactttgttaggtactcactattwtttttttgataaaaaatgaatgaccaaggtgaatggccaggatgagggatatatcgatagcatctttgtagcggtgaaaacatagctagccagtaggagt

SEQ ID NO: 45187 - DNA, 201 bp, Homo sapiens
acaacaggtgctggagaggatgtggagaaataggaacacttttacactggtggtgggactgtaaactagttcaaccattgtggaagacagtgtggtgattmctcaaggatctagaactagaaataccatttgacccagccatcccattactgggtatatacccaaaggagtataaatcatgctgctataaagacacatgca

SEQ ID NO: 45188 - DNA, 201 bp, Homo sapiens
agaatacttggacacagggtggggaacatcacacaccggggcctgtcatggggtgggtggaggggggagggatagcattaggagatatacctaatgtaaakgatgagttaatgggtgcagcacaccaacttggcacatgtatacatatgtaacaaacctgcacattgtgcacatgtatcctagaacttaaagtataataaa

SEQ ID NO: 45189 - DNA, 201 bp, Homo sapiens
ttcagttataatggtacttgaagaaaccttagaaataatctctttatgttatagctatctatctcatattcattttataaacaatgaaataggtgagggattttttttttttttttttttgaggcggagcctcgctctgtcgcccggtctggagtgcaatggtgccatctcggctcactgcaagctccgcctcccgggttc

SEQ ID NO: 45190 - DNA, 201 bp, Homo sapiens
ataggctttgaggaagaataatgttctctgcttctgtaccaagattagagtttgtttcagatatagctgatgagtaatggatgaattgtacaaaaaaaaamaaacaaacaaaagacttaggctgtcattaactgtattcagcacaagggaaaagctcttcagaaggatggttggactttaatctacttgttcctaatacaa

SEQ ID NO: 45191 - DNA, 201 bp, Homo sapiens
aaagctaagattctgtgactcaatgatttatagtaggaaaacttcgttcctattgtctaaccttccccaccagctcaagcaattcacaaagtacttataartcataaaccagctgttttggcccttgagttgtaatatgtgacaaaaatatcattttttggaaagtgtaatctctgagaatagtttagaaaggtgaaggga

SEQ ID NO: 45192 - DNA, 201 bp, Homo sapiens
attccaaccatttttcacaattgagccaaccatagcctttgaactcttggtaacttttatgctcatgtcttctctccctctcactatatatatatatacayacacacacacacacacatttatagaagaggtatttgcctacatataaaaatgcatacatatataaattagttgttctaaacaaggtaaatttgtgcctgg

SEQ ID NO: 45193 - DNA, 201 bp, Homo sapiens
aaagtgtaatctctgagaatagtttagaaaggtgaagggaaaaaatttataaaacaaaagaggtgttttatgattaaaaagaagttatgatcatataaaartattgctagtcaggaatttctgacactgtcatctctccacagctgaggatctttcagacttttagaacatcaggcctttaaatcctcaatggacaaatgt

SEQ ID NO: 45194 - DNA, 201 bp, Homo sapiens
tacatttctatagtgcctactgggcttggtacatagtgagtaatcagtaattgatagatattattcagagtcatgatacaatgataccacaaaataatcgktatctttttcttcctattctctattgatgatctatgtatataacatccattttcctgtcttatattgtacctgagtcagaataaaatggatcttttcagg

SEQ ID NO: 45195 - DNA, 201 bp, Homo sapiens
agctaacttgctaaatcaatctctgtaaggtgctatgttttatatacatcatctcctttagctgttacttacctagtgtgtagatatttatagatagatgataaatagatgatagatagatgatgatagatagatagatagatagatagatagatagatagacagatattttcttgtttgttactatacttctttgagcat

SEQ ID NO: 45196 - DNA, 201 bp, Homo sapiens
ataatgctatatatgttaatgtgctccaatgttttccaaagcatgtttacgtctagtatcttggtacttttcctaattgagatctgagcttattacttccrttttatatatgagaaaactgcacaaaattacattacaagccaatgacagtgtttaggccagaatccacagctccaggtctagtccagtaatttctctact

SEQ ID NO: 45197 - DNA, 201 bp, Homo sapiens
gctaacttgctaaatcaatctctgtaaggtgctatgttttatatacatcatctcctttagctgttacttacctagtgtgtagatatttatagatagatgataaatagatgatagatagatgatgatagatagatagatagatagatagatagatagatagacagatattttcttgtttgttactatacttctttgagcatt

SEQ ID NO: 45198 - DNA, 201 bp, Homo sapiens
caattacaatgagtattcttttcattttggatcttagcaaagacttttgccactgtgtggctgtgtgacagctgctgtacacccctccagtggtggttgaygtgatttctgcacctgtcttatgcttaaaaatattggggggagaaaatggacccagcatgctggaaaatattgacttgtttcccatattaggcttagctg

SEQ ID NO: 45199 - DNA, 201 bp, Homo sapiens
aaataaatattctgaacaaacagcaggtcaagtaatccagtttcctttttgggaaaaaaataaatcacattcaggattaatggagaggaacaaaagccaatagtgtggttaagaatttggattcaggagcaagaaagacttgggttcaaattccatttcatgccctatctctgtgatcttcaatatattacttaaaatttc

SEQ ID NO: 45200 - DNA, 201 bp, Homo sapiens
ctaacttgctaaatcaatctctgtaaggtgctatgttttatatacatcatctcctttagctgttacttacctagtgtgtagatatttatagatagatgataaatagatgatagatagatgatgatagatagatagatagatagatagatagatagatagacagatattttcttgtttgttactatacttctttgagcatta

SEQ ID NO: 45201 - DNA, 201 bp, Homo sapiens
aaatattctgaacaaacagcaggtcaagtaatccagtttcctttttgggaaaaaaataaatcacattcaggattaatggagaggaacaaaagccaatagtrtggttaagaatttggattcaggagcaagaaagacttgggttcaaattccatttcatgccctatctctgtgatcttcaatatattacttaaaatttctatg

SEQ ID NO: 45202 - DNA, 201 bp, Homo sapiens
taacttgctaaatcaatctctgtaaggtgctatgttttatatacatcatctcctttagctgttacttacctagtgtgtagatatttatagatagatgataaatagatgatagatagatgatgatagatagatagatagatagatagatagatagatagacagatattttcttgtttgttactatacttctttgagcattat

SEQ ID NO: 45203 - DNA, 201 bp, Homo sapiens
gcaagaaagacttgggttcaaattccatttcatgccctatctctgtgatcttcaatatattacttaaaatttctatgcccagtttccctatccggaatatgagtaaacagtacctatctcatagatttgtcgtaagaattaaatacgttaagggacacattattgcaatgcctcaaacatagtaagccatttaaaagatat

SEQ ID NO: 45204 - DNA, 201 bp, Homo sapiens
ttgctaaatcaatctctgtaaggtgctatgttttatatacatcatctcctttagctgttacttacctagtgtgtagatatttatagatagatgataaatagatgatagatagatgatgatagatagatagatagatagatagatagatagatagacagatattttcttgtttgttactatacttctttgagcattatttgg

SEQ ID NO: 45205 - DNA, 201 bp, Homo sapiens
cctgtaaaatttccctgaaaggaagataattatagatataagtaaatataattcaagttagaaaattttaatggctatagaagtaaaataataataatatmcaattagagttgaatggggaagaaaaatgcttttggttgtatcagaaaatagtttatgtaagagttaaatttggttataaaatataatttgtcaaaaagc

SEQ ID NO: 45206 - DNA, 201 bp, Homo sapiens
aaaggctgtctgaaataccatggtacagttattctatggagtattatgtagcctttaaaaataaatgagggagagtcatctgttgttctacaaacaaagasatgatactacagatgcataaaacacctggataaaatgagaacactatatatcatatcattttgattatacttcagagactgagaaaggaggacaagtggt

SEQ ID NO: 45207 - DNA, 201 bp, Homo sapiens
tgaagaaaactacccaaaaacaagtattatgcattgtggtgaggtctctaattcttaaaatgtctttgaaatatatcagttttaacctgtgatttatggtkgtttaattgctgtcacagtgtcatagcaaaaggttaatgttggagctgaacagatcttgtttaaatcctgtttcaaaactggctctattatttccaactt

SEQ ID NO: 45208 - DNA, 201 bp, Homo sapiens
tcaaagataccagatacgattacattggtacttaacaacattcatctggaaagaattgaaaggaggagggattaattaatctccttgaagggggtttactrttaagttaaattgcatttcctctggttctctgcttttggtgcaaaaatttgaaggatgaggaacaactaataggttttctctctttaggatttctaagct

SEQ ID NO: 45209 - DNA, 201 bp, Homo sapiens
caaaatacaaggccatatagaaacaatttttctttgaccattatggattgttggttatatagcatgatatcattgcccaaagatagtcagtattcaaagtytgttatctgtaacaataagaattactatgtcatcatgtggttggaggcattgagataatatagataaagtaaattgccagattcttgatccacacctgtt

SEQ ID NO: 45210 - DNA, 201 bp, Homo sapiens
aaacttatattttgctgtgtgtataacaattaccttgtaacaccaaaaaaaaaaagtgaagaaattactatttagtgtttgaaaactattatccaatttartaaaaagtagcttatgccatgattaagttctggcatacatctttattgttttttgttggtcttactcattaaggtaaacaaacatattaaccaacatcca

SEQ ID NO: 45211 - DNA, 201 bp, Homo sapiens
cccccgtctctactaaaaatacaaaaaattagccaggcgtggtggtgggcgcctgtagtcccagctacttgggaggttgaggctgcagaatggcatgaacmcaggaggtggagcttgcagtgagctgagatcgcaccactgcactccagcctgcgcgacagagcaagactccatctcaaaaaaaaaaaaaaaattgtgtta

SEQ ID NO: 45212 - DNA, 201 bp, Homo sapiens
ttccaaagccaagtgtgtagattttcaggtccataactcaagtttgcattttctgtgtcagttttctaactctatatatcagggaataggaacatattttrcatatctgacttgatgaaggttaatttttgaggaaacaaagaaaaataagataaatttacatggcccagtttacattaattgtttttacatgaatcattt

SEQ ID NO: 45213 - DNA, 201 bp, Homo sapiens
acagttctagttccttgtagtgaagaattatatttagtcatcaaaacctcggtgttatgtgtttttgttgcaattgaggtgtcattcttttactgttactmgctaagaaatattgcattatgaaaaataatacctcttattcaaatataagatcaagaatattttcttatcatttttcattccagttcagtatctcttctt

SEQ ID NO: 45214 - DNA, 201 bp, Homo sapiens
acaaagaaaaataagataaatttacatggcccagtttacattaattgtttttacatgaatcatttacatggcttctagaattgggacacagtccaatatamaatatcagcttatataacaatccaatctttgggtctgattctatttcacctacaggaatgaacagatttatggcttttcctggaattaaatataactttc

SEQ ID NO: 45215 - DNA, 201 bp, Homo sapiens
tttactgttactagctaagaaatattgcattatgaaaaataatacctcttattcaaatataagatcaagaatattttcttatcatttttcattccagttcrgtatctcttcttacattaagaattctagttctccaatacaacaatatctttaaacattcactctatctacaatcacacaaaatattttcagaatcatttt

SEQ ID NO: 45216 - DNA, 201 bp, Homo sapiens
tggtggccttgtagacatcttttctttatgtgtcttccaggctgagcttctggctatttgaagtttcatactcaaactgctaaagggaaagacttttacartttcagatagtcactaaccaatgtagaatgttatcttatccaattacaattctctggaattaagtttggaaatggtccaataatgaaagaatattgtgta

SEQ ID NO: 45217 - DNA, 201 bp, Homo sapiens
ttatattaaataaagttttgatactaaagcatatgattatattctaattccttataatttggtaacccacatttgttatgatagaaatgtttttaaaagaycatttgaaaaattgaaaacctgattttttaaaaccctctgcataaaaaggagttcctttaattcattgtaaactaacttaaattgtaaagccactgatta

SEQ ID NO: 45218 - DNA, 201 bp, Homo sapiens
gctaaatcaatctctgtaaggtgctatgttttatatacatcatctcctttagctgttacttacctagtgtgtagatatttatagatagatgataaatagatgatagatagatgatgatagatagatagatagatagatagatagatagatagacagatattttcttgtttgttactatacttctttgagcattatttggtc

SEQ ID NO: 45219 - DNA, 201 bp, Homo sapiens
ctaaatcaatctctgtaaggtgctatgttttatatacatcatctcctttagctgttacttacctagtgtgtagatatttatagatagatgataaatagatgatagatagatgatgatagatagatagatagatagatagatagatagatagacagatattttcttgtttgttactatacttctttgagcattatttggtct

SEQ ID NO: 45220 - DNA, 201 bp, Homo sapiens
tataaaacaaaagaggtgttttatgattaaaaagaagttatgatcatataaaagtattgctagtcaggaatttctgacactgtcatctctccacagctgargatctttcagacttttagaacatcaggcctttaaatcctcaatggacaaatgtggccttactggcctatgctggcattgaaacagatgggtcggggaagt

SEQ ID NO: 45221 - DNA, 201 bp, Homo sapiens
aatctctgtaaggtgctatgttttatatacatcatctcctttagctgttacttacctagtgtgtagatatttatagatagatgataaatagatgatagatagatgatgatagatagatagatagatagatagatagatagatagacagatattttcttgtttgttactatacttctttgagcattatttggtctcttttgt

SEQ ID NO: 45222 - DNA, 201 bp, Homo sapiens
aaatctgattgacactttttaaaaaaactatttgagatgtgacagggcaagagtatcaggagctttcattttattattcaatgtcaaccctataaatattyatataaaagtgtctgggggagattaaacttctgataagtattcagcaggacacagaataaagattaatcttttgtataaaagattaaccttttgtatatg

SEQ ID NO: 45223 - DNA, 201 bp, Homo sapiens
tctctgtaaggtgctatgttttatatacatcatctcctttagctgttacttacctagtgtgtagatatttatagatagatgataaatagatgatagatagatgatgatagatagatagatagatagatagatagatagatagacagatattttcttgtttgttactatacttctttgagcattatttggtctcttttgtgt

SEQ ID NO: 45224 - DNA, 201 bp, Homo sapiens
gatgtctggtgagggcccactttctggttcatagataatactttctaactgtgtcctcacatggcagaagagataaacatgctcccttgggacctctttcwtaaagccactaatcccattcatgagggctctgctctcattaaccatccacctcccaaaggtcccatctcctaataccatcaccttggaggttaggattta

SEQ ID NO: 45225 - DNA, 201 bp, Homo sapiens
ctctgtaaggtgctatgttttatatacatcatctcctttagctgttacttacctagtgtgtagatatttatagatagatgataaatagatgatagatagatgatgatagatagatagatagatagatagatagatagatagacagatattttcttgtttgttactatacttctttgagcattatttggtctcttttgtgtt

SEQ ID NO: 45226 - DNA, 201 bp, Homo sapiens
accaagtgggcataatttgagaatttcgagaagagccctctccctaaaatatacagtgatgcactacaataacaatgttgtggccaatgagggactacatrtatgatggtgatcccacaagttatgatattgtgtttttatcctaccttttctatgtttagatatgcgtagctacacaaataccattgtgttacaaatgcc

SEQ ID NO: 45227 - DNA, 201 bp, Homo sapiens
tctgtaaggtgctatgttttatatacatcatctcctttagctgttacttacctagtgtgtagatatttatagatagatgataaatagatgatagatagatgatgatagatagatagatagatagatagatagatagatagacagatattttcttgtttgttactatacttctttgagcattatttggtctcttttgtgttt

SEQ ID NO: 45228 - DNA, 201 bp, Homo sapiens
tgaggagttgctgcttatggatgaacagagaaagttgtctcttgagataaaatcttctcctggtgaagatgttgtgaatattgttgaaataataacaaatratttagaatatttcataaacttataaacttatttgatgaagcagtggcagagtttgagaggattgacttcaattttgaaagaagttctactgtgaataaa

SEQ ID NO: 45229 - DNA, 201 bp, Homo sapiens
tgtaaggtgctatgttttatatacatcatctcctttagctgttacttacctagtgtgtagatatttatagatagatgataaatagatgatagatagatgatgatagatagatagatagatagatagatagatagatagacagatattttcttgtttgttactatacttctttgagcattatttggtctcttttgtgtttta

SEQ ID NO: 45230 - DNA, 201 bp, Homo sapiens
gggaaggaaaagattaataagacatctggagtgagcagaatttgatctattctggaaaagctcagaaattgactggaggacttgggagggaggaagggcawttctcacaaaggaaattgcttgatcaaaagcacagagattgggaagcatgggctactttgagaacctgccagtggtagagcatgggaaagggtagggcaa

SEQ ID NO: 45231 - DNA, 201 bp, Homo sapiens
tattacttcttttagagaatcctagcagtaatatttgaggttatatgtacagttgtgctttgtatagatcctctgtgtaaaactatcatcccagcatctgratcacaatgcatattaaaaacgacataactacactttgggaggctgaggtgggtggatcacgaggtcaggagatcgagaccatcctggctaacatggtga

SEQ ID NO: 45232 - DNA, 201 bp, Homo sapiens
tgagaaacttcaaattcagaaaagccaggaaatgtacctgtgatgacttgattagcaagtgtcaaaggaacttgaatttaggtcttaatttctaaggcccrtattctaccatgcctggctgtgatatttccctcaaatgcaaaagaatcataaattattgttatttagattttattggtagtattaagtatccaaaatcat

SEQ ID NO: 45233 - DNA, 201 bp, Homo sapiens
ccgtctctactaaaaatacaaaaaaattagccaggcacggtggtgggcgcctgtagtcccagctacttgggaagctgaggcagaaggatggcgtgagcccrggaggcggagcttgcagtgagccgagatcacgccactgctctccagcctgggccacagagcgagactccgtctcaaaaaaaaaaaaagaaaaagaaaaaa

SEQ ID NO: 45234 - DNA, 201 bp, Homo sapiens
ggggagagactgccaccgtgacacacactcccaccggagagccgggcaattcaggccatggaggcagatcttaacactacccagtgctggagctgatttakcgagtgatggggtgagaagaagcggtatcaggatgcacattgcctgcactttcacactccagcaaggacagagggaagccattcctgatcctacctcaca

SEQ ID NO: 45235 - DNA, 201 bp, Homo sapiens
cccatgctcatcatgagttctgcaaatgagccctgcagactgatatcgtgttctgcagtttatttgacaaatagcttttatggcctttgattttttttcaratcacttataaattctagcaacagacaggttgtttgtcagattcaaattccatacagttgaaaggaaagaggtgaagattcctgcgttcaaagtggactc

SEQ ID NO: 45236 - DNA, 201 bp, Homo sapiens
ttggaaaatacaaactcatttcaatgcaatatatcttgcataagtattgcttacaagactgtggcactgggactatttaactacatgctgtggtagcactrtgtgtactggggttaataaaaatggaaaaaaactcacatgaagtttagagactaaatcccatttcttctctgttttggtaaagcaaagtattctgtgttc

SEQ ID NO: 45237 - DNA, 201 bp, Homo sapiens
gtgaacattctctgttaaaatggagtgagccagaaacaccagttctagaaataagacatacacaagggttaattcttttcaaaatgctgcttttaccccatttttttttctccccattgttgcaaattgtaaacatctttaaaagatttcaggactctttgtgtttggttaaggttccaacaggtggaagatatcttccaa

SEQ ID NO: 45238 - DNA, 201 bp, Homo sapiens
cttgtagacatcttttctttatgtgtcttccaggctgagcttctggctatttgaagtttcatactcaaactgctaaagggaaagacttttacagtttcagwtagtcactaaccaatgtagaatgttatcttatccaattacaattctctggaattaagtttggaaatggtccaataatgaaagaatattgtgtaaaatcag

SEQ ID NO: 45239 - DNA, 201 bp, Homo sapiens
ctatgcctgctcttaatatataactttcttacctttagctgaagactttcatctctatttaaaggtgagtgcccttggaagggacagtaatcctgctctcrctctgggagcagatatttgataacgcataagaaaccaagaaagctctgggcaccactggatggaggaatttcaatatggatactacttccaaatagagaa

SEQ ID NO: 45240 - DNA, 201 bp, Homo sapiens
ttatgaaagaagttttatcttaaaacaaatgcgacattaatggaatcagtaaagggtcttatacaataggtattatattaaaccggagttcaagcttcacrttgattgtggtatttaaatttcaatgggttgattatgtatgagaggaaaatgaccagtattatgaatgcactaaaacggacaaggaaggatcttgccagc

SEQ ID NO: 45241 - DNA, 201 bp, Homo sapiens
ctgacctttaaaatgagaagtttaggctgagttatttctggattgctactagctagaagaatctgtgactttgagttgggtcataaaaaaaccttttcttyttccttttttttttttgaaaattgatatatccacaactagtaggaagacaaactgattacaggagaataattgagaactaaaattataacgtgtatatct

SEQ ID NO: 45242 - DNA, 201 bp, Homo sapiens
actctatctacaatcacacaaaatattttcagaatcattttaccagtaccattaccatgtaaagttcaagattcttttgttataatatttccaaccaagartgtacagagtactgtgatcaaaatttccttgacttaaatctttgtttttctctgttaataactattaggatcaattcttatttttatatttaatttatgg

SEQ ID NO: 45243 - DNA, 201 bp, Homo sapiens
acagtgtttcccaagatgatgaaaaaaatgagactgtccatgcttcaaatgcaaattagggccaagttcagtggctcacgcctgtttgggaggccaaggtsggcggattgcctgagctcaggagttcaagaacagcctggccaacatgatgaagcctcatctctactaaaatacaaaaaattagctgggcatgatggtgcg

SEQ ID NO: 45244 - DNA, 201 bp, Homo sapiens
attcattcttggtagcagtttaagatttgaagaacttttgagtaatacaggacttagagcttagagtaaagttgtacttctactttgtggtatttatgccrtcagagaattcaggaatgcgctaaatggcaagtttgagaactttattggttaacattcatatcaccaggatttctgttcttcacatcccatcacaattgc

SEQ ID NO: 45245 - DNA, 201 bp, Homo sapiens
tagaaaaatatggctgcttcctccagtgatctagtgctcagaaatctagctactgagttaggggattagagctctggtcctcactctgccaatgtctcackgtgtcaccttgctagggtcatttaatgtctcttagcttcagtttttctgacctttaaaatgagaagtttaggctgagttatttctggattgctactagct

SEQ ID NO: 45246 - DNA, 201 bp, Homo sapiens
ttatttttatatttaatttatggtttgctgtcttaaaaatgtgtatttattttgtgacattttgacctttatatgaataaaaaatcaccacagatacaaaygcatgcttgcacaagtctgatacccattcttaattctttcatccattcacacctgcatcttgtagttaaccattttggttaatgactaattatctaccct

SEQ ID NO: 45247 - DNA, 201 bp, Homo sapiens
cagtgtttcccaagatgatgaaaaaaatgagactgtccatgcttcaaatgcaaattagggccaagttcagtggctcacgcctgtttgggaggccaaggtgkgcggattgcctgagctcaggagttcaagaacagcctggccaacatgatgaagcctcatctctactaaaatacaaaaaattagctgggcatgatggtgcgt

SEQ ID NO: 45248 - DNA, 201 bp, Homo sapiens
tacactatccagatgaaataacataaaagtgttggagcaagtgtctaggaacacactacttcaatacgtattagcttgttgatggtgagtaagtcaatgarcttctctgaaacttagtttcctaatctacaaaacagaaataataaaccctgacttgtttactttctctgagtttcagatgaaataatgtgcataaaatac

SEQ ID NO: 45249 - DNA, 201 bp, Homo sapiens
tttagtagagacagggtttcaccatgttggccaggatggtctcgaactcgagacctcacgatcctcctgccttagcttcctaaagtgctgggattacaggygtgagccacagtgcccggccgattctttgtatttctatggagtcagtagtaatattcccctttctgtttctgatcgtgtttgcttggatcttctgtcttt

SEQ ID NO: 45250 - DNA, 201 bp, Homo sapiens
gatacacagtggacccttaggacgtaatatcttgcacatgtatgtgtgtagcagggtgtcttttatagatctgtgaaagccaacactcaaaacagcatctrattatctacttaatagctaacctgacaattgtatgtgagtacacataataggtacaaaagctggctattagctcgactgtagaaggcaggaaaagtgggg

SEQ ID NO: 45251 - DNA, 201 bp, Homo sapiens
ggccaggatggtctcgaactcgagacctcacgatcctcctgccttagcttcctaaagtgctgggattacaggcgtgagccacagtgcccggccgattcttygtatttctatggagtcagtagtaatattcccctttctgtttctgatcgtgtttgcttggatcttctgtcttttcttttcattagtctagctagcagttta

SEQ ID NO: 45252 - DNA, 201 bp, Homo sapiens
aaattcatcaactgtattctgtcatgtcattttgttgttgttgtttcatgttatagagaagtagacatccccttattcatggttttgattttcatggtttmacttatctgtggtcaaccactgtctgataatattaaataagaaattccagagttaaacaatttataagttttaaatcgtgcactcttctgagtagtgtga

SEQ ID NO: 45253 - DNA, 201 bp, Homo sapiens
tgtcttttcttttcattagtctagctagcagtttatcttattaatttttccaaaaaaaaaaaacagatcctgattttgttgatgttttgaatggtttttcrtgtctcagtcttcagttcagctctcactttagttatttcttgtcttctgctagctttggggtgggttttctcttgcttttctagttcctttaattgtaat

SEQ ID NO: 45254 - DNA, 201 bp, Homo sapiens
agtgatatcagtaaatatgataacaggactactatatttttagctggcctaagagtcagaatcccctagagggtttgctaaactattgattgctgggcccsaggcctaaagtttcccattccttgggtctgactggggcctgagaatttgcatttctaaacaagttcccaggtgatgatcatgctgctggtccaggcgcca

SEQ ID NO: 45255 - DNA, 201 bp, Homo sapiens
gaccataattgaatgattaattacctcatacctgtcccattgtacttattaagctttcagagatacttcctccacagattgctaattatagcacccacagygggtggtggtgggggtgtgtcaaaagtatcacttccagggttcatagcagatggaaacacaccattcatcatccagtattaactttcttcatctgaaggc

SEQ ID NO: 45256 - DNA, 201 bp, Homo sapiens
tcaccgtgttagccagcaggatggtctctatctcctgacctcgtgatccatccacctcggcctcccaaagtgctgggattacaggtgtgagccaccgcgcmcggccattttcccccttttctacactctaccctggacagaagtcactatgtagcccacagttaaggagtggaagttattttccgctccttgagggcaggc

SEQ ID NO: 45257 - DNA, 201 bp, Homo sapiens
gggaacactttctctccatagtcctaacggctatcaaatgtgcgcttctccccttcatgcttttctgatactttgttgactgtggagaatttattcaggcwccatttccaatttatttaatgtacaaagacttcatagcttttcatttttcagtgttaggcagatttcctaagttcatctaagttactctgctcttcaacc

SEQ ID NO: 45258 - DNA, 201 bp, Homo sapiens
ttggggtgggtctcaggattcccctttaacaagccctccctcctaggtgaatttgatgtatgctaaaatatgataatcactgctctaagaaagagctaggwgattgagggaggagaaactatgtttaattaactgtatcatgaccataattgaatgattaattacctcatacctgtcccattgtacttattaagctttcag

SEQ ID NO: 45259 - DNA, 201 bp, Homo sapiens
ttatatgcaaatttaaatcaaaccttagtggaaagaagtctgtaacagtactcttgctgcttcttctgaaaacagagtataaggtagggaaaccttggaaygcctgctggcactggtcagcaagaagtcttatgctctcagcacatttaatggccctcctcttgtgtatcccatttgaagaaacttttgactaagggagca

SEQ ID NO: 45260 - DNA, 201 bp, Homo sapiens
tttttctctagtacaggtgttgtcaaaatgtggtccttagatcagcagtatcagcatcacctaggagcttgttagaaatgcaaattatctggccccacccsctagcctactaaatcaccctcttggggtgggtctcaggattcccctttaacaagccctccctcctaggtgaatttgatgtatgctaaaatatgataatca

SEQ ID NO: 45261 - DNA, 201 bp, Homo sapiens
ccatgtgaagatgtgcttgcttcccctttaccttccaccatgattgtaaggttcctgaggcctccccagccatgcctcttacacagcctgtggaattgtgwgtcgattaaacatcttttcttcataaattacccagtctcaggtagttcttcatagcagtgtgagagcagactaatacatacagtatgtgtttttatttag

SEQ ID NO: 45262 - DNA, 201 bp, Homo sapiens
ccatggtccaataggactttgatgcagtctagtcctgcactcagagagctctacacaagtgcagctcagagcttttgactcaaagtagctgaatataaggmgccaagcatctccctttgaaaacatctccaggtgttcaggggaaatggctaacattgtgaatggaagggtaatatggggaagacggttacttgcagaatc

SEQ ID NO: 45263 - DNA, 201 bp, Homo sapiens
aatatagatcatggttgaaatatttgctacagaattggcaaatgctacaaatcattgactactttttgttttcttcctggaaagccagttattaaacattyaccagcacaccagtggtccagtacctaaaaaattaatttaattgttttttttttctctagtacaggtgttgtcaaaatgtggtccttagatcagcagtat

SEQ ID NO: 45264 - DNA, 201 bp, Homo sapiens
tattgttgctttaatcaaatttattcctttttattactgaatcatatttcattaaatgggcataccatttgttaaataattcatctgttgattaagatttragttgttctcactactgggatattacaaataaatctgctataaatatttgtatacaagtctgtgtgaatatgtgtttctattcctctttggtaaatacta

SEQ ID NO: 45265 - DNA, 201 bp, Homo sapiens
aaaagaatgtaggctatatgaaataaggaagattcagacctttaaaacaaagtctgtctgggtacagtggcttatatctataatcccagcactttggaagsctgaggcaggtggaatggttgagctcaggagtttgagacaagcctgggcaacatggtgaaacccccgtctctgtaaaaaacagaaaaattatccgggcat

SEQ ID NO: 45266 - DNA, 201 bp, Homo sapiens
tttttttcctttcatcttttcttattggaacttatttaaaatttctgagtgtttcactctaagagcatgcattccatatttaaaaaggaactgggttattygctacatgccacatagtgggtttgtcacatttgatatctgaactcttcctcagatggaatcacttatattttactttaggagccccactgcaggactcgc

SEQ ID NO: 45267 - DNA, 201 bp, Homo sapiens
ggttctgttgtcatctactgattcttgctggtttcttcacttcatcctgttgagaccaggaataagtcctgctggtctcctacctcactataaccttgctrcactccattgggttgacgagtcttttgtggatttcttgggatttctatgtagatgatcatatcacttgtaaatagggacagttatatttcttcattttaa

SEQ ID NO: 45268 - DNA, 201 bp, Homo sapiens
tattggctagcagtatttatacccacttttaattacatgcatgttaaggagtgggttactcagaactctctagaaaacggccagtaacttctgggtgttgytgggcatttgtaaactgtcagggcactggtgggagtgtcttatgctgatgagcagtggggacacctagaggttggttctgttgtcatctactgattcttg

SEQ ID NO: 45269 - DNA, 201 bp, Homo sapiens
atccacagtagcagcatgtggactattggctagcagtatttatacccacttttaattacatgcatgttaaggagtgggttactcagaactctctagaaaayggccagtaacttctgggtgttgctgggcatttgtaaactgtcagggcactggtgggagtgtcttatgctgatgagcagtggggacacctagaggttggtt

SEQ ID NO: 45270 - DNA, 201 bp, Homo sapiens
aacagacagaactaatctatgtatttaggtcaggatagtgtttactctgggcagggactgggtggggtggggtggggtggggtggggcgggctgctgtacmccttgtaatatctgtttcttagtttagatattgcttacatagatgtattcagtttatgaatattcaccatcatgatatgtatacatataatatatataaa

SEQ ID NO: 45271 - DNA, 201 bp, Homo sapiens
ggaggctgagccaggagcattgcttgaatttttggggctgcaccactgctctctagtctgggcaacagagcaagcctccatctcacaaaaacaaacaaacaaacgaacaaaccataatctaatttaattctaccaacaacctttgtaacaagcattttaatgatcattacagattaggaaattgaggctcagagagtaagc

SEQ ID NO: 45272 - DNA, 201 bp, Homo sapiens
ctttttaattctgagattctctaatttttttaaaaaagggtatactttgatcattcatctgcatatttttcttttttctttactaatcaagtttgagactrtagcctactttcactgttgccagtttacctcccatttcctcttaaactcatgccacttcttttgtcttcttctttttctttttctgtttctttcatatat

SEQ ID NO: 45273 - DNA, 201 bp, Homo sapiens
ctgatctaagttttggtaaaatgctctgagatattcctggaacatgagagtgtgggaggctttgaagagcctaccccctctacctatcttccaaggaggcygccatgagacagttactcatcacttcatgggttttgaagaggcctgaggctctctgcctctctgttatttgggcacaactgcaaagtataaagctgctta

SEQ ID NO: 45274 - DNA, 201 bp, Homo sapiens
ggggtttctgggcttatgataaacatcttccctgcatgtctctagagaggctatttggccaaggcttaactacagctgatctaagttttggtaaaatgctmtgagatattcctggaacatgagagtgtgggaggctttgaagagcctaccccctctacctatcttccaaggaggctgccatgagacagttactcatcactt

SEQ ID NO: 45275 - DNA, 201 bp, Homo sapiens
acatacaattgttttgtgtgatcaacatttttcactccctaaggtctctctaatcccaggagaggggtttctgggcttatgataaacatcttccctgcatrtctctagagaggctatttggccaaggcttaactacagctgatctaagttttggtaaaatgctctgagatattcctggaacatgagagtgtgggaggcttt

SEQ ID NO: 45276 - DNA, 201 bp, Homo sapiens
gaaaccccgtctctactacaaaatacaaaaaaaattagccaggcatggtagcgggcacctgtagtcccagctacttgggaggctgaggcaggagaatggcrtgaacccgggaggcggagcttgcagtgagccgagatcgcgccactgcattccagcctgggcgacagagcgagactccgtctaaaaagaaaagaaaaaaga

SEQ ID NO: 45277 - DNA, 201 bp, Homo sapiens
aaatattccttgtaagtacacaataggtctttctaagtcttttctcacaacaacctgttagaaaatataatagaagcaaagatctcagttacaaaactgarctccttctaaataaaactttagctccttctaaaaatctttgtatggttctcttcctcacttatacaggtctctactcaaagttacctcctcagagagacc

SEQ ID NO: 45278 - DNA, 201 bp, Homo sapiens
gaggcaggagaatggcgtgaacccgggaggcggagcttgcagtgagccgagatcgcgccactgcattccagcctgggcgacagagcgagactccgtctaamaagaaaagaaaaaagagaaaaaaaaaaaggaaaactctttctactagtctatgctgtcttccagttacttgacagctgtgttagtgggcctatttgatcc

SEQ ID NO: 45279 - DNA, 201 bp, Homo sapiens
caaaaagtaaaactatctgattttcaggtaagaaaattgcagaatttattttaaacaatatttagtgactaagattgctgcatgttattgaaaaatgggtrgaaatctattctcaattaataaaataaaaattataaagcagcagacatgcagtagtttacaaagatgaaagtgtgcaagtacattgctcagtaatatagg

SEQ ID NO: 45280 - DNA, 201 bp, Homo sapiens
gttcaagacgagcctgaccaacatggagaaaccctgtctctactaaaaatacaaaattagccaggtgtggtggcacatgcctgtaatcccagctacttggwaggctgaggcaggagaatcgcttgaacccgggaggcagaggttgcagtgagccaaaattgaaccattgcactccagcctgggcaacaagagtgaaactcc

SEQ ID NO: 45281 - DNA, 201 bp, Homo sapiens
gaaaaatgggtggaaatctattctcaattaataaaataaaaattataaagcagcagacatgcagtagtttacaaagatgaaagtgtgcaagtacattgctyagtaatatagggtctgatttgggagaaattgcaaagatgacagctgttgaagaagacaaatcaaggagagaagtgcctgaaataaagagtcaggaatttg

SEQ ID NO: 45282 - DNA, 201 bp, Homo sapiens
gacatgactttgttccttcttgccttgattgccatgtaagacatgattgtgaggcctccctagccctgtgaaactgtgagtcaattaaacctctttccttwataaattacccagtctcaggtatgtctttattagcagcgtgagaacaaactaatacaaggggattctctaaaaatggtagacagtcacctgttggctcag

SEQ ID NO: 45283 - DNA, 201 bp, Homo sapiens
acatgactttgttccttcttgccttgattgccatgtaagacatgattgtgaggcctccctagccctgtgaaactgtgagtcaattaaacctctttcctttwtaaattacccagtctcaggtatgtctttattagcagcgtgagaacaaactaatacaaggggattctctaaaaatggtagacagtcacctgttggctcagt

SEQ ID NO: 45284 - DNA, 201 bp, Homo sapiens
ctacatgatagagggatgagaaattgactgagtttaaaaaaaaaaaagttcagtgtttttatatatagatataatgctttaaaagttttcaaatgctgaayaaatttagtaagatgagggccaggtgcgatggctcatgcctgtaatcccagcactttgggaggccaaggcgggtggatcatgaggtcaggagttcgagac

SEQ ID NO: 45285 - DNA, 201 bp, Homo sapiens
gaaacagtttgctgatcccccaactcccatcctaatttaggtgatcatattggttagctccatgagctctttttaagttgtctttttgccccttcttcatrgcatactgttactctcatggatgtgccattttttctcactgtgaggatattatttgcagtttttttttttttttggtggtatactgcttgctgcggtgcc

SEQ ID NO: 45286 - DNA, 201 bp, Homo sapiens
atggttttataaggcagttttccctgcttttgtttgctgtctctctcctgttgccatgtaagatgtgtctgcttccccttctgccatgattgtaagtttcytgaggcctccctgccagacatgcagaactgtgagtcaattaaacctctttcctttataaataacccagtctcgggtagtatctttgtagtagtgtgtaaa

SEQ ID NO: 45287 - DNA, 201 bp, Homo sapiens
tgattgtaagtttcctgaggcctccctgccagacatgcagaactgtgagtcaattaaacctctttcctttataaataacccagtctcgggtagtatctttrtagtagtgtgtaaatgaacgaatacaactttaaaaataactacattgagaagaaactctggagtcctaggatcaaatcctgttatttttgcaaaaccaag

SEQ ID NO: 45288 - DNA, 201 bp, Homo sapiens
aagacttcactttaagccattgcctttcctataatgaagatatacaaatgattagatatgagagtaacttttattcatagatttcctctttcccaaacagrtggaaacccttattttcaatgtacagatattgaataatgtaaagctacatgatagagggatgagaaattgactgagtttaaaaaaaaaaaagttcagtgt

SEQ ID NO: 45289 - DNA, 201 bp, Homo sapiens
tttgtgtccgaaggtagtgatttatttatttatttatttattttgagatggagttttggtcttgttgcccaggctggagtgtaatggtgcaatcttggctyaccacaacctccacctctgggttcaagcaattctcctgcatcaacctcctgagtagatgggattacaggcatgtgccaccatgccctgctaatttttgta

SEQ ID NO: 45290 - DNA, 201 bp, Homo sapiens
atttatgtttgggcatagacaatattgagcagcttattgtgacattaatagactatcaggctcagttatttttatttttattatttatttatttttttatrtggggtttcactgtcacccaggctgcggtgcagtgacgccatcttggctcactgcaacctttgcctcctgggctcaagtgatcctccctcctcagcctcc

SEQ ID NO: 45291 - DNA, 201 bp, Homo sapiens
ttccttctgtttttaggccaaacactactccaccattatgtgtatataccatgtttttctttatctagtcatgatcaatgggcaattaggtgcttgttatrtcttgactattacgaatattgctgcaattaacatgggagggcagatatctcttcaagatcttgatttcaattttttaaaaattatgctttaagttctagg

SEQ ID NO: 45292 - DNA, 201 bp, Homo sapiens
aagcttaatgtgggctgctgacaggaaacccattttgcaaaactgcttcttcttgaatggcaattgaatcaactcactgttatcaagctttaagtgagtgrgtccttgcagttgccaaaattgaataggaaatgctttaattttgttctggctgtggtccaacaacaagagagacttctcaagtgtggaattacggagctg

SEQ ID NO: 45293 - DNA, 201 bp, Homo sapiens
ttaaaaagctgtttctaatttcctgagaagttaacaatctataagagatttgtgatctaaaattgtattcagcatgttgaataaaggatatgctgacaatwcaaagttttctgaaatagatattcattatctttcctgataccttgctaaacctatcataaaattctaaagttaataaaaatgactgaaattttataaata

SEQ ID NO: 45294 - DNA, 201 bp, Homo sapiens
gcaattcctgcttgagaccttaagtatgatgagaacttgagactgcttttttggattttggtcacaaacagaagtaataaaaacactttgattcaatgtgwctttggcaattacggctctgtatgctaattaaatttctaaataaggtggcttaagggacacttaaagtagtgatattcaaagtgtggtccccagaccagg

SEQ ID NO: 45295 - DNA, 201 bp, Homo sapiens
tgttttaggtcacaagatattaagggcagcgtttgaccttgaatctggatagtcaatcctagatattatgttctaccatagttccagccttatgttgtaakaagttttgcaagtcacttaccatagattttctgttcctaatttggaaataggatataaactcacagctctgtctcagagcatgtttagtaggtgtgctta

SEQ ID NO: 45296 - DNA, 201 bp, Homo sapiens
aggtgggcaaatgtattatacatatgctgtccaagcctatgatagttatctctaactgatgaaggcattttatttatttatttatttgctgaatttagacktggcttcaccatcttccccaacatagctcttcaggcatccactatttatctttcagaattgtcaagtacattaaaacctatttatcatcaaagcactaat

SEQ ID NO: 45297 - DNA, 201 bp, Homo sapiens
tatgtttcaatcaactgaactcaacagatttaccgaatcttcactagcgttgagatctctcagtgttgaggaggtgtttgatccagcctaatgtttgtcayagccttattatgttttcagtttaagcatcaattcataaaaactgaaaattcaaaggatttacaaaaattatcagttttacttacttctcatcttcatttt

SEQ ID NO: 45298 - DNA, 201 bp, Homo sapiens
tgtacttgttctctaatctgcctccagaatcaatataaatgcttttattcatgccccaaataatctccaacctgaccccagtttgtctcctctactacttwcctcctgcaccagccttctgattgttcttttattttatttattaatttaatttaatgtattgagacaaagtctcactctattacccaggctgcagtgcag

SEQ ID NO: 45299 - DNA, 201 bp, Homo sapiens
attgatttgaattttttttttttttttttttttagacagagtctcattctgtcacccaggctgcagtgcagtggcatgatattggctcactgcaacctccrcctcccaggttcaaatgattcccttgcctcagcctccctagtagctgggattacaggcacacgccaccacacccgtctaattttttgtatttttagtaga

SEQ ID NO: 45300 - DNA, 201 bp, Homo sapiens
tcatcaagtaggtaatcagcagtggtcactgacaaatgtcacagaataaagagaatcagatttgaaaggctcagctctaaaaagcaaaccaaggttcagcyactcatttaaaaccttctgtggccctttggcattatcacagaccattctatttgatactttcacaactttcaactattttaaatatcaaacttctctgtt

SEQ ID NO: 45301 - DNA, 201 bp, Homo sapiens
gttgtctatgtataattttctggggacattaagtactattttggattccagactagatagaacagataaaaatttttattattatgaagtttttgtgtctwtttgctttgataagagatttattggattgtatttcactaggttgcatggttagtaattctgtatacttttatgccttctctgtaaggtactcatattcat

SEQ ID NO: 45302 - DNA, 201 bp, Homo sapiens
agtggagaaagaagaggaaaagcaacaaacagaaataaacttttgccacaatccagctaggtctgtgggctaagctcttacccaaagcatcttagtgtaaytgagcctcacaacaacttttgggattaggtattattatccgaattttattctgagggaaacaaactttaaaagagaacacatattgcccataatcactca

SEQ ID NO: 45303 - DNA, 201 bp, Homo sapiens
ggggtgtgtgtgtgtgtgtgtgtgtgtgtgtgtgtgtgtgtgagagagagagagagagagagagagagagagagagagatggcttcttggaagaagaaatrcaggatctaagtccttaagttaagggtaagccagagtctgcctgacattatccataatgtgaaggaaataacagttgaaaaaatattccatctaattcag

SEQ ID NO: 45304 - DNA, 201 bp, Homo sapiens
aatagatcacagtagggacaccagacagccttcagttgcaaaacaacagggcacaagaaagagaatttgattaactgaatttgttcaaatgttatagggcytggtgatataacaaggagggaaattgcaaagatgctttctcaagaatactgtgacaagaatgcacaaaaaggctaataatgcgatatatgattgtataga

SEQ ID NO: 45305 - DNA, 201 bp, Homo sapiens
gatacaggtttgcaaagggtgtaaatgcagtactgaggaaggacttccaacctataccgaggggtgtgtgtgtgtgtgtgtgtgtgtgtgtgtgtgtgtgwgagagagagagagagagagagagagagagagagagagatggcttcttggaagaagaaatgcaggatctaagtccttaagttaagggtaagccagagtctg

SEQ ID NO: 45306 - DNA, 201 bp, Homo sapiens
gggcacaagaaagagaatttgattaactgaatttgttcaaatgttatagggcctggtgatataacaaggagggaaattgcaaagatgctttctcaagaatrctgtgacaagaatgcacaaaaaggctaataatgcgatatatgattgtatagaaattacatcgtaatgaacttgtgctattaatacctaagaagaaagaat

SEQ ID NO: 45307 - DNA, 201 bp, Homo sapiens
gactaggtttcattttgtttctctgattttacaaagtttcaggtacatcaggtgctgagaatacaaagcaaataaaatataggtgatatgatacaggtttrcaaagggtgtaaatgcagtactgaggaaggacttccaacctataccgaggggtgtgtgtgtgtgtgtgtgtgtgtgtgtgtgtgtgtgtgagagagagag

SEQ ID NO: 45308 - DNA, 201 bp, Homo sapiens
aatgcacaaaaaggctaataatgcgatatatgattgtatagaaattacatcgtaatgaacttgtgctattaatacctaagaagaaagaataaattgtcctragataatagctgcatgtagttgcagcaaagaaggattgcaaagagatcaacacggagataaaaaatagcacattgaaggctttggcgagaggggggatgt

SEQ ID NO: 45309 - DNA, 201 bp, Homo sapiens
tattcataagtcttaattctgtgctttgtggaaacaaacaagcaacaaaataggacagagagagagagagaacaaatatgaaattgaagatgtatcttaakttttaaaaaagagaacagccttgactattattttgatatacagaccttgggaaattctacattgaaagcaaataaattagaatttcgaattcatgtattg

SEQ ID NO: 45310 - DNA, 201 bp, Homo sapiens
cacttgtatccccaaagctattgaaataaaaaaaatatattaagttgagaccttgtgcactaaaacaaatactaggctaattcttgttaagcactttgacmtgtatttgcaaaaatgacaaggaagacatgtccctgcctcacagaatagacaattcaacaattagctgcctaattcagcgatgatatattaaagtataat

SEQ ID NO: 45311 - DNA, 201 bp, Homo sapiens
caatcatccatttgaatgaattggaaggaaagctaattaaattgatgaatacttgttttagttttaatccctttaagaatatataaaaactgcaactattrtaactcctcagacactgtgtagtggagttttaattaatagataaggatgatctctaattagctcatcaaaatactttaaacagtatcaaccctacatata

SEQ ID NO: 45312 - DNA, 201 bp, Homo sapiens
cactttacgttcccacgaacagtgtacaaagcttcccgtttttccatggccttgcccatacttcttatctcttgtctttttggtaacagccatcctaatakgtgtaaggtaatatcttatcgtggctttgatctgcctttccttaattagtgatgttgagcattctgtcatatatctgttagccatttgtcttcttttgag

SEQ ID NO: 45313 - DNA, 201 bp, Homo sapiens
gactcagcttagtttagctctcattatttctctaaatagtttccaaaaagatttgtcttctaatttgatactcagctgatacattctgcacaatgaacccrgcatttatttctcttactaggatgttctttaattcttcacttggtgattgattacctactaatttgacacttggtttaaatgtgggtttccctgtgaagc

SEQ ID NO: 45314 - DNA, 201 bp, Homo sapiens
tagtttgttctaccagtcaagataggctagtctatgctgcactgtcaaaaacaatttaaaaaaactagttaaagtcatagcttaaaacaaaaatgtatttytttttcatgtcatatatgtacacaaccatttgtactgggagacacacctagttttaaggaccatagtcactcaggaacctaggctgacagaggcaccaca

SEQ ID NO: 45315 - DNA, 201 bp, Homo sapiens
aagcttcctgtgttgcttatcatgcattttaaaaatagatggctttgaatgtgtgagttaatttttagcctcatttgccaaggcctcctaactccagaagyatgcttttagtgaacccacagttcagttcatattcaatgcaattaatagtagtgggcacttacgaggtgccaaacttcagaatgtcatagcttccttttc

SEQ ID NO: 45316 - DNA, 201 bp, Homo sapiens
ataaatttgcctttctcatttaagatcttaaccatttgtatttttttgtatattgagataagacttttatttttattcacttcatatgcctaaccaattayataaaaactttttaataataattgtttaaataaaaaagtttttttacccataatgatgtgcagagccagatacataatcaagtataaatgcattgtctgt

SEQ ID NO: 45317 - DNA, 201 bp, Homo sapiens
atttttttgtatattgagataagacttttatttttattcacttcatatgcctaaccaattatataaaaactttttaataataattgtttaaataaaaaagtttttttacccataatgatgtgcagagccagatacataatcaagtataaatgcattgtctgtgtaaaaatttgtcttttgttccaatagactatatgtctg

SEQ ID NO: 45318 - DNA, 201 bp, Homo sapiens
cttgacatttgaaaccaatgaccaatatatcaacattcttataatttatttaatgcagctactttttccaaaataagttcatttaacataagcattgtcartcatccatttgaatgaattggaaggaaagctaattaaattgatgaatacttgttttagttttaatccctttaagaatatataaaaactgcaactattata

SEQ ID NO: 45319 - DNA, 201 bp, Homo sapiens
ctcacatgttttgatattctattgtaatctatggcttgtggaaactgatttgaagaagaaaaaacaactttagtccttaccaaattttacctagaatcctytggatttctattccctaagaatgtaatataagataaatacactgaaaaatatctaattttaaacagatgcagagagtcacattctgtttctactattctt

SEQ ID NO: 45320 - DNA, 201 bp, Homo sapiens
cagattggtttcttcctgattcttcatgcctatttcttattcctgcctttcgttgtttttcctttttgtagtaattcttttcatctgattgtgtctatatmttccattacaatactaatatattatttgaaaggttgatgtgtagattaagaaagtagcagctgggcatgatgtcttacacctgtaatcccagcactttgg

SEQ ID NO: 45321 - DNA, 201 bp, Homo sapiens
tcttaagaatttttcatagaagccactgcttctaatgttgtggaaactaccctgaaactgctctgcatcttgcattagtgttctgctgcgtacagttctcrgacaatccagttcattcggaatgccgctgggtgaaaacctcaccactgtttagtgacaagatagatccctgaccacgaaatctactggtggcaacattat

SEQ ID NO: 45322 - DNA, 201 bp, Homo sapiens
ataattggattttattcacttcctgcattggggctccctagcaactactatgtggaatccctctgataactgctcagtcatgataatacatatacaacctyatatgaggcacgaaccccacatagagcaactcttgaccaataaccctattctgtttctaagatggacaatttggaaatgcattttccacagaacctgaaa

SEQ ID NO: 45323 - DNA, 201 bp, Homo sapiens
tactgtattgtattccttgctttctgtttctctgccaatctacatccacgtccttttgcttacacagggtattgattttccgacctctgtctctgtctagrggagagagttctggaaaatccttttggtctgtttagtctgggagagaagtacctgtacactaagtgactctttgctctggatttgactagcccctctttc

SEQ ID NO: 45324 - DNA, 201 bp, Homo sapiens
attgatctactattgcaacagccagcattatagagtcaatattataaattgctgtactagaaagatggtttgttaaactgaagaccacaaaccttaaaatyagatgtatttaaaccttgcaaatttctacacgtccccatcctacaatcttctatcaatagcaaaattggcttgttgattaccatttagaaactacctggt

SEQ ID NO: 45325 - DNA, 201 bp, Homo sapiens
tttcaatcccttcatgagctactgtattgtattccttgctttctgtttctctgccaatctacatccacgtccttttgcttacacagggtattgattttccracctctgtctctgtctagaggagagagttctggaaaatccttttggtctgtttagtctgggagagaagtacctgtacactaagtgactctttgctctgga

SEQ ID NO: 45326 - DNA, 201 bp, Homo sapiens
tcaccaatgatgaagtatattttagagtgagagaaggtataggcatcaagtatatttttgcaacaattagaacttctgtgatttaagcctaaatctctctyctcttccattgatttatagagtagaacgttggtattcaaaaatgcccgttttccaccttataacatggacaaaaaaaccaaagttctatatctttagtag

SEQ ID NO: 45327 - DNA, 201 bp, Homo sapiens
gcctttacacatatgcaaatgctttccagttgttcatctcaaactttgcctgcttgttaaagaaatatgcagtttgcctttggagtgacaggggtctgggwttgaatcctaagaactactgatcccctgtgatcgtgagcccgtaaacccccctgagcttggttttctcatttataaagtgaagatgtcaggttttggacc

SEQ ID NO: 45328 - DNA, 201 bp, Homo sapiens
gagtgagagaaggtataggcatcaagtatatttttgcaacaattagaacttctgtgatttaagcctaaatctctctcctcttccattgatttatagagtasaacgttggtattcaaaaatgcccgttttccaccttataacatggacaaaaaaaccaaagttctatatctttagtagtttataatgccaccaaggcatgaa

SEQ ID NO: 45329 - DNA, 201 bp, Homo sapiens
catcttccgttagtgaatatagaatattttaggttctgtttctgaatgaaaatgctgataaatactgcactccctttctcaccaaatcaacgttccaaaarcaattcatgaaatgagaaaggaatgaaaaaaattgcctgaagacccggatggttgaaaagaatgagaaataaaagggtcatgtccttctctgttagtaag

SEQ ID NO: 45330 - DNA, 201 bp, Homo sapiens
atgtactagataaaaaagagtaaatatttatttttgtgactttaggatggtaaaggatgttccaaatgtgataccaaagaccaaaaacaaaagaaaagggrcgcgaactttactgctgagaatacaaaataaaaaaggtaaacccaagcaaacaaaacacaaaataaagacaaacatccatttgaggagataataatcaca

SEQ ID NO: 45331 - DNA, 201 bp, Homo sapiens
aggctactctgttagcaaataatgactaatgctaaacagaaacatgaaaaggatacactactttcactcaggtattgactaagaataaccaaggaatagamcataccctgtaattgaactgcctaatgaatattatttggaaaaaccataaactactcaaaaagaacaagagtagtcattcggatttaagaaagtgcctaa

SEQ ID NO: 45332 - DNA, 201 bp, Homo sapiens
agataataatcacaaattatataagaaaatgtttatatattcatagaaatagattttcacaaattaataagaagaaatgactcctcaccccactttccacscctggccaacagaaaactgggcataggccctattacaaggtattcataaagaatacatgtacatttatagtaagtatgttaattgttgtcccatctcatc

SEQ ID NO: 45333 - DNA, 201 bp, Homo sapiens
ttgtgatctttagacttgcatggtttgtggtcctacaaaataaatgtaaatattatcttatacctttacttgttctcattccacccctttctataccacccaacatgttcttcctatttgaaaccaggtttattataaatgaaatatatcaattagaaggaaggacacttaaccattcaaaaagttagggccatagtagag

SEQ ID NO: 45334 - DNA, 201 bp, Homo sapiens
tcgaactcgcgacctcaggtgatccacctgcctcggcctcccaaagtgctgggattacgggcgtgagccaccgcacccagcctatatatcacatttttatktatcagttttagtccattaccatatctttgccaacacttggtatcttttgcctttttgacaatagccattctaacaggtgtgaggtgatatctgctgtgc

SEQ ID NO: 45335 - DNA, 201 bp, Homo sapiens
  misc_feature (1)...(201): n = A,T,C or G, or insertion/deletion polymorphism (see Tables 1-2)
ttgaaagcttaactaattgaagccttacttttaatttccttttgtgctcatttatagacatggcttcatctatatcctgtctcagtactaagataggctcntgtgtcagctgctgcctcttgagcagagggtcttatttctagtgcctgaatggaattttacttggaaaagccttgtctactgctatgggcctttctaatc

SEQ ID NO: 45336 - DNA, 201 bp, Homo sapiens
gagtagctgggattacaggcgcctgtcaccacgccaggctaattttgtatttttagtagagatggggtttctccatgttcgtcaggctggtctcgaactcscgacctcaggtgatccacctgcctcggcctcccaaagtgctgggattacgggcgtgagccaccgcacccagcctatatatcacatttttatttatcagtt

SEQ ID NO: 45337 - DNA, 201 bp, Homo sapiens
aacctatgattttcccttcccattatacatttggaatagctgaataatataattatagaatcaccttatcttgaagtcagatgagactttagcattttttrtagaaacttagcaggttagataaaccttgattttgagttatgactcaaattactataactttgtgaattttgagaacatatttatcagctcaaaggctct

SEQ ID NO: 45338 - DNA, 201 bp, Homo sapiens
caaatacctggcccatgatcacaattttggcaactgctaaaaccggaaaaatgtttgtagtcttatgttactttatcttcaaaaaagttagacttgtgtcwtgaagagtgagttggggttaaagtaattgggttaatcagaaatctttacaaatctatttcagcaacatttacttgaaaaagaagaaataataagttggag

SEQ ID NO: 45339 - DNA, 201 bp, Homo sapiens
actcaagtcagcctccctgaaaatttggaggctcagtttttttttttttcttttttgagacagagtctccttctgtcgcccaggctgcagtacagtggcaygatctcggctcactgcaacctctgcctcccaggttcaagtgattctcctgcctatacttcccaagcagctgggactacaggtgcatgccgccacacctga

SEQ ID NO: 45340 - DNA, 201 bp, Homo sapiens
cctggccatgctctctgagggctgttcacagacaatgactgagcacagcaggagttctaaggtacatttgttcctgagactcatggacccctctcattgahccctgtgacttgaggactcccaaatggctttattaaccttctttagaatgtgaattctaggaggctcccacccaaacgtccctcactgtctctgcatcag

SEQ ID NO: 45341 - DNA, 201 bp, Homo sapiens
tggccatgctctctgagggctgttcacagacaatgactgagcacagcaggagttctaaggtacatttgttcctgagactcatggacccctctcattgaccsctgtgacttgaggactcccaaatggctttattaaccttctttagaatgtgaattctaggaggctcccacccaaacgtccctcactgtctctgcatcagac

SEQ ID NO: 45342 - DNA, 201 bp, Homo sapiens
attattttaaattgttattttatttattattctgtctcagcatttatgcccggcttgcaaggatggaaccagggggtggttatgtggaatctgtagatccrtctttttcaatgattaacctatttcaaggatgaatttaaaataaataaatttatttttatctcttatgtgtgtataggactggattccttccaacccccc

SEQ ID NO: 45343 - DNA, 201 bp, Homo sapiens
tggtatagtttactgcatcattgcgtttttgcaaatctgaagtggagaataggatagtaatgactagcatcagaaattgttgctaatttcctaatttgcawaatgtatctctaacaaactggattgtcagtttataggagacaccaaatgttcatataatgaagtttaaaaaaaaattctcagctgaaacatggcctaggt

SEQ ID NO: 45344 - DNA, 201 bp, Homo sapiens
gaagtttctttccatgtatatagtcccataattttcccagaaattattttaaattgttattttatttattattctgtctcagcatttatgcccggcttgcraggatggaaccagggggtggttatgtggaatctgtagatccgtctttttcaatgattaacctatttcaaggatgaatttaaaataaataaatttattttt

SEQ ID NO: 45345 - DNA, 201 bp, Homo sapiens
gaggcttagacctcctcactgctgagaaaggaggactttgcaccttcttagcggaagagtgttgcttttacactaaccagtcagggatagtacaagatgcygcccagcgtttacaggaaaaggcttctgaaatcagacaacacctttcaaactcttataccaacctctggagttgggcaacatggcttctcccttttctag

SEQ ID NO: 45346 - DNA, 201 bp, Homo sapiens
taatgtgatgttttgatatatgtatatattgtgaaatgattgtacaatcaaacatatctatcccctcattttgtgtgtgtgtgtgtgtgtgtgtgtgtgtggtgagaacatttacaatctgttctcttagcaaatttcaagtatacaatatgttattattaactatagtcaccacgctatacattagatctccaaaactta

SEQ ID NO: 45347 - DNA, 201 bp, Homo sapiens
  misc_feature (1)...(201): n = A,T,C or G, or insertion/deletion polymorphism (see Tables 1-2)
ctcagtactaagataggctcatgtgtcagctgctgcctcttgagcagagggtcttatttctagtgcctgaatggaattttacttggaaaagccttgtctantgctatgggcctttctaatccagatgttccccctccaaattcacattcagaagacaagaagaattatgttttgtttatttaatgttggtgtgtgttctga

SEQ ID NO: 45348 - DNA, 201 bp, Homo sapiens
tattctaaggctcaatcttggaatctaatagagacaagggattctttgcaagctcttctatcttaattcttcacatattgccttactttgtgaattctcaygagcagctcaaggagggctttgtcactttctgctggaagaatgcttgatgattcttatcttgtcagatgagtccagaaggtctttgttcctgggaccagt

SEQ ID NO: 45349 - DNA, 201 bp, Homo sapiens
ataatgtgatgttttgatatatgtatatattgtgaaatgattgtacaatcaaacatatctatcccctcattttgtgtgtgtgtgtgtgtgtgtgtgtgtgtggtgagaacatttacaatctgttctcttagcaaatttcaagtatacaatatgttattattaactatagtcaccacgctatacattagatctccaaaactt

SEQ ID NO: 45350 - DNA, 201 bp, Homo sapiens
tataatgtgatgttttgatatatgtatatattgtgaaatgattgtacaatcaaacatatctatcccctcattttgtgtgtgtgtgtgtgtgtgtgtgtgtgtggtgagaacatttacaatctgttctcttagcaaatttcaagtatacaatatgttattattaactatagtcaccacgctatacattagatctccaaaact

SEQ ID NO: 45351 - DNA, 201 bp, Homo sapiens
atataatgtgatgttttgatatatgtatatattgtgaaatgattgtacaatcaaacatatctatcccctcattttgtgtgtgtgtgtgtgtgtgtgtgtgtgtggtgagaacatttacaatctgttctcttagcaaatttcaagtatacaatatgttattattaactatagtcaccacgctatacattagatctccaaaac

SEQ ID NO: 45352 - DNA, 201 bp, Homo sapiens
atgttaggtagaaagtgtgtggcggtcctttgaccctcacgtgaaaccaaggaggttgtggcaatgataattaggaagaaatactcaagtgggaggtgaayctggagaagactagcataggctgcttggtccagttgcgttacccctgtggagtttgtcttagcaagaatattttattgagacatcaggatccatttaaac

SEQ ID NO: 45353 - DNA, 201 bp, Homo sapiens
aaatagagtcatataaaaagaaaacacaaaaactcattgctgctttcaaaaatgaaataacatctctatggacttgaaatagaacataaacataaaatgtyaggcaagaccaaagtcatcaactagtggggcacacttctgcaagcagcctagaaactggctcccttgtggatgtagggaattaaaatatttcatgcaaga

SEQ ID NO: 45354 - DNA, 201 bp, Homo sapiens
ttactcctcactaagaagatctctagcaaagagaaaaaaaaatagttttagactttcctttagggaagggactctttttcttcaggaaaatatgctgcacygtgttgggagatgagactctgatggatgaatatatatatgacaatacttaaaaagtgtgcttagaaaatatgcagtattttgctgcaggagaacacacag

SEQ ID NO: 45355 - DNA, 201 bp, Homo sapiens
cttccagacaatgtggcagagtaagttcacaccatgacaagaatgctgtgtttcaaatatagaaaatagagtcatataaaaagaaaacacaaaaactcatygctgctttcaaaaatgaaataacatctctatggacttgaaatagaacataaacataaaatgtcaggcaagaccaaagtcatcaactagtggggcacactt

SEQ ID NO: 45356 - DNA, 201 bp, Homo sapiens
aaagtgtgcttagaaaatatgcagtattttgctgcaggagaacacacaggaaagatgagaaaaggacagatggggcccatctaagaagacaggatgccaaygactgaaaatggtagccaccatgaagtaaattattctgtatttgctgacatacatatgacaattcaggtgcatattttacattgtttttaattttttatt

SEQ ID NO: 45357 - DNA, 201 bp, Homo sapiens
tatattcaaaatatagttggtcaccatgttttctgtataattttatttctggcttcctgtcaatttggaatgatagatatagccctgaaaagacttccagrcaatgtggcagagtaagttcacaccatgacaagaatgctgtgtttcaaatatagaaaatagagtcatataaaaagaaaacacaaaaactcattgctgctt

SEQ ID NO: 45358 - DNA, 201 bp, Homo sapiens
gtgcaatagcgagatcttggctcactgccacctcagcctcccgggttcaagcgattctcctgcctcagcctccagagtagctgggattacaggcacccacyaccatgcccagctaattttttgtatttttagtagagatggggtttcaccatgctggtcaggctgatctcgaattcctgacctcaagtgatccgcccaccg

SEQ ID NO: 45359 - DNA, 201 bp, Homo sapiens
taaataagaaaattttaaatatatttgttattagacccagcattactataaggatttcacatatcctaatatattcttcacagccaacttctgagatgagyattattttaatgatgaggaattgaagcacttgggtaaagcaattcaaaggaactcaaaagatcaaacaacaaaactaccattcaaatgcaaacggtttgg

SEQ ID NO: 45360 - DNA, 201 bp, Homo sapiens
atagcgagatcttggctcactgccacctcagcctcccgggttcaagcgattctcctgcctcagcctccagagtagctgggattacaggcacccaccaccawgcccagctaattttttgtatttttagtagagatggggtttcaccatgctggtcaggctgatctcgaattcctgacctcaagtgatccgcccaccgcagcc

SEQ ID NO: 45361 - DNA, 201 bp, Homo sapiens
gacataatggctttattattctctaattgttttacatttatacccttaccaactcaaaataaaatttatacatgcaggacatatgtactgagcactttttrtatctcctacagaatctggtaccattttgcactaaggtaaataaataagaaaattttaaatatatttgttattagacccagcattactataaggatttca

SEQ ID NO: 45362 - DNA, 201 bp, Homo sapiens
agccactgcacccagccaaagtgcagtgctttaagactattcaattttgttccttctcaaatgttcacctataaattttaatctccatcaatgaaccttgycaaagaataattactgtggtgtttgcctaacccatgattttctactttgctcacttcttctatatttattagttggagttttaaggaagagctgtccctt

SEQ ID NO: 45363 - DNA, 201 bp, Homo sapiens
tcactaaaaccatgtacagagcctgactagatcattcctgtttcaaattaaaagatgcttataggcaaacttgaacttgcctgggcataaaattaggtttktggctcattaaattatgtgtaactatctcaaaaaatcttgcctatatatgatttccattttgttattaccccaaagaagaaccacagttccctattgaaa

SEQ ID NO: 45364 - DNA, 201 bp, Homo sapiens
aattgttacaatctcagtgaagaacaaaataacaatatgtggcacctgggttatgttgccaggaatccccctctaggtttattgaagaaacttgtgcacayattcataaggaaaacccggtacaagtatgatcattatagagttttttttttccatcaatggggaaatgagcaaatagcagcaaacacagtagttaagaca

SEQ ID NO: 45365 - DNA, 201 bp, Homo sapiens
gaaaatgttaattatataatttatttattcatgtactcatttattaacaaatatttggtgagcacctactaggtgataggactgttttaaagatagaacarccagtagaacagacaaaactctctgcatccttagagctcacattcttttacaattggaagaattgaataaattacatattttaaatgttttgaatagtgt

SEQ ID NO: 45366 - DNA, 201 bp, Homo sapiens
ctacaatcccaaatagactcttcggcagcagtgactctccaaaactgccgaggcttagacctcctcactgctgagaaaggaggactttgcaccttcttagyggaagagtgttgcttttacactaaccagtcagggatagtacaagatgccgcccagcgtttacaggaaaaggcttctgaaatcagacaacacctttcaaac

SEQ ID NO: 45367 - DNA, 201 bp, Homo sapiens
tgtgctgtgaacaagttctacgtgtttttaaaatgcatctaggagttacattgtcctaaaaagtctaactcatagaagcagggagtagaatagtggttacyaaggactgctggtaaagggagaggactggggagatgttggttaaaggatacaaaatttcagttaaatgggaggaataagttcaagagatctattatacaa

SEQ ID NO: 45368 - DNA, 201 bp, Homo sapiens
gagctgaaggggctttaggctggtgagaacagcatcaatcttgctatccaagtgggtctagataggaaatttgaaaacaggaatcatgtatctgattttaygagttgttgttgcaatagacttagggacttagaaagcatcctggggaattttaacaaaccggtaaaaacctttgcttggagaatggctccagagcctgtg

SEQ ID NO: 45369 - DNA, 201 bp, Homo sapiens
aggatattttatagattagatgaaggattacagggaaattttctccttgccacacagcacgttcctacctaccaatgagcccaagacatgttcctgggcawtgtgagagaacaaagatttcagctagagctgaaggggctttaggctggtgagaacagcatcaatcttgctatccaagtgggtctagataggaaatttgaa

SEQ ID NO: 45370 - DNA, 201 bp, Homo sapiens
ggagattgttaatcatttcctgaaaaaatgattttgataaaattaaactgagtatctattatgtgcaagacagtatgctggggaatgaaagaaaatacaawgaagaaaaatacacagaatttgctttgagagaactcacaatctggtgtatatgaatcagatttcaaaagaattgtatttgtcacgtaaacaaaatctttt

SEQ ID NO: 45371 - DNA, 201 bp, Homo sapiens
aaaaatgcagatctttgtgtgctcctgatgtgctttgactttttattgagtagctcagggagctttgtaaatacaaatctctctgactcctgatatgggamtacttggtttcctgtttcatggtactaagtatttttgacatcatggacactttactaccagaagtcttttgaaattattttttgcctcaagaaggggact

SEQ ID NO: 45372 - DNA, 201 bp, Homo sapiens
tgaacaatgagtaaaaggtagtggaagagattacttgcaaaagaactgtggtggtggagatcaaatgaggattggtggaagcgattgacaatggtttttgrattttctgaaaaagagattgaccacttctaaattagaattagcaatgttattcccttattgtggagtgttctgattataatatcacattgacctttagtg

SEQ ID NO: 45373 - DNA, 201 bp, Homo sapiens
atgtacctgatagctacccaaggcctaactacatagtgagatgtagaaaattttaggattcggaaactttgcctttaactgaatggcactgggaggtgggwaaggagaccagccacacaagcaagtgagtcaggagagtgtgtcatgaatattaagcagacactttttagatactagagtactaaaaaatgagaaaaatct

SEQ ID NO: 45374 - DNA, 201 bp, Homo sapiens
gagccaagggaaaggagaaaccccttataaaaccatcagatctcatgagacttattcaccaccatgagagcagtatgggggaaaccacctctatgattcarttatctctcatcaggttcctcccacaatatctgggaattatgggagctacaatttaagatgagtatgggagaggacacagccaaaccatatcagtcatgt

SEQ ID NO: 45375 - DNA, 201 bp, Homo sapiens
aagcattgtgaatgttttcattgttataatttatttataacaatataaaatataaattaaaaataaaattataacaatttatttataattattataaatamatttataatttaataaataaataattccctttccttgagtgacaagggaaatggttgaggtcatacaagtttgccttgagtttatctcacataaacatcg

SEQ ID NO: 45376 - DNA, 201 bp, Homo sapiens
acatgattccttccaactacaggctagactgggaaatgtagtgtttctggtagccacttgcaaaagctacacatctgttactagtaatgaaggaaaaactrgattttatggatagctaaggactttgttaatatgtatgtgcaatattgtcttctttctcatgtaacattatttcataaacaatacgcccttcatttagtg

SEQ ID NO: 45377 - DNA, 201 bp, Homo sapiens
cattatttcataaacaatacgcccttcatttagtgagggatatgatgtaagcgtcctactacttttaattccaaaatttcgtcacattaataaagttttawattaaaaatgtggctttttataccctaaataaatccacaaacatctcctttatcacatttgaattaaaacctttacatttgtgtataaaaccttacacca

SEQ ID NO: 45378 - DNA, 201 bp, Homo sapiens
aatcccatctcttagggaggctgaggcaggtgaatcacgaggtcaggagttcaagaccagcctggccaacatggtgaaaacccgtctctactaaaaatataaaaaattagccaggcatggtggcaggcacctgtagtcccagctactcgggaggctgaggcaggagaattgcttatacctgggaggcagaggttgcagtga

SEQ ID NO: 45379 - DNA, 201 bp, Homo sapiens
gtggcaggcacctgtagtcccagctactcgggaggctgaggcaggagaattgcttatacctgggaggcagaggttgcagtgaaccgagatcatgccattgygctccagcctgggcaacagagcgagactccatctcaaaaaaagaaaaaaaatttcctcattgtattttactatttctggatgtatattatttttattttt

SEQ ID NO: 45380 - DNA, 201 bp, Homo sapiens
ttccctaccacataaaccaaatatactctcagtggatttggaatttatccagaattatgtgtacttcttccattctggttgaagtaaaaatagaaagtgtaaaaaaataaaaatcagtcttggttttgattttgcttaatcattcaacatagatataccttaattattaactacaaaagttaggtatgcatcccctgcatt

SEQ ID NO: 45381 - DNA, 201 bp, Homo sapiens
acgcttagaatgtttcagtaagatattgctcttacagtgcattagataaatgcagtttcattaacaaattctaaaaaaaagacaagtcttaggttaagtckctattacaatgtaataataatgtcaataaatatttccatcttacatttgaacagtaattttgagttccacagtcctttcacatacaatacaggtattcct

SEQ ID NO: 45382 - DNA, 201 bp, Homo sapiens
tcctctttcaaactatagggaaattagcctaatatcaagcatgatttggcctattgccatggcttcaactgtcatcccaatgcaaatgtttaccaaatccttctctctctctctctctctctctctctctgtcctgactgtctaataggtatctggacttgaaacttacctgaaactcaacgtgaatagactcttattaac

SEQ ID NO: 45383 - DNA, 201 bp, Homo sapiens
cctctttcaaactatagggaaattagcctaatatcaagcatgatttggcctattgccatggcttcaactgtcatcccaatgcaaatgtttaccaaatccttctctctctctctctctctctctctctctgtcctgactgtctaataggtatctggacttgaaacttacctgaaactcaacgtgaatagactcttattaacc

SEQ ID NO: 45384 - DNA, 201 bp, Homo sapiens
gattttaaagatcaaaatagatgtgagtggggtgagtgtgattccatcgataaaataataatttagaattcaaattatgaaggcaggatcaactagttgtrgatgagcaacagcaaatggactagtcatgcttaagtaaagttatgacctgggagttagataagccagtgctacaccgagtgcccacagcatgaatatcca

SEQ ID NO: 45385 - DNA, 201 bp, Homo sapiens
ctcatttttcacgagtgaacataagaaacaatgggaatgtgcccttcactgtcagacaagtgggaggatccagcgccctctgtctcatatcactaaaaccrtgtacagagcctgactagatcattcctgtttcaaattaaaagatgcttataggcaaacttgaacttgcctgggcataaaattaggtttgtggctcattaa

SEQ ID NO: 45386 - DNA, 201 bp, Homo sapiens
taagggccactgggagagtttgggatatttccattggtaataatgcaaagtggactttaaattaggtcatgtctctgattctgtatttctcatttttcacragtgaacataagaaacaatgggaatgtgcccttcactgtcagacaagtgggaggatccagcgccctctgtctcatatcactaaaaccatgtacagagcct

SEQ ID NO: 45387 - DNA, 201 bp, Homo sapiens
ggttgttagagggggaaaaatagtgtctttgatattcaaattttatcaaaaatcccacataaacacagtgagtgcattactagtgccctgtcacttttcaragaaaaatgcattttgtttagtcacaagccatgcaaataggaacatgcgtgtgtatagacacatatgcatacatgtatgtatatatacatttatatagat

SEQ ID NO: 45388 - DNA, 201 bp, Homo sapiens
agctcataaggtgaaatatattttatctgcaagaatttggtgtttgttttcacagcagcatttttaaaacaatatttaagggccactgggagagtttgggwtatttccattggtaataatgcaaagtggactttaaattaggtcatgtctctgattctgtatttctcatttttcacgagtgaacataagaaacaatgggaa

SEQ ID NO: 45389 - DNA, 201 bp, Homo sapiens
taggaccatgcttcttctgacagttctaggaaagaattcttccttgaccctccctagcttctggtggcttccggctctgcctccgactttacatggccttmttctctgtttctgtatgtctctctgtttcctctcctctgcttatgagtaaactagtcactggatttaggacccactccaatccagtatgacctcatctag

SEQ ID NO: 45390 - DNA, 201 bp, Homo sapiens
tcttttcctctgagtttggaggccggaagtctgaaattaaggtatctgtaggaccatgcttcttctgacagttctaggaaagaattcttccttgaccctcyctagcttctggtggcttccggctctgcctccgactttacatggccttattctctgtttctgtatgtctctctgtttcctctcctctgcttatgagtaaac

SEQ ID NO: 45391 - DNA, 201 bp, Homo sapiens
tgatttatattactcagtgcaaaaaaacatgctctcatatcttcaaatttccatacacagcttttactcatggctatgtaagaatgttgaaagtaaaaaaatttaagctttcaaaagatttcaaaatctacattcaataaatcttagcagtcatattagtttcctagggctgtagtaacaaagtactacaagcttggtggc

SEQ ID NO: 45392 - DNA, 201 bp, Homo sapiens
aaatgcattttgcatagtttaggaatgcggatcatgtgtaaatttttacattgactttccccatgtgtctggtttgatttatattactcagtgcaaaaaaacatgctctcatatcttcaaatttccatacacagcttttactcatggctatgtaagaatgttgaaagtaaaaaaatttaagctttcaaaagatttcaaaat

SEQ ID NO: 45393 - DNA, 201 bp, Homo sapiens
catttcttcccctatattgttgtttttcttctttatttcttgattaactctttagttagaatagtagctaaatgcattttgcatagtttaggaatgcggaycatgtgtaaatttttacattgactttccccatgtgtctggtttgatttatattactcagtgcaaaaaaacatgctctcatatcttcaaatttccatacac

SEQ ID NO: 45394 - DNA, 201 bp, Homo sapiens
atggttgtcttattatttaagaatagtagtcaaaatacaatggtattaagaaactgatcaagtaaaaaaatcatataggatacactaccacacacaagcayactcctaaatctgaggccacacaacactatgcattggttaacaaaacacatcctagcatgattaaggcatatagaatagcaaagctttttgccctataaa

SEQ ID NO: 45395 - DNA, 201 bp, Homo sapiens
tttcttatatttcacatactctacccagcttgaaaaaaaatggttgtcttattatttaagaatagtagtcaaaatacaatggtattaagaaactgatcaartaaaaaaatcatataggatacactaccacacacaagcatactcctaaatctgaggccacacaacactatgcattggttaacaaaacacatcctagcatga

SEQ ID NO: 45396 - DNA, 201 bp, Homo sapiens
aacaggtttttttctttttgagagaaaaaaactcaaagcaggttatcagattccgcaaatattccatgtagatctgattgctatactttgactttttttawagtggatatggaaaagacttacgtaaagttaaggaatataatgagttggaagaattcacacatgaagaccatcccttttaaaagataaagcctgagaggg

SEQ ID NO: 45397 - DNA, 201 bp, Homo sapiens
acaagtcagattcctttggtataaatacaatgttggcttaagagaaaataattgaagccacacctatacaatgatgagatttgaacaggggataacaatarggaggcacctgagcatccctgtagattctccattgaaatcaccaaattgatgcagacaaatgggctaaaatagttgattattattaacaggtttttttct

SEQ ID NO: 45398 - DNA, 201 bp, Homo sapiens
caaagtgacatctgtagtctcagcaacttaaagtttgcttgcaatgattagttttcctttcccaaccctctgaaataaggtcttctcaagctttaggatgygttcaacattaagtcttcagttaagacatcttgcctatattggaagagaagggattttataggttaataggctgcatggtataaggtgggaaagggtaat

SEQ ID NO: 45399 - DNA, 201 bp, Homo sapiens
aataaataattcaccacactctatctacttccttctgctaaggtaattagcaatatgtgcaagagagtagctgttcaatcagtgtgggctccagaattagragaaatcaagtatattctccagacaacccaaaatggacaactagagagagcaagaaaaacaaaacaaaaagctctgttgttataagtcactgcaatttaa

SEQ ID NO: 45400 - DNA, 201 bp, Homo sapiens
ctcctcttggttgaggtgatgagtggtcgtgtgacgtgttttgttaatgaaatgtgaaagtgacatttgtgactcctggctagaagatttaagagccaatwaataattcaccacactctatctacttccttctgctaaggtaattagcaatatgtgcaagagagtagctgttcaatcagtgtgggctccagaattaggaga

SEQ ID NO: 45401 - DNA, 201 bp, Homo sapiens
cagacttatgccacccaagatgatctcttagaagtccccttagctaatcctgaccttaacctatataccgatgaaagttcatttgtggagaatgggatacraagggcaggttatgccatagtaacagtacttgaaactaagcctcttcccccagggaccagcacccagttagcagaactagtggcacttacccaagcctta

SEQ ID NO: 45402 - DNA, 201 bp, Homo sapiens
actacgctgactagaaccccttttcaagtcatttgagaaatcatgaaaatttccacaccctgaacttggactaagacagtcatgtgttaataatgcccagracaccatgaaaatcccttaaatggaattatcatcccagatctgaaattatttctacaattgttatttaactaatatccaacatataatcagagagccaag

SEQ ID NO: 45403 - DNA, 201 bp, Homo sapiens
cagtgccatgaggtaggttactgttttacagataagaaaaccaagactcaaaaagttataaaattcgctcacgtttctatctccaaattcaaaacctgaayaatctgactacaaaacccaaaatcttcctgctgtgttttgcttagaagatggaacacaaggagtttttattatgaccagcttaataaaaagtagaaatat

SEQ ID NO: 45404 - DNA, 201 bp, Homo sapiens
ctctttcaaactatagggaaattagcctaatatcaagcatgatttggcctattgccatggcttcaactgtcatcccaatgcaaatgtttaccaaatccttctctctctctctctctctctctctctctgtcctgactgtctaataggtatctggacttgaaacttacctgaaactcaacgtgaatagactcttattaaccc

SEQ ID NO: 45405 - DNA, 201 bp, Homo sapiens
tctttcaaactatagggaaattagcctaatatcaagcatgatttggcctattgccatggcttcaactgtcatcccaatgcaaatgtttaccaaatccttctctctctctctctctctctctctctctgtcctgactgtctaataggtatctggacttgaaacttacctgaaactcaacgtgaatagactcttattaaccca

SEQ ID NO: 45406 - DNA, 201 bp, Homo sapiens
agtgctgctgtctttgtaacagcgattgagtgtgggaactcacactattttcagtagggcttctcctcaccccctccttcttctctctctacccacagtgyttcctgagacactctcattggaacagagttgaaaaccactgttaaaacaacttctcagacaaattaattatgaccggatgataaaactctatttccaaca

SEQ ID NO: 45407 - DNA, 201 bp, Homo sapiens
tcagtagggcttctcctcaccccctccttcttctctctctacccacagtgcttcctgagacactctcattggaacagagttgaaaaccactgttaaaacawcttctcagacaaattaattatgaccggatgataaaactctatttccaacatgctgcaaggaaataggctttagaaaaagtaaatttaaatatgtcctctt

SEQ ID NO: 45408 - DNA, 201 bp, Homo sapiens
cttgaggccagtctaatctcctagaagaggtcataatctcatgaaagtctattagaaaggtgcttgatttttttcttgtcaagaatgctgatgaccgggcwcggtggctaacgcctgtaatttcaacactttgggaggcagaggtgggcagatcacgaggtcaggagttcaagaccagcctggccaatatgttgaaacccc

SEQ ID NO: 45409 - DNA, 201 bp, Homo sapiens
tgtaatttcaacactttgggaggcagaggtgggcagatcacgaggtcaggagttcaagaccagcctggccaatatgttgaaaccccgtctctactaaaaayacaaaaaattagccgggcgtggtggcaggcgcctgtaatcccagctactcgggaggctgacgcaggagaattgtttgaaccctggaggcggaggttgcag

SEQ ID NO: 45410 - DNA, 201 bp, Homo sapiens
gttaaaaattttaaacatattcattcattcatttattgctatttgcatttggtgttaggtttcctctccccaactccctacccttgttgattgaattttattttttttattgtagaatcttaaaaagtttacagaagtcaaaaatgtacaaaaactactctgagacaaatctatcttctcatatcccttctaccttactct

SEQ ID NO: 45411 - DNA, 201 bp, Homo sapiens
tttggagcttttcagttgttaacaaaaccaaaatcacatttaaatgcaagctggacatgtttcattgtacctactctttgcttgattttacatattaattmattcattcattcattcatttaatcacttaattcattcgatcatttatttactgcatgccaacctatgcacttaggatataaacaaagaaaagcttcaagg

SEQ ID NO: 45412 - DNA, 201 bp, Homo sapiens
attccttttcactaattttttttattatagagaaaacatcttactaaaaggaagtttacaatatttttattatttctataaggcagaattactacttttarctaaattttcttctgtttagcaactcaattgctttctttctttaaatatctttgtgtttacaattccaactgttttacacaccaattcctttttgtaatg

SEQ ID NO: 45413 - DNA, 201 bp, Homo sapiens
cagaaggcaaaggggaagctggcatatcacatggcgtgtgtgtgtgtgtgtgtgtgtgtatgtgagagaaagagagagagaggtgggtggggatgccacacacttaaacagccagatctcatgagaactcactatcatgagtagagcaccacgcggatggtgctaaaccattcaggagaaaccatccccctgatccaacca

SEQ ID NO: 45414 - DNA, 201 bp, Homo sapiens
tgctcggcttctgataaggccatgggaagattacaatcatgacagaaggcaaaggggaagctggcatatcacatggcgtgtgtgtgtgtgtgtgtgtgtgtatgtgagagaaagagagagagaggtgggtggggatgccacacacttaaacagccagatctcatgagaactcactatcatgagtagagcaccacgcggatg

SEQ ID NO: 45415 - DNA, 201 bp, Homo sapiens
ctgctcggcttctgataaggccatgggaagattacaatcatgacagaaggcaaaggggaagctggcatatcacatggcgtgtgtgtgtgtgtgtgtgtgtgtatgtgagagaaagagagagagaggtgggtggggatgccacacacttaaacagccagatctcatgagaactcactatcatgagtagagcaccacgcggat

SEQ ID NO: 45416 - DNA, 201 bp, Homo sapiens
ttgttgtctttgattcagatttcaactgcccagttgatcaagcatggggtgatggtcaagcacggagtgagacttgagcagtcagtaaatgtatctattgyactcattaattggtgtattagtacgttcttgcactgctataaaaaataacggagactgggtaatttataaagaaaagaggtttaactggctcatagttct

SEQ ID NO: 45417 - DNA, 201 bp, Homo sapiens
gccacagtatattctgcaagattaatacattttaacattcttcatgcatctccccagtgtttagcttatattatgtcactgcaaaggagatgataccattyaaatattgctatcagttcatgaataacaatatttatccttttgagaatattcaaatttttgttcctgtacctattgccttttgaaagactagttcttggc

SEQ ID NO: 45418 - DNA, 201 bp, Homo sapiens
ttggtaaattgaaatgatcaatttcactattgagtatatgtgttagaaaatatgccacagtatattctgcaagattaatacattttaacattcttcatgcrtctccccagtgtttagcttatattatgtcactgcaaaggagatgataccatttaaatattgctatcagttcatgaataacaatatttatccttttgagaa

SEQ ID NO: 45419 - DNA, 201 bp, Homo sapiens
atttctagctcatgaaccatacaaaaacaggtggcaggccagatttggccatatggtcagccagacatggtcaaacataattggctgacctctgtcttaawctctaactatagctctcaaagctgctttttattttcttaagagaattatgactagtggtgaatttttgaaatgttacaagggatgaggagttaaattaac

SEQ ID NO: 45420 - DNA, 201 bp, Homo sapiens
aactttatttatggacaataaaatttgcgttgcatacagtgctcctgtatcataaaatagtatatttttaagttttattcaactctttaaaaatgtgaaaaccatttctagctcatgaaccatacaaaaacaggtggcaggccagatttggccatatggtcagccagacatggtcaaacataattggctgacctctgtctt

SEQ ID NO: 45421 - DNA, 201 bp, Homo sapiens
ctgcatggcatgaaaccagccatagacaatagataaatgaaagagcatggccatggttcaataaaactttatttatggacaataaaatttgcgttgcatayagtgctcctgtatcataaaatagtatatttttaagttttattcaactctttaaaaatgtgaaaaccatttctagctcatgaaccatacaaaaacaggtgg

SEQ ID NO: 45422 - DNA, 201 bp, Homo sapiens
cttaattaatttgtatttccttctcagaaattatagataagaactttctttttctctaacgggccagataataaatattttagcctttgtgagccatacaytctctgctgcaagtactgcatggcatgaaaccagccatagacaatagataaatgaaagagcatggccatggttcaataaaactttatttatggacaataa

SEQ ID NO: 45423 - DNA, 201 bp, Homo sapiens
aaaattgcttttgcgtttgattttgaattgtttgaatacttcagacgtgattatttcaattatgtaagctaagctgcatttcaatctgggcacagacttaycatcaaaatgttcctgttgagaagaaccagtttctcttctttaaatttcaagcagttttatatttattgtcatgatctaggacactagtgataatcatcc

SEQ ID NO: 45424 - DNA, 201 bp, Homo sapiens
ctggtgaatataatttttaagtatgaatagaattcaatttttaagcctctggacttaactgttagtaagtctgtaagatggatatagaagtgctgagaatrtatgagtggagcatcagtagtattaatatctgataggcctgaatgtcactggctatactgagcagtccataagtcatttgtggaccttgtaaagaaaagg

SEQ ID NO: 45425 - DNA, 201 bp, Homo sapiens
aagtgttcttctttagaaaacagttttctttattaataagcatccttttgtgtttgtgcacaggcagcatgtcagctgaaacaccaatcacattgaatatygatcctcaggatctgcaggtccaaacattcaccgtggagaagctactggagcctctcataatccaggtattaataccatggaaattatgatatatagtaa

SEQ ID NO: 45426 - DNA, 201 bp, Homo sapiens
cagtagtattaatatctgataggcctgaatgtcactggctatactgagcagtccataagtcatttgtggaccttgtaaagaaaagggccaataaatattayggagtctggcagggcagcaggatgctgtggaagagcttgtaagacaaagtctaaaggtgtcaagacaaagaatctagtacactgaggcttgggaaaacct

SEQ ID NO: 45427 - DNA, 201 bp, Homo sapiens
cttacttagcctcaatttcatcctttgtaagatagacatggtattaaacctacttcaaaagattattatgcttacatgagttaatagaaatgaaatgcttaataaacaataggctataataagaagatagctactactactattattaccacatagagttagtacttactagacctactgaagctacttaatatttttgta

SEQ ID NO: 45428 - DNA, 201 bp, Homo sapiens
gcaaagacattcctggctaaacttcggatccggttatatcccaggtccaaaagttccaggttgcggcagtcttggaatattcgcacagggatggttctcarggagttagaccgtaaatgtaaactcagcagcttccgcaagccccgaaactgttcagatcccagagaatgcagctgattataggacagatccaagttccgt

SEQ ID NO: 45429 - DNA, 201 bp, Homo sapiens
aggcccatgcttctggcatctgtccacttactgtgctctctaactgtgatgctctcttccaagactctgcacaggaggcctcttcaggtcagcttcatccwtgccttatccaacaccctacacagatcctatatagagccacatctaaaaatagcatctcccaccgcagctactcttcatcttcttgctcaattttatgct

SEQ ID NO: 45430 - DNA, 201 bp, Homo sapiens
ggctgaggcaggaggatggcttgaccctggggggtcgaggctacagtttctgccactgcactgcagcctgggtgacaaagtgagaccctgccccccccccmaaaaaatgttatagtgttctgcattaaataaagtggttgatttggtttccaaattggacatttgttcaaaatgtaatcattagaccccaaggaattaagg

SEQ ID NO: 45431 - DNA, 201 bp, Homo sapiens
ttcttcatttcacctagttcaggtgacaagattactctttaaagatgatggcaattgtagaacagcccggatgagactttcttagtgtatgtattagtggytgggttatgggaaaaaaagatcctaaggatagagtttgtggaatgtgccggagtgtattttatgcacattatcctctattatcagtcccttggtgttata

SEQ ID NO: 45432 - DNA, 201 bp, Homo sapiens
gcacattatcctctattatcagtcccttggtgttataagctctaaaaagtcacaaaattatctataaatttaatgattaaagtgtgttttatactgtcttrtattgcaatgtttggaacagaaatcagaaatttaattaaagtcataaaatatagaaagatcccataacaaaaattatttgtaaccttaaaaatggctgta

SEQ ID NO: 45433 - DNA, 201 bp, Homo sapiens
gttttatactgtcttatattgcaatgtttggaacagaaatcagaaatttaattaaagtcataaaatatagaaagatcccataacaaaaattatttgtaacyttaaaaatggctgtaaaatacattttaacaattccatagtggtctgtttactaaaaaatataaaattaaaataaaaccagggatttttatatatcttctt

SEQ ID NO: 45434 - DNA, 201 bp, Homo sapiens
tcatgtagtcttttaacttcagatttgcatttgtaaaatggggataacaaagatacctacgtaaggatggttcatcagagtttaaaagggttaatgtatgyaagccatttagtaaaatttctagggcattgtaactgcttagtgagtattagtttttgtagtagttagaataacaaatactacttgctgtaatacaacccc

SEQ ID NO: 45435 - DNA, 201 bp, Homo sapiens
ttagtttttgtagtagttagaataacaaatactacttgctgtaatacaacccccagatctcagtagcttattgcaatgatggtttatttatcaaccttacrttggtctgatgccagcctgttttcctgaataggtctctacaaggtagtgactcaatgattcagtatctttcaatcttgtgattttgccatctgtataagc

SEQ ID NO: 45436 - DNA, 201 bp, Homo sapiens
ctgacacgcccacaggttgctagctgcagtggccttgtactagtatgctgctatgctactgtggagaaaattgccattttgactgtgatcaaaacacaatycttttggctatcaaacatccagcaataaatttccattaaaatccaagctctgtaaagccttcttcaggggaaataaacacaaacccccaaaaaggtatct

SEQ ID NO: 45437 - DNA, 201 bp, Homo sapiens
agcttaattaatttgtatttccttctcagaaattatagataagaactttctttttctctaacgggccagataataaatattttagcctttgtgagccatayattctctgctgcaagtactgcatggcatgaaaccagccatagacaatagataaatgaaagagcatggccatggttcaataaaactttatttatggacaat

SEQ ID NO: 45438 - DNA, 201 bp, Homo sapiens
tcccaattcattagcaatattgtaattaaaagagcacctccagttctagagggtaatgacctttttaattgaacttggggattcagattgctgttgaatartagtgaatttaaatgctcaattcaaatgccaaattttcttctggtaaatgtacaattaggaatcaaatatgaattcccctagcaatttgctcctgttttt

SEQ ID NO: 45439 - DNA, 201 bp, Homo sapiens
agagttatctggaattaatttttcattttgcaaagcttaattaatttgtatttccttctcagaaattatagataagaactttctttttctctaacgggccrgataataaatattttagcctttgtgagccatacattctctgctgcaagtactgcatggcatgaaaccagccatagacaatagataaatgaaagagcatgg

SEQ ID NO: 45440 - DNA, 201 bp, Homo sapiens
ctctgcttttcacgtttatgcaaaacaattgcacattcagtgcattcaggatgcacttagcagatctacaacttgtaatcattaagggaacactaatgcaygtagcatacttagtagaaattatgtacttttctcaatatctagaagaaacaatgctcagatagcctctaatagcaaagcagagagaaaaataaaatgatt

SEQ ID NO: 45441 - DNA, 201 bp, Homo sapiens
atggttaaatagcggctttttatttagaatctctgcttttcacgtttatgcaaaacaattgcacattcagtgcattcaggatgcacttagcagatctacarcttgtaatcattaagggaacactaatgcacgtagcatacttagtagaaattatgtacttttctcaatatctagaagaaacaatgctcagatagcctctaa

SEQ ID NO: 45442 - DNA, 201 bp, Homo sapiens
aaatgagggcatttctctgttcctggtcatttactttagcaactggaaagagagtagaaaagtgcatttacatgcgatggtgtgggatgatagcataatcrcaaatggttaaatagcggctttttatttagaatctctgcttttcacgtttatgcaaaacaattgcacattcagtgcattcaggatgcacttagcagatct

SEQ ID NO: 45443 - DNA, 201 bp, Homo sapiens
gtacaagaaaaatacagggctggtcttacaggtatcagtgtcacacattatttctgcttaccttctcctgaaattagccacatgattccttccaactacargctagactgggaaatgtagtgtttctggtagccacttgcaaaagctacacatctgttactagtaatgaaggaaaaactggattttatggatagctaagga

SEQ ID NO: 45444 - DNA, 201 bp, Homo sapiens
gtttgattttatatgcaagccaaggaagtaagtgaccaataaataagaaatgagggcatttctctgttcctggtcatttactttagcaactggaaagagartagaaaagtgcatttacatgcgatggtgtgggatgatagcataatcacaaatggttaaatagcggctttttatttagaatctctgcttttcacgtttatg

SEQ ID NO: 45445 - DNA, 201 bp, Homo sapiens
cagatttagagttgaaaggaatcctgaaagtaatctaattttaattctgaagcttgactttcctcttttgtattcttccaagtggttatttagcctttgcmtaaacaatttctagcataggaaaattattgtctcccataacactcaattccatctttgaacatctttgacatatgactgttagaattagttcttgttaca

SEQ ID NO: 45446 - DNA, 201 bp, Homo sapiens
catatttgccaaaggaatagtatgcagtgaatgaagaaagcataaacaatttgattaagatcacctaacaaatctgtacctgggacaggaaaagaactcarttgcacatgtaatgtgagatattcttcaaaacatgcctatttttggaaatatctcaattttgtgtgaaataatttgatccctaaatgtgtcaacttttta

SEQ ID NO: 45447 - DNA, 201 bp, Homo sapiens
cttccagaccgcactatcttcgtgttctcatgctatgtctctagatttaactataacttgctccactttacacatccaagcctatggacaaaaaaaaaaaatgacattttcttctttacccacacacatctaccacattcttacctgtcatttgcatacctgtcagtttgtgaaatgcccttgtcagtcaatttaatttac

SEQ ID NO: 45448 - DNA, 201 bp, Homo sapiens
aaaatgtgcatatatatattttttatctttacaaggaccttgcaagttatgtaatatttctagacattagaagagacttagaggttaagtaaagtactctrgtatactcagccagtatccagggccataattctaacttatatctgtctgagtccaatgcttccttccagaccgcactatcttcgtgttctcatgctatgt

SEQ ID NO: 45449 - DNA, 201 bp, Homo sapiens
gacattgtgttataaaatgtgcatatatatattttttatctttacaaggaccttgcaagttatgtaatatttctagacattagaagagacttagaggttawgtaaagtactctggtatactcagccagtatccagggccataattctaacttatatctgtctgagtccaatgcttccttccagaccgcactatcttcgtgt

SEQ ID NO: 45450 - DNA, 201 bp, Homo sapiens
tgggagagagagtagataattgaataggaagtttggtggccagacctcaatgcaatgtactttcctctacatctcattggacaaaatccatcaaaaggacytgaataaactgcaaaggagctggtgaatgccctcttcctctgtgcctaagaagaaataggactgatgaacacataaacattccttgtcacactctttgtt

SEQ ID NO: 45451 - DNA, 201 bp, Homo sapiens
gagtagagatgaggtttcaccatgttgaccaggctggtctcgaactcctgacctcaggtcatctgcctgcctcagcctcccaaaatgctgggattataggygtgagccaccgcacctggctgcaaaagtcattttaaatttcttaaagtttaggctccaatatgagcaaaaaaatactaagattatggaataaaagtcttg

SEQ ID NO: 45452 - DNA, 201 bp, Homo sapiens
gtcttggttacaagcaagttaaaagcctcccggattcaaaggagaggagacacgaaccccatctttcaatggaaagagtgtaaaggtcaaaaggagcatgygagatgaggaataatattgtatccatctttagaaaatacaaagtgacccacttctgtcatcgtgctcttattatcatagtcatcatcatcattattatca

SEQ ID NO: 45453 - DNA, 201 bp, Homo sapiens
agcagctgctgcatccttagaaatactttacactttaactgaaaaatctgttgctttcattaatgtgttgagatattcaattaatatttcagactgaggtrtaatattatttcatggcttttatattatgttcaacttcatagtacatatttatttccttttggaaaaaaatgaggatttttgcaactgtttcatattatt

SEQ ID NO: 45454 - DNA, 201 bp, Homo sapiens
gaaaggggatagtgagtggataagttgtatttttccttttctctctgttgtcatgaagggaatgaggatcatgaaaaacttgttcatggggagaagaaacrattccattaagaggccccatgtaaatggaagttgctgttgcaggccgatattgggattgcatagtcatctgtaggtggaatcgtaacctggatgatataa

SEQ ID NO: 45455 - DNA, 201 bp, Homo sapiens
tcagtcatctagaggatgaatttcagaggcttgattataatccaggaatagagttagaagagcttgtccttggcattgccctcgtccccattctgcaggaytcccttgttaggtagattgataaggctgtagctgtgacagcccagaaggaagaggtgccccacctcatgagggagagagggtcactcgctcttccgatga

SEQ ID NO: 45456 - DNA, 201 bp, Homo sapiens
tcttcaaagaagaaatttctgccttttggcttgagagataaattttggctgtcagtattttttgagccaagataaaggagggaaattggagtggggtggcrttgactatttataaaccaaatattagcctcatttttgctatgactagtgttgctgagtctggagcctgtgtctgtaatcctaaattgagtcttcctttac

SEQ ID NO: 45457 - DNA, 201 bp, Homo sapiens
agggatgagccctgggtttattagttaatgaaaaagaatgtgccagtgctgtcgccatgtaattagttggcgacggcattttttctcctccaatttacgctttttttttttgagacaatgtctcactcttgttgcccaggctggaatgctatggcacaatttcagctcactacaacctctgcctcccgggttcaagcaatt

SEQ ID NO: 45458 - DNA, 201 bp, Homo sapiens
attaagcattctctaagccatttacttttcaaataatttttttaaaaaaatcaaagaaatattgtgcactaaagaaaaatctaataatatgtaaggatatrttttttaaaaatgtcctctcccactcacaccttccctgtccctgtctaaattccaagatatgactactttagctacttttatgtttagctgttctcttag

SEQ ID NO: 45459 - DNA, 201 bp, Homo sapiens
ggagcaagagtcagctaaaagaaaaaaagaaaaagaaaacaaaacatacgttgtcaagctaaaaggctgtatctgatactttgtttaaccatcatagaaayatttgggcaatgtaaataatatatatatcattgtcttttttactctcatcaacactgccttcttttcaaagttgcccttaatatatattaaaacttgaca

SEQ ID NO: 45460 - DNA, 201 bp, Homo sapiens
tgggcagtcttatttctggactctctattctattaagttggtctaaatatctgttttgtaccattaccatgctgttttggtttctgtagccccatagtatmgtttgaagttgggtagtctatgcctccagctttgctctttttgcttaggatttcctgggctattctttggtttcatatgaatttcaaaatagttttttct

SEQ ID NO: 45461 - DNA, 201 bp, Homo sapiens
gataaaatgactaaaattccatcctaacaaagcaaaatcaccaaacgtctaagaaaaatcagaaagtaaaagaatatgagaggcattgtcaagtatcagatttttttttttaatttcaaaggtataatcttaatcatttggtattgcttcatgaatacaaagactgatcagtgtaagaaaagagatgtccatggaagagac

SEQ ID NO: 45462 - DNA, 201 bp, Homo sapiens
cattcatgtgctcattcattcatgcatgcatttaaaaaatatttcatgatcatgtattatacacaggattatggtcttcacgtaaaaaacaaaatctgaayttggactcaatttctgtccttgaggacttacagaaattagaggaataataaatgtaataaataagaatccaggttgggtgcagtggctcaggcctctatt

SEQ ID NO: 45463 - DNA, 201 bp, Homo sapiens
ataaaatgactaaaattccatcctaacaaagcaaaatcaccaaacgtctaagaaaaatcagaaagtaaaagaatatgagaggcattgtcaagtatcagatttttttttttaatttcaaaggtataatcttaatcatttggtattgcttcatgaatacaaagactgatcagtgtaagaaaagagatgtccatggaagagaca

SEQ ID NO: 45464 - DNA, 201 bp, Homo sapiens
ttcaataagaagaattgtctttacttacatatgaaacaaatctgtcttcccaacaggctactgggctactggttttcaaacatacagtggatgagttcacrgcatgagttaaacatcagttactctatgtttaaagttcttcctggcaacaactcttgaaatatttgaagtcagccctcatgtattccatatgctccctct

SEQ ID NO: 45465 - DNA, 201 bp, Homo sapiens
cctcattagcatttgttattgcttgtcttttagataaaagccattttaactggggtgagatgttatctcattatagttttgatttgcagttctctgatgaytgatgatgttcagcaccttttcatattcctgtttgccattgacatttgtatgtcttcttttgagaaatgtttattcagatcttttgcccactttttgatc

SEQ ID NO: 45466 - DNA, 201 bp, Homo sapiens
gagatattggctttacattttgaattatatcatacttattctttctaatttcctgttttatcctttgaaaggaacccatgaaattctttggccactctgayttttgtgtcctgaaatttccatgtcattgcaatgaaaaagaatcaaagtatggctgcactaaaaggagagtatttctaaaatataaagcactttgcaaaa

SEQ ID NO: 45467 - DNA, 201 bp, Homo sapiens
gcaactttcttgaaaatgagttcactatagttttatggatttgtttctgggttctctattatgttccattggtctatgtgtctgttttaatgccagcaccwtgctattttggttactatagctttgtagtgttaatataatttgaaatcagataatgtgagtcctccagttttctttgttgattttctgcctggaagatct

SEQ ID NO: 45468 - DNA, 201 bp, Homo sapiens
gtatggctgcactaaaaggagagtatttctaaaatataaagcactttgcaaaagcactcaacatacattatgtcgagctcttataactacattataatgtsggtattaacatacatattttactcattacaatttagtaatttgttcaagaccataaagaaagaagtttagaggagatgaatccacccataccgcttttgt

SEQ ID NO: 45469 - DNA, 201 bp, Homo sapiens
acttagtgatatctctagtattaggccaacttccaagggtcttatgcaacacttgtgctaaaagtgagaggggtgaaaatcattgtgttacaatatctgaracaaatatgcctgtgatttgtgaaacaagtgaggtttcctttccatatccaagtttggaccattgcttcatgcatccaaaaccagatagatcaacattac

SEQ ID NO: 45470 - DNA, 201 bp, Homo sapiens
aggtagaggctgcagtgagccaagaacgcgccactgcactccagcctgggtgacagagcaggactctgtctcaaataataataataataataataataataaataagatcaatcaatcaacaaggaatatttaacagcaataactataaagtctacattcaaactaaatgcatcttttatgggtctctcttggcacttggt

SEQ ID NO: 45471 - DNA, 201 bp, Homo sapiens
tctctacaaacaaggcaaagatcacctaaagcatattagtgctagatctcttaatatttctttctccagatttttagatcttaagatagaaaatagcctayagttggcccttagtatctatgggttccatatccatgtatttaaccaactacagatgaaaaatgtggttaggtctatagtagttgtgtgtgtactgaacat

SEQ ID NO: 45472 - DNA, 201 bp, Homo sapiens
cgaatgtatctgtttagaaaattgaagatataaaatttcataaaagaatataattaagaggtatcctattttatttccaaatgtaaaatatgatatttacmtggctattgttagttattacatgaggaaagaaactgccacatttgagtatgagagacgatcttatagagcagtttctttcaatgaagaacccaatgcttg

SEQ ID NO: 45473 - DNA, 201 bp, Homo sapiens
tacagcactatctaaaacttttagcctgttattcaatataatattgacacaataatagctattatttattagacatctataatgtgccagacattgtgttwtaaaatgtgcatatatatattttttatctttacaaggaccttgcaagttatgtaatatttctagacattagaagagacttagaggttaagtaaagtactc

SEQ ID NO: 45474 - DNA, 201 bp, Homo sapiens
ccctatacaatgcagagtacaataacaactattttgcatagcacatacattgagttataaattataagtaatctaggtatgatttaaagtaaataggaggrtgtgcataggttttgtgcatatactacatcattttatatcagagacttcagcatccatgaattttggtgtccatgggggtcctggaaccagtccccactt

SEQ ID NO: 45475 - DNA, 201 bp, Homo sapiens
gtccctttaatttattaagcatgttgcaactttggaagaagctctaaacatatttccatttcagtaccaggttttcttgctatccaattataaattattawcgtggatggagtagaagacttccattgatggcatggattcaatttgctaaataaagctgtgtggacataatcattctctatccatttaaaaatcaaaggg

SEQ ID NO: 45476 - DNA, 201 bp, Homo sapiens
gaggtagaggctgcagtgagccaagaacgcgccactgcactccagcctgggtgacagagcaggactctgtctcaaataataataataataataataataataaataagatcaatcaatcaacaaggaatatttaacagcaataactataaagtctacattcaaactaaatgcatcttttatgggtctctcttggcacttgg

SEQ ID NO: 45477 - DNA, 201 bp, Homo sapiens
tagtgtcaacacatacatatatacacaaattattcaatgaagcttttaaatttcgagatgatatccccttatcacttagcacatttcttctcactgtcaaytggtgtgtgctaagggaatgcaaattaactgtattattaatttaagtaagacataattagtaaggtaaatcttctgccaaaaaccacataacacattcca

SEQ ID NO: 45478 - DNA, 201 bp, Homo sapiens
ggaggtagaggctgcagtgagccaagaacgcgccactgcactccagcctgggtgacagagcaggactctgtctcaaataataataataataataataataataaataagatcaatcaatcaacaaggaatatttaacagcaataactataaagtctacattcaaactaaatgcatcttttatgggtctctcttggcacttg

SEQ ID NO: 45479 - DNA, 201 bp, Homo sapiens
aagggaatgcaaattaactgtattattaatttaagtaagacataattagtaaggtaaatcttctgccaaaaaccacataacacattccagggccaaatatraatgagctatgattagcctgctgttcctctttattagttcagattaatggcgtattccctgtgggcataaagatgcacaaccatgtgttttctaagggtc

SEQ ID NO: 45480 - DNA, 201 bp, Homo sapiens
agtttccaaatagttcctagtttcagaaactgctaaccttgtggtactttccatagtgagtgtgataacttcttacagcactatctaaaacttttagcctrttattcaatataatattgacacaataatagctattatttattagacatctataatgtgccagacattgtgttataaaatgtgcatatatatattttttat

SEQ ID NO: 45481 - DNA, 201 bp, Homo sapiens
cccttcatgcaagtacttcatcgtttcttctcctgcttggtaccattatccagactgtgaatagcattgttgtcagagagcactttcagaaacattcttgrctagaggaaacacagggagtagcaatccattaatgaagcagatttacatcgattaattacattccacttcctctgttcaggcctgtagcacagctccagg

SEQ ID NO: 45482 - DNA, 201 bp, Homo sapiens
agtcagtgatattattcaccattcaataaacattgatttggccttgattgtgttgggtcctgtttggtgctaaatgggtctttggacaaacaggagactakgacagagaaaggccatctagaaaagtgacattcactagtgtagcagagtgaaaataactcaagttatgatcataaaatatattttgctggacttattaca

SEQ ID NO: 45483 - DNA, 201 bp, Homo sapiens
atccagactgtgaatagcattgttgtcagagagcactttcagaaacattcttgactagaggaaacacagggagtagcaatccattaatgaagcagatttayatcgattaattacattccacttcctctgttcaggcctgtagcacagctccaggaggggaaaaaatatgatgaaagaaagagaaaagctctcaaattaaat

SEQ ID NO: 45484 - DNA, 201 bp, Homo sapiens
catggtacctatcttatattgtttttcatcttgtcactttgatctaatggggaatggtaataatatgagtcagtgatattattcaccattcaataaacatkgatttggccttgattgtgttgggtcctgtttggtgctaaatgggtctttggacaaacaggagactatgacagagaaaggccatctagaaaagtgacattc

SEQ ID NO: 45485 - DNA, 201 bp, Homo sapiens
acctgcatgtgtaccactgaactcaaaataaaagttaaaaaaatgaaaacaggtggttgaccactactttgatattattgataatattattgataaggctraagacatgtgttactagtcttgcacttacccttgcatgtgttggttcatgatgttaatttttaggcatagctgattacttactataacccttaagaacat

SEQ ID NO: 45486 - DNA, 201 bp, Homo sapiens
gggtgtactctagggtggagggtgaggatttagaacctacctatctggtactatgcttattatctgggtgacaaaatgatctgtacaccaaacccctgaarcatgcaatttattcacataacaaacctgcatgtgtaccactgaactcaaaataaaagttaaaaaaatgaaaacaggtggttgaccactactttgatatta

SEQ ID NO: 45487 - DNA, 201 bp, Homo sapiens
gacaccagggtgtactctagggtggagggtgaggatttagaacctacctatctggtactatgcttattatctgggtgacaaaatgatctgtacaccaaacycctgaagcatgcaatttattcacataacaaacctgcatgtgtaccactgaactcaaaataaaagttaaaaaaatgaaaacaggtggttgaccactacttt

SEQ ID NO: 45488 - DNA, 201 bp, Homo sapiens
acttgtgttgtgaggatttagagtgagagttgaacagagacctcagtgaaatgaaagagtgtgctcttgctggggaaggaaattccacaggagagggttayatgcaaaagctcaacatagaaactgacccagaaggtcagtgttgctggacacaatgagtgaggggggaaatggtagtaaactaagtcagaggggtctcca

SEQ ID NO: 45489 - DNA, 201 bp, Homo sapiens
tgataaagaatgctatagacataaaacacaatgagaaagaagattctgccaagcctgacatttatttcttcagttagtaaaaatatctattgcatgcctaytgtgtgctaggtcagattccagtcttgagattagaatccctgccatttaggatttacagtgagagaaacagtcaatcaacaggtaaataaaaaataatat

SEQ ID NO: 45490 - DNA, 201 bp, Homo sapiens
actaaatgttcagtgctggtttccacctccctttcacatcgacacggctgactagtgacctttcttgctttctctccttcattctgcatgataataggctytcttggctttcttcctacttctacctacttatctgtctcttttgctggcttgtccaactctaatatattcttcctttttctttattagtctacccattct

SEQ ID NO: 45491 - DNA, 201 bp, Homo sapiens
tacatatttttttacctcatgcagtctattcttttcaagagaattaatgacattttaattactaaatgttcagtgctggtttccacctccctttcacatcracacggctgactagtgacctttcttgctttctctccttcattctgcatgataataggctctcttggctttcttcctacttctacctacttatctgtctct

SEQ ID NO: 45492 - DNA, 201 bp, Homo sapiens
ctttaaaaatatttttataagaaaacttaatacataaatataactttaaaaatatattggcatatgccaagaagtgctactcaataaaaaatctctaaaayaaaatgagaaaaccagccacagtccccaaatttggctttaacctttgttttctcattcatgcatctactagtacagcagattcttatatccctgattttc

SEQ ID NO: 45493 - DNA, 201 bp, Homo sapiens
aatttgtatgttaattaaataaataaataccaaaaacatggagaaagtttgcaaagtgggaggcaagtgtcagatctcttttctaccaatgtcattttatraaacttttttttatctcttaggctatatgaatgattgcataacatattgagatagtgttgaagttggtttgactttaaacagctgaggtaaaattacatg

SEQ ID NO: 45494 - DNA, 201 bp, Homo sapiens
ttattagacaagggagagaagattgcccaggaagctacagttttaaaggatgagcttacggcttcacttgaggaagttcgcaaagaaagtgagtactccartcctggtcaggagcaaactgcatatctttagggtgttagtcacccaaattagatttgtgagtgttttgtttttgttggctccagttttttagtcttttgc

SEQ ID NO: 45495 - DNA, 201 bp, Homo sapiens
ggttaggctttgtgtccccatccggatcttatcttgaattatcatcctcataattcccacatgtcaagggagagaccaggtgaaggcaattgaatcatggmgtcagtttcccccatgctgttcacgtgatagtgagcgagttatcaggagatctgatggtttcataaggggctcttccgccttcacttggcacttttcttt

SEQ ID NO: 45496 - DNA, 201 bp, Homo sapiens
ggaaggcaaaaaccaagagagtggatcacgaggtcaggagttcaagaccagcctgtccaaaatggtgaaaccccgtctctactaaatatacaaaaattagytgggcacagtagtgggcgcctatagtcccagctacttgggaggctgaggtgggagaattgcttgaatctaggaggtagaggtggcagtgagctgagatca

SEQ ID NO: 45497 - DNA, 201 bp, Homo sapiens
cttattttaagaaaacacgtacatgtcactattaaatttgagacacgctgaaggtaagaacatgagttatcattagagaactatttttccaatatgtatayataccatgtgtatatttttaaagtttatcaaacattttattttgaatgttgagttctagctacccattcatatgagtgatatgaattaattagaaattct

SEQ ID NO: 45498 - DNA, 201 bp, Homo sapiens
aatttgctaaaagattggatattgggaatgagagagacaggagtcagggacaactcaaggttttggcttcagaactgggaagatgggcttactatttataytgatacagaggagactgaattgagcagtctggagatggtgaaagagcagaaattaattttgactgtgactagactaaaagtcagttgaaaaaccaagcaa

SEQ ID NO: 45499 - DNA, 201 bp, Homo sapiens
ggtggatcacttgaggccaggagttcaagaccagcctggccaacatggtgaaacaccatctctactaaaaatacagaaattagctgggcatggcaatgcaygcctgtaatcccagctactaggaagggtaaggtgggaggattgcttgaacccaggaggtggaggtagcagtgagcggagattgtgtccactgcactccag

SEQ ID NO: 45500 - DNA, 201 bp, Homo sapiens
agtaagtcagtgaaagctagccagtgaattatatttttaataagtcatgtgtatggtttagaattcaaacataattctgagaagaagccaagcatgactcytgttttccacagtatttttaatactttttatttcttttttattttcttcctgtgtttttttctctcttctttaaaatttagcaaccacaaatttcttttt

SEQ ID NO: 45501 - DNA, 201 bp, Homo sapiens
agaaaagctctcaaattaaattttcaagtctgatttatgagactcctctgaaaatctagttttttctaatttcaattatttgtttctctgcttccctgacraggctgttctaacactgcctggattttggcttgttgcctgcctcattcctttcttggcttgttctcattacagcacttttgcctggtaggagtgaagacc

SEQ ID NO: 45502 - DNA, 201 bp, Homo sapiens
catgatcctactacttccctctggcctgggcaacagattaagactgtctcttttaaaaaataaatcaacaggctgggtgcggtggctgacgcctataatcycagcactttgggaggctgaggcaggcagatcacctgaggtcaggagtttgagaccagcctggccaacatggtgaaaccccgtttctactaaaaatacaaa

SEQ ID NO: 45503 - DNA, 201 bp, Homo sapiens
aaactgaatccctgaacagatcaataatgacctccaaaattgaatcattaacaaaaagcctaccaaccagaaaaagcccaggaccagatgaattcacagckgaattgtacccactgtatgtataaaaaagcgggtactattcctactaaaactgttccaaaatattgaggagaggagaatcctctctaattcattctatga

SEQ ID NO: 45504 - DNA, 201 bp, Homo sapiens
gccactagctatactaataaagaaaaaagagaggatatccaactaaacacaagcagaactgacaaagggacattaccgctgaccccacagaaatacaaaarctgcaaatacctctatgaacacaagctagaaaacctagaagaaacggataaatttttggaaacatagaaactcctaagattgaaccagggagaaactgaa

SEQ ID NO: 45505 - DNA, 201 bp, Homo sapiens
taacataggccactagctatactaataaagaaaaaagagaggatatccaactaaacacaagcagaactgacaaagggacattaccgctgaccccacagaartacaaaaactgcaaatacctctatgaacacaagctagaaaacctagaagaaacggataaatttttggaaacatagaaactcctaagattgaaccagggag

SEQ ID NO: 45506 - DNA, 201 bp, Homo sapiens
gaggcgtgaaaaaccatacaaaagatcaacaaatccaggagtttattactcgaaagaatagataacataggccactagctatactaataaagaaaaaagaraggatatccaactaaacacaagcagaactgacaaagggacattaccgctgaccccacagaaatacaaaaactgcaaatacctctatgaacacaagctaga

SEQ ID NO: 45507 - DNA, 201 bp, Homo sapiens
cagtgaaacccgtctctacaaataaataaataaataaataaataaattagctaagtacagtggtgcactcctgtagtcccatcttgtcaagaggctaaggkgggaggatcatttgagcccaggagtttgaggctgcagtgacacatgatcctactacttccctctggcctgggcaacagattaagactgtctcttttaaaa

SEQ ID NO: 45508 - DNA, 201 bp, Homo sapiens
tggggttgtttgtttttttcttgtaaatttgtttgagttcattgtagattctcgatattagccttttgtcagatgagtaggttgtgaaaattttctcctaktttgtaggttgccttttcgaaagtgccttcaaattctaagaagctatgggtcctttgggattttcttaatacacactcctcagtctccatattcctcagc

SEQ ID NO: 45509 - DNA, 201 bp, Homo sapiens
tctaactggtatgagatgatatctcattgtggttttgatttgcatttttctgatggccagtgatggtgagcattttttcatgtgttttttggctgcataartgtcttcttttgagaagtgtctgttcatgtccttcgcccactttttgatggggttgtttgtttttttcttgtaaatttgtttgagttcattgtagattct

SEQ ID NO: 45510 - DNA, 201 bp, Homo sapiens
cctgttgtttcctgacattttaatgattgccattctaactggtatgagatgatatctcattgtggttttgatttgcatttttctgatggccagtgatggtragcattttttcatgtgttttttggctgcataagtgtcttcttttgagaagtgtctgttcatgtccttcgcccactttttgatggggttgtttgttttttt

SEQ ID NO: 45511 - DNA, 201 bp, Homo sapiens
tctccacatcctctccagcacctgttgtttcctgacattttaatgattgccattctaactggtatgagatgatatctcattgtggttttgatttgcatttytctgatggccagtgatggtgagcattttttcatgtgttttttggctgcataagtgtcttcttttgagaagtgtctgttcatgtccttcgcccactttttg

SEQ ID NO: 45512 - DNA, 201 bp, Homo sapiens
tttcttggcttgatgtatcatttttcatcgctttttgtacattccattgactgagcgttccagtttatccattcatctactgaagaacatgttggttacayctaagttttggcaattacaaataaaactgctattaagacacatgtgcaggttttgtgtgaacgtaagttttaaatttatctgggtaaataccaaggtatg

SEQ ID NO: 45513 - DNA, 201 bp, Homo sapiens
cagtagctgtggtttaaattttattttgacatgaatctgtaaacttatgtgtgcatagaaaagcatcttctttattagaaatggaatttctttgaggatgrtaatttggggactatttactagaaatggaattgcttgagggtgataatttgggaactattatttcctgatctaactctacccatccataaactcatttct

SEQ ID NO: 45514 - DNA, 201 bp, Homo sapiens
tactctagtaataactctcacagtaagtcaattacttgtcttcaaactcttaatagctgttgtcagcaatgcctattaaacatatacttattattttgatrggaaaattgccccacccctactcccacaatcacccaggaacttgtaaatacacaataaacttttaaaaaattattttcataaagaccaagatatacacat

SEQ ID NO: 45515 - DNA, 201 bp, Homo sapiens
aaatacttaaaatgtgcaaagaaaagaaagagaatataaacaataagccatgtgataaaataatatttgtaaattggttatgtaacataaaactctcttamtaaaatatcttttatataaatattactctagtaataactctcacagtaagtcaattacttgtcttcaaactcttaatagctgttgtcagcaatgcctatt

SEQ ID NO: 45516 - DNA, 201 bp, Homo sapiens
gcacatcttaccagggatccttaatagagttgattattgatagtacggaatactgtggaagaggaaatcctctccgttgctaattcatgcaacatggtttyatcattttagagacatacatagaggactgtaaccattgccataagtatcattttatgtgccatggtcatgtggagaaatcattacagaggaaatatggaa

SEQ ID NO: 45517 - DNA, 201 bp, Homo sapiens
atttacccacactggttgccaatgagacatccattgtcccagcccatgtaaccctttcaggtctaccactgtttccatgacaagtttgtggcacggggctrtggtgagatttgaaacactgttctgggcttactggatgacattttctctgaagtcttttttatccatattggattgtcaaggagtagggcaagttagtac

SEQ ID NO: 45518 - DNA, 201 bp, Homo sapiens
atcattttatgtgccatggtcatgtggagaaatcattacagaggaaatatggaaaaccaaaattctagatttagatttactgtgatataattgtgaaaatmcgttaaactctatgggccccatatctgtaagtgctagaagagggttaactaggagatcttcaatgttcctctgtacattattttacttaaacgtttaaga

SEQ ID NO: 45519 - DNA, 201 bp, Homo sapiens
gatcaagacgtcaacaatgctaagactgagaaacacttctcttgaggctaagtctgtctctggaggcttgggctgcatcaagatgtcagggagtctcaccraccctgtcatttacccacactggttgccaatgagacatccattgtcccagcccatgtaaccctttcaggtctaccactgtttccatgacaagtttgtggc

SEQ ID NO: 45520 - DNA, 201 bp, Homo sapiens
gaggtgggccatttatccagcttgaatggtttctgtgaaagcaacagatagggtttacagtgtggttacattgaggcatatatgagtttgaatatttacaraaaatttattggagaggaaagctggatagatgcaatcctagattgtgcctataaaaatttcatgtactctcagtgtaaacaaataatttatataaccaca

SEQ ID NO: 45521 - DNA, 201 bp, Homo sapiens
catgatccatgctcttgaaactgcatgacataatgtcaggaacattgagtttggagtagaatatctgtgttgcaccacttatggtttttaaaggttttttycctcctaatctgtaaaatgggtatgacagcatgaggattaacagtgatgcccaaaaagtgcctatcacagtgcttgaccttactgggaattcagtaagta

SEQ ID NO: 45522 - DNA, 201 bp, Homo sapiens
taaaggtttttttcctcctaatctgtaaaatgggtatgacagcatgaggattaacagtgatgcccaaaaagtgcctatcacagtgcttgaccttactgggrattcagtaagtaagagcaggtattacatttgttgctattgttttgttattaacagtagcgatgaagagccctctcgttgctcccaccttctgtttttatg

SEQ ID NO: 45523 - DNA, 201 bp, Homo sapiens
tttttttcctcctaatctgtaaaatgggtatgacagcatgaggattaacagtgatgcccaaaaagtgcctatcacagtgcttgaccttactgggaattcartaagtaagagcaggtattacatttgttgctattgttttgttattaacagtagcgatgaagagccctctcgttgctcccaccttctgtttttatggtctcc

SEQ ID NO: 45524 - DNA, 201 bp, Homo sapiens
ttatttataaataatacatatgcactactatactaataagtaaaacaaagaaattttataaaaattagaatggaaatgttacattcagttgttttcttatrtgttgtcatggctcatcttgcacaccttctggggtgcacagcttgaaaagctttgctcgagaggtttatcatgtttttgtaaattagactgtcttgccca

SEQ ID NO: 45525 - DNA, 201 bp, Homo sapiens
tgtgaatagtgccgcaataaacatacgtgtgcatgtgtctttatagcagcatgatttatagtcgtttgggtatatacccagtaatgggatggctgggtcamatggtatttccagttctagatccctgaggaatctccacactgacttccacaatggttgaactagtttacagtcccaccaacagtgtaaaagtgttcctat

SEQ ID NO: 45526 - DNA, 201 bp, Homo sapiens
aaaaattagaatggaaatgttacattcagttgttttcttatatgttgtcatggctcatcttgcacaccttctggggtgcacagcttgaaaagctttgctcragaggtttatcatgtttttgtaaattagactgtcttgcccataaccaagtacctcagtcatcttccagaaaatgccttccacacccttgggtctctttcc

SEQ ID NO: 45527 - DNA, 201 bp, Homo sapiens
gtattccatggtgtatatgtgccacattttcttaatccagtctatcgttgttggacatttgggttggttccaagtctttgctattgtgaatagtgccgcartaaacatacgtgtgcatgtgtctttatagcagcatgatttatagtcgtttgggtatatacccagtaatgggatggctgggtcaaatggtatttccagttc

SEQ ID NO: 45528 - DNA, 201 bp, Homo sapiens
aacattgcttagaaaacacaagcacctgagtagacacctgtcaaaacaagagccatgagggagactgctgctagcattttaatacccccattacttctgcygactgtagaatttgccatctgtttgttatatttttgaatgaggttggtccttacaagtgctgtcaatatattaagatttaataaggaagtcccaaaatcc

SEQ ID NO: 45529 - DNA, 201 bp, Homo sapiens
agataattagaatctgatcattgagttcttccctgggctatgaggtgggccatttatccagcttgaatggtttctgtgaaagcaacagatagggtttacartgtggttacattgaggcatatatgagtttgaatatttacagaaaatttattggagaggaaagctggatagatgcaatcctagattgtgcctataaaaatt

SEQ ID NO: 45530 - DNA, 201 bp, Homo sapiens
catcaggttcctcccacaatatctgggaattatgggagctacaatttaagatgagtatgggagaggacacagccaaaccatatcagtcatgttagttttcygtctatcagctattctttttctttttttatttttccttttcactagtgtttgagttaggataattttgctataaatgaaatttcatcatttaaacagttc

SEQ ID NO: 45531 - DNA, 201 bp, Homo sapiens
acagtaagttttttgaaggtaggcactttgtctgattttttttttttttttgagacggagtctcattctgttgcccaagctggagtgcaatggtttgataytggctcactgcaacctctgccttctgggttcaggcgattctcctgcctcagcctcctgagtagctgggattacaggcacccacccctatgcctggctaat

SEQ ID NO: 45532 - DNA, 201 bp, Homo sapiens
gtcgcttttatctccaaattttgatgggaattctttgtccatatgtacttaatattagaaaaacatattgttgagtactttttttttttttttttttttttgagacagagtttcgctcttgttgcccaggctggagtgcagtggtgcgatctcagctcaccgcaacctccgcctcccaggtgcaagagattctcctgcgtc

SEQ ID NO: 45533 - DNA, 201 bp, Homo sapiens
ccctagatgtcagcatcacacaatctacccatgtaacaaaccttcacgtgtaccacctgaatcaaaaataaaagttgaaattattattattattattattwtttttgagacggggtctcgttctgtcacccaggctagagtgcagtggcacaatctcggctcactgtaacctccacctttggggtttaagtgattctcctg

SEQ ID NO: 45534 - DNA, 201 bp, Homo sapiens
gacaggaatatccacaccctagatgtcagcatcacacaatctacccatgtaacaaaccttcacgtgtaccacctgaatcaaaaataaaagttgaaattattattattattattattatttttgagacggggtctcgttctgtcacccaggctagagtgcagtggcacaatctcggctcactgtaacctccacctttggggt

SEQ ID NO: 45535 - DNA, 201 bp, Homo sapiens
agttcattgtcactaaacatcagagaaatgcaaatcaaaaccacaatgagacaccatctcacaccagtcagaatggctattattaaaaagtaaaaaaaaaacaaaaaacaaacaaacaaaaaaaccagatgctgttgaggctgcagagaaaaggaaatgcttatacactgttggtggcaatataaattagttcagccactg

SEQ ID NO: 45536 - DNA, 201 bp, Homo sapiens
atcttcctttcctgtttttttttttttcttttaagcacagttgtttaaattccctacaaggttagaatacatgcacttttaagaaagcattctaccgaagstaattgggtgttttccactatcacataaatctgttggctggtgtttgatattcttggaaagtcggaggataggcatttattagtatcagaggagcccttt

SEQ ID NO: 45537 - DNA, 201 bp, Homo sapiens
tagagcaatctaaattctcaaatcccaaaatttctctttgaccacttctcattgctcagactttcccaggaatttcccattgaacccaccctcattaaccrtatttctagaggcaggttaactatttgatttgaagccatctttattagccatatttctagaggcagattcactatttggaatatgagagatatgtagaat

SEQ ID NO: 45538 - DNA, 201 bp, Homo sapiens
ggtgtgtttcctggaggaactctgcatatagttcttcatacaagaagctgtgtctcagaaccaatctaaaagacactcatgtaaaattgaactccaccatrtttgttgttagttattttcctcattttattttatttacagtatttatcactgtctgaaattatagtccttatctacttgctggtttgtcatcatttattt

SEQ ID NO: 45539 - DNA, 201 bp, Homo sapiens
agttgaatccacatccttctccattgaccatacaaagtttacaatgagaaagaggtaaaatatagaacataaagaaggcagagacagctatctttattttwcaatatatgaaaccagatgccaaataagttttccagagtaacagaataaataaatattagacaggaaagccctttgataccacatgggctctttattggt

SEQ ID NO: 45540 - DNA, 201 bp, Homo sapiens
tacattatttatttaatgtaattctaacagtattaactagacagtatacttaatatttattgacataagtcagaatgacatgatagctaatatttactgarcatttattgtgttcttggcactatattcagtactttacattactgtcatatattcctcacaacaaccctataagataggtacatcacaattgaaggaatt

SEQ ID NO: 45541 - DNA, 201 bp, Homo sapiens
gaccaggacaaattttctacattatttatttaatgtaattctaacagtattaactagacagtatacttaatatttattgacataagtcagaatgacatgayagctaatatttactgagcatttattgtgttcttggcactatattcagtactttacattactgtcatatattcctcacaacaaccctataagataggtaca

SEQ ID NO: 45542 - DNA, 201 bp, Homo sapiens
atattgaagaatatttaccattacaaataaatacaagggcctgatacttttatggtttaattttttttgctataataatgagatagtttattccattgttwttaaagtgaaagactataaaaatggatgatactcagcttaatttaatttataaagaactgtaattttaataatctgaaaaagatgcataagaatgtaaac

SEQ ID NO: 45543 - DNA, 201 bp, Homo sapiens
atggagaactattaagaaattacatgcagatgaaataatatttgcattttgggaagaggacgcaagcagtggagttgtttgataggtgatgcctgagactratgccgggggaactcattaggctgccattgtgtaaaaaataatgcagtaaaataggacaataaggcaattgcaacatttaggattattgagacagagaga

SEQ ID NO: 45544 - DNA, 201 bp, Homo sapiens
ggagaactattaagaaattacatgcagatgaaataatatttgcattttgggaagaggacgcaagcagtggagttgtttgataggtgatgcctgagactgaygccgggggaactcattaggctgccattgtgtaaaaaataatgcagtaaaataggacaataaggcaattgcaacatttaggattattgagacagagagaaa

SEQ ID NO: 45545 - DNA, 201 bp, Homo sapiens
ttatatcccttcatttcacattcacagaaactataaaagtttggtgccaatgtagctgtacaacttgttggcttttgtttttcttcataactttaaaagaycttttggttctgtctgtaatatataatcatgccttaaagctgattacaattttcactgttaaaaggattcacactttggctaccttttcatttattactc

SEQ ID NO: 45546 - DNA, 201 bp, Homo sapiens
tagtattttatataccagtaatgaactaggtgaaaaagaatttaaaaatgcaatcctacttgcagtagctacaaaaaaagacacttagaaataaatttaamcaaggtgaaagatgtctacaatgaaaactacaaagcactgatgaaagaaatagaagaggataaaaagaaattgaaaaacattccatgctcctggactgaa

SEQ ID NO: 45547 - DNA, 201 bp, Homo sapiens
agcaaaaataggcatatatttttcatttttaaaaatttaaatctaaataacacttaacatcacatattatctctttgtaattaaagagaattgtctttagkgttttgtttttttaaatagttaaacaaggaaacatgccactaagcaaataaattcatagtcttagagcagagcaaggtaatctctaaaataattaaggca

SEQ ID NO: 45548 - DNA, 201 bp, Homo sapiens
agaaaaactaaattggagtttttattaaaagtacatgtatttaaactagcaagaaatcttaaactagcagatttcttaaagaaaggttaaaaatgttgttyttatttacttcagagattaaagagtaaatcaagttttataagccaattggataagaaatgcatgttaatttagagcatgacttcagaatgtgtacagatg

SEQ ID NO: 45549 - DNA, 201 bp, Homo sapiens
tattttttgtggggggagcggttttttaacctcactgtgtgtcagacttatgttgggggcttgctaaaacccaggttgctgggccccacctccagaatttytaattcaataggtctgaagtggagtctaaaaatttttatttctaacaaattcctaggtaatgctgatgctgctggcctggacatgacacttcgagaacca

SEQ ID NO: 45550 - DNA, 201 bp, Homo sapiens
ggtgtcttagcttcagggagactgcttcctacgtccacattgtttgattctttctccttgctcttccaccatcccctactcctgtccccaccacatgccarcttatccaggtaatgtgttaattttgattctctaacctttgacagacatgtattgaacgtttatttccagcctcaaaaagcgctgtgataacacagcctc

SEQ ID NO: 45551 - DNA, 201 bp, Homo sapiens
cgtttatttccagcctcaaaaagcgctgtgataacacagcctctgcacacaaggaacttccagtctagaataggagacagactttgaaacctatgattatratactatgccataaattctagaaaccgtggtttgtccaacgtgctatcagaaggtataaagataaggtatatagtacatatatatgtttacattttcttt

SEQ ID NO: 45552 - DNA, 201 bp, Homo sapiens
tatgccataaattctagaaaccgtggtttgtccaacgtgctatcagaaggtataaagataaggtatatagtacatatatatgtttacattttctttatctscctttggggactgggataaaagaagatggaattatttacctgtgtcagtcggggtcctccaaaaggaattggcttacatggcgggggctggcaggtctga

SEQ ID NO: 45553 - DNA, 201 bp, Homo sapiens
agaaggtataaagataaggtatatagtacatatatatgtttacattttctttatctgcctttggggactgggataaaagaagatggaattatttacctgtrtcagtcggggtcctccaaaaggaattggcttacatggcgggggctggcaggtctgaaatctatcgcgtaggttttatataaactcaggcaagagttgatg

SEQ ID NO: 45554 - DNA, 201 bp, Homo sapiens
tttttttttttttctgtttttatcttttgcttttatggcttccaacttactgggtgaagcccacctacattatcaagggtaaactctttaattaaagtcarttgattaagaaatgctcaccacgtctgtaaaataccttcacagaaacatttagataaatatttgaccagatagctaggcaccaaagcctgaccaagtttt

SEQ ID NO: 45555 - DNA, 201 bp, Homo sapiens
atcaagggtaaactctttaattaaagtcagttgattaagaaatgctcaccacgtctgtaaaataccttcacagaaacatttagataaatatttgaccagayagctaggcaccaaagcctgaccaagtttttttgctttgatagaccaaagtcgggtgacgcactgcaaatgtatagaagttccaactccaagatatattga

SEQ ID NO: 45556 - DNA, 201 bp, Homo sapiens
ctaccggaaaattcttctccacaatttttcttacatcctagtagcaaaaagataacaaagctcaaatgccatgaacatttgcagtttgaactgctgtcaayatgagagatgaacatcttattttgcagcaggtgggtggggtgggctaggatttgagcactatagagaaaatatacataaattattttcaaattcttcctt

SEQ ID NO: 45557 - DNA, 201 bp, Homo sapiens
aaatgctgattcagatatgattcgagaatagaatataggtggacaaggcttgtatgaggaagattctgggttactctgagttcagtccagacataacagcragaatgagactctgtggtggacctggaagatgccagaacagtttttattgctgtactgtgacagtgttgccaggatataatctattagtagggaaccagc

SEQ ID NO: 45558 - DNA, 201 bp, Homo sapiens
tttatatcaatagaaaaatatttttacttcaaatgactaaaaggttttcattgacatcaaagcctcttgcagaaacatttgaaattatcagttaaaagcgygttagcaaaatactagtgtgtgatgtgtgtatgtgtgtacaaaatatacacatgttattactaggggctcctgcgtggaacagtgcaggtctagatcatg

SEQ ID NO: 45559 - DNA, 201 bp, Homo sapiens
gattagacatccatattaataaacacctgtcataatagcataacagatgttctaggaacacagctaacacaaaatctaaaaaacttggtcgtattttttgmcaatgtggtgcctaaattaaactttacaacctttatcatacttgttttaataaaattcaatgctgaaataatttatatcaatagaaaaatatttttactt

SEQ ID NO: 45560 - DNA, 201 bp, Homo sapiens
ctaaatatttaacatatatatttagtatcatacttgctaaattgctgcatattttcatatatatgtacatataatttcatatctaacatattacatgttayatggtacatatatatgaaaagatacaggaattagcaatgtgtgttatatgtgttaagtatggtgaatgaactgagaagaatgtgcttctccataaaaggg

SEQ ID NO: 45561 - DNA, 201 bp, Homo sapiens
tttatggctacataatattccatgatgtatatatgaaccatatgttcttcatccaatccattgtttattggcatttaggttaattcaatgtctttgctatygtgaatagtgctgcgatgaacatatgagtgcacatgtctttttggtaggatttattttcctttgggcatgtacccaataataggattgctgggtcaaatt

SEQ ID NO: 45562 - DNA, 201 bp, Homo sapiens
gtaatcccagctactcgggaagctgaagcaacaagaatcacttgaacccaggagacagaggctgcagtgagccgagattgcaccatgagactccagcctgrgcaacaagagtgaaactccatctcaaaaagaaaacaaaaacaaaaacaaaaaaaacctggtggtccttttaaacatgcatggttttcgccgtctagagac

SEQ ID NO: 45563 - DNA, 201 bp, Homo sapiens
ccatcaccatcagaaggaacacacttcaagtaagaaagatatccatgggctcagaattcaccttaataagcaaatatttcatatacatataatgttttccrtaccatgttttatacatgggttacatatagacatgaaactgtactagtgacttctagaatcagtctattgatctctttatatttgttgcacatttgtctt

SEQ ID NO: 45564 - DNA, 201 bp, Homo sapiens
acattttcattaatttctttaattaagatctttattgctcacactgtggacaaaaaccaaacaacaaaaaaaggcctgccaggaaccacactctaaaacayttaaaataccaatctgctaaatactgtcatataaaagagatccctggttagagttactttgggaaccaaaactgaaaaggaatgaagccacagtgattag

SEQ ID NO: 45565 - DNA, 201 bp, Homo sapiens
tcttttcaaaatgctgcttttaccccatttttttttctccccattgttgcaaattgtaaacatctttaaaagatttcaggactctttgtgtttggttaagkttccaacaggtggaagatatcttccaagactgaccatagtcatatttgggaaggaaagatcagaatcaatttaatcaagatactaaatatgaaatggggg

SEQ ID NO: 45566 - DNA, 201 bp, Homo sapiens
aattacaaaactgtaattgtaacaagcgcatgacaaagttttaagatttgtttcaatgttgaattataaatatctcagagtttaattctttcctcaaactrtatttaaaattactacttttaatatatcttaaatatatttgaatatatgtctagaatatatattatcacagagataactttaggaaaaaaattattaaag

SEQ ID NO: 45567 - DNA, 201 bp, Homo sapiens
tgatatttcctaccaattatgactgaatgcaccagaacactttgtcctaagtaaatctataatacattttgaaaaggtttaagtggatttcaaaactgctwgataatagcttttttctaaggagatacgatatgaagacttggaaagtgttgtctgtagttattgtttacatccatagtagttgcctggttagttaacacc

SEQ ID NO: 45568 - DNA, 201 bp, Homo sapiens
gattcctacaattaagatgagcagccagggaataattcaggaaatcttatttaatttctaccttgctagatactatatatgatacacagagtgtaagaggragccctgccctcaaagattttacgatccagttgctaagacaaaaaaaaaattaaaatgtaattattacaaaagactgtaaaagtggccatacctaaaatg

SEQ ID NO: 45569 - DNA, 201 bp, Homo sapiens
gccagggaataattcaggaaatcttatttaatttctaccttgctagatactatatatgatacacagagtgtaagagggagccctgccctcaaagattttaygatccagttgctaagacaaaaaaaaaattaaaatgtaattattacaaaagactgtaaaagtggccatacctaaaatgcactgtggccatcgttgcctaga

SEQ ID NO: 45570 - DNA, 201 bp, Homo sapiens
cccccttttcatatggactgcatggcaggaagaactatgtatgcatttattcctcataattcagtattaatttttagggtaaaggattatctttctaccaktgttatcaggaagacaatagcctaaaaagcaagctgacattctccttcctgtttccatcagtttaaacaacagattatttttaaccattcttatttaact

SEQ ID NO: 45571 - DNA, 201 bp, Homo sapiens
gcatttattcctcataattcagtattaatttttagggtaaaggattatctttctaccagtgttatcaggaagacaatagcctaaaaagcaagctgacattytccttcctgtttccatcagtttaaacaacagattatttttaaccattcttatttaactgattgaggcagtaatggcttctgtgtgtttttttaatccact

SEQ ID NO: 45572 - DNA, 201 bp, Homo sapiens
tgttcattcagaagatgggctaaaagtgggccttgcaagacttgcataggaagagtagtggggccatatggtccaattaaaaaaaaaaaaagataagctaycttttgacaacaatgagtagattaattgaatgaaagctgcatttaagagcgagtataaatatttgttgaatggaaggaaagaagaaaaggaagaatgaat

SEQ ID NO: 45573 - DNA, 201 bp, Homo sapiens
gccttgcaagacttgcataggaagagtagtggggccatatggtccaattaaaaaaaaaaaaagataagctatcttttgacaacaatgagtagattaattgmatgaaagctgcatttaagagcgagtataaatatttgttgaatggaaggaaagaagaaaaggaagaatgaatggatgaaggatggaaggagacagagtgat

SEQ ID NO: 45574 - DNA, 201 bp, Homo sapiens
ggtctatagtagttgtgtgtgtactgaacatgtacaaacttttcctttcttgtcattattccctatacaatgcagagtacaataacaactattttgcatarcacatacattgagttataaattataagtaatctaggtatgatttaaagtaaataggaggatgtgcataggttttgtgcatatactacatcattttatatc

SEQ ID NO: 45575 - DNA, 201 bp, Homo sapiens
tcctacagagaaagttgccatcaccatcagaaggaacacacttcaagtaagaaagatatccatgggctcagaattcaccttaataagcaaatatttcatayacatataatgttttccataccatgttttatacatgggttacatatagacatgaaactgtactagtgacttctagaatcagtctattgatctctttatatt

SEQ ID NO: 45576 - DNA, 201 bp, Homo sapiens
taatgataatttgcatttttttaaagtgtgctataattttgaaagctctcacacattcattacttaatttaattcttatgaaaatcctctgaaattgactyagcaggtcctattttccataattttcaagtaacagtactgaaaaagccattgctcaaatgtatatcctactgaccataggttatttaaatgctcaaattt

SEQ ID NO: 45577 - DNA, 201 bp, Homo sapiens
gattgatgttttctcattattggattgaagttatgcatttttggcaggcatgctacagtgatataaccttctcagcctatatatcagggagtacatcatgycagtatgtcttattactggtgataattaaccttgatcatttggttaaggtggtgtctgctggctttctcccctgtaaagttacactttttccttttataa

SEQ ID NO: 45578 - DNA, 201 bp, Homo sapiens
atcacataagtgtcacctgctctgacagcattcaggacatttgcccatggtgcttttcttccattttttctcttcgtataatcatacactgtaagaggtcrgtggggactggtagtcttttaaagtgcattgacagaaaaggacagtatatatttcaaatctggctcatttgttatagcaaaagacagatactgaattgca

SEQ ID NO: 45579 - DNA, 201 bp, Homo sapiens
gcacctgaggcaactgcggtccacaggtgaaaacataatctctcagatttgtaatggaatactgagagatgtcaagttgagtcatatcacataagtgtcamctgctctgacagcattcaggacatttgcccatggtgcttttcttccattttttctcttcgtataatcatacactgtaagaggtcagtggggactggtagt

SEQ ID NO: 45580 - DNA, 201 bp, Homo sapiens
taggaaatgttatagagggagggatcctcagagaaacagagacagtaaatttttgctactctgaaatgtaattgcttaagacacttttaatttaaacaacrtacaacatgcacacactgagagagaacttgaccctctctagtaaacatttcttttactttctctaagtctttgacctcgaatgctttaccttgagtacag

SEQ ID NO: 45581 - DNA, 201 bp, Homo sapiens
aagaaaaaatagctcatgctttatatcttctgaagtgccacaaaatgctgttttctcattttattcaaatattattttattaataaaagacataatgatasctaaactttgatgagtgcttactgtgtactgtatcttgagaaaaacatgttttcttgtttatcctctagacagtttgattgattattataccctccattt

SEQ ID NO: 45582 - DNA, 201 bp, Homo sapiens
tgatgaagagtaaatataaaaacactttcttgaacatcatgccagcaccagtgaagagaggtgtgggtgtggaaggtttctagaaggagtttagcatgaarggtgctgtttatgccattgctaacacttggaacgcagtgactaaagacacagtagtacactcctggcacaacctcttgcctgtgactatattaagtgatc

SEQ ID NO: 45583 - DNA, 201 bp, Homo sapiens
catacacaaaaaatataatttcagagtctttccctaggctagcagaagtaaatatcaaagaacttgattatttttaacatcaataatgagattccaattcytcattgaccaatggggaaatagtccagatggttttgaatcaagttgattgtgataatagtgatgattaaaatgacattgttaacactgaagaaaaagttc

SEQ ID NO: 45584 - DNA, 201 bp, Homo sapiens
aaatataatttcagagtctttccctaggctagcagaagtaaatatcaaagaacttgattatttttaacatcaataatgagattccaattcttcattgaccratggggaaatagtccagatggttttgaatcaagttgattgtgataatagtgatgattaaaatgacattgttaacactgaagaaaaagttcctatggataa

SEQ ID NO: 45585 - DNA, 201 bp, Homo sapiens
taaggtaaaaatgtgtgacgggcttattgaaggactacagcactgtacatttataacagcacaagaaatcatgtcagtttataaagccaaagagagacgaygacaacgacgacgacgatggctactactactactactactactactactactactacttttcttttttttttttttttttttgaggtggagtttcactct

SEQ ID NO: 45586 - DNA, 201 bp, Homo sapiens
taaaaaggagtacaaactttcttactcattttataagggaagcattaccctgataccaaaaccagacaaggacacaacaataaaagaaatctacagaccamtattttgaatgaacatagacgcaaatatcctcaacaaaaaactaacaaatgaaatccaacagcatatcagaaggattatacattgcaattacgtgggatt

SEQ ID NO: 45587 - DNA, 201 bp, Homo sapiens
tcctacgtttccagagaaatgctcttaccttcatctgcagtctgtttgcaaaacagcaatttgttcttgcacataatcttctttgattgcataagaaatgyggaaccactcttttgtgttgattgcagcactcaggttagtattttcgaaaaaccagccagcaaatgcttagttcttgaatccctcagtgaaatggcattt

SEQ ID NO: 45588 - DNA, 201 bp, Homo sapiens
tataagttcaaaatcaagaatgattgtgatgccaaacaaccacagatggctcatatgggtggccgagatgttgacacttgccttctgatgatttaaaatayacaattttttcattaacaaaattattaaaatattatataatgttgccttcagtctatgggtataaggtgcatataaaacataaatgaattttgtatttag

SEQ ID NO: 45589 - DNA, 201 bp, Homo sapiens
tcttgaaaaataagaacaaatttggaggcctcacactttctaatttcaaaattcattacaaactgcaataatcaaatcagtgtgatacagacatatagatmaatggcatagaaaagatatcccagaaataaacccttgcatttacagtcaaatgatttttgacaaggctgcccagataattctatgggtaaaggatagtct

SEQ ID NO: 45590 - DNA, 201 bp, Homo sapiens
atttcagaagataggtttttttattaaaaaaaaaaaaaaaaaacaaaaaaacactgtttggctgggctcggtggctcacgcctgtaatcccagcactttgsgaggccaaggcgggtggatcacctgaggtcaggaattcaacaccagcctgcccaacatggtgaaaccccatatctactaaaaatacaaacaaaattagcc

SEQ ID NO: 45591 - DNA, 201 bp, Homo sapiens
agtgtatgagatagctcacatttctttatcttggcaaagaaaatttcacaaaagatttaaaaaatgtttgagtgaaaccaattttatcttttagcaatgakttttttaaaaaaaggaagagaagaaaattaagttagtttactatgagtggctcctaatgaacctataccaatgtagcaaaaaatcattgttctcttttct

SEQ ID NO: 45592 - DNA, 201 bp, Homo sapiens
attttatcatttcagaagataggtttttttattaaaaaaaaaaaaaaaaaacaaaaaaacactgtttggctgggctcggtggctcacgcctgtaatcccarcactttgggaggccaaggcgggtggatcacctgaggtcaggaattcaacaccagcctgcccaacatggtgaaaccccatatctactaaaaatacaaacaa

SEQ ID NO: 45593 - DNA, 201 bp, Homo sapiens
ggctgagccaggagcattgcttgaatttttggggctgcaccactgctctctagtctgggcaacagagcaagcctccatctcacaaaaacaaacaaacaaacgaacaaaccataatctaatttaattctaccaacaacctttgtaacaagcattttaatgatcattacagattaggaaattgaggctcagagagtaagcaat

SEQ ID NO: 45594 - DNA, 201 bp, Homo sapiens
tttcaacaaatggtgctggaacaactggttattaatataaaaaattcaatcaataacctcctaccaaaaatttatcaaattgtacactcacttgaaatgtrggatgtttattttatgtcaattttaactcaataaagctgttaaaaatagtaggaaagtatgagagagaaaggaaaaaagggacgaaatgtaaaatgctat

SEQ ID NO: 45595 - DNA, 201 bp, Homo sapiens
aggctgagccaggagcattgcttgaatttttggggctgcaccactgctctctagtctgggcaacagagcaagcctccatctcacaaaaacaaacaaacaaacgaacaaaccataatctaatttaattctaccaacaacctttgtaacaagcattttaatgatcattacagattaggaaattgaggctcagagagtaagcaa

SEQ ID NO: 45596 - DNA, 201 bp, Homo sapiens
gaggctgagccaggagcattgcttgaatttttggggctgcaccactgctctctagtctgggcaacagagcaagcctccatctcacaaaaacaaacaaacaaacgaacaaaccataatctaatttaattctaccaacaacctttgtaacaagcattttaatgatcattacagattaggaaattgaggctcagagagtaagca

SEQ ID NO: 45597 - DNA, 201 bp, Homo sapiens
aaatccaatattctcttttaatagtagcatctgactatttttattatactctatttttaatctaccacctatactggtaataaagaactttgtttcaggtyaatttaaatagattatagagcttttcttaccttaaatgtgtggtaaaattgctacagtatttctaaatggcctttccagcttgaattcattcttattttc

SEQ ID NO: 45598 - DNA, 201 bp, Homo sapiens
tcagggaattttatttctcttttatatatataaacataaatgtatgatttatagatacatatgataaaaatcatatatatacatatatatatatgatttttataaaatcctatcctagttgggaaaatccaatattctcttttaatagtagcatctgactatttttattatactctatttttaatctaccacctatactgg

SEQ ID NO: 45599 - DNA, 201 bp, Homo sapiens
taaagaaaaacctgggaactatggagatctttttttttctgctttgaggagaatattaacccatttttgctgattttagtaacttcacagagaagtttttwaaaaaaattcatatggatgggggtctcactatattgcccaggctggtctcaaatcctggtctcaagtgatcctccagccttggcttcccaaagtattaag

SEQ ID NO: 45600 - DNA, 201 bp, Homo sapiens
gacactcaggaactgacatttatgtctaaccttctggataatggatttacatggctgtttaatcttctaaggaaatattaagactcctgagattgtatttycatgcctttataaatcatacattagtggtattaagacacaagaaaataccttttcaagctctattgcttgtaccaactataaaattaatagttaatacca

SEQ ID NO: 45601 - DNA, 201 bp, Homo sapiens
attctaccaagaactctttcaccctcactaactgcctaaataatttcttactactctatcaccagtagcgcacacctctcacatcacttgtgactaacaawaatcttccaagagattgccaagtaacaatgaggttgtgattgcggagtcggggagaggtaaaatcaaccaaaggaacagccattctttcttaggaaagat

SEQ ID NO: 45602 - DNA, 201 bp, Homo sapiens
gctttttattaaaagaaaattctaccaagaactctttcaccctcactaactgcctaaataatttcttactactctatcaccagtagcgcacacctctcacrtcacttgtgactaacaataatcttccaagagattgccaagtaacaatgaggttgtgattgcggagtcggggagaggtaaaatcaaccaaaggaacagcca

SEQ ID NO: 45603 - DNA, 201 bp, Homo sapiens
tcaggtattatcattgtgtccatacttaagaatgaagaatagataagaaagttactcagtgaaagcaataataacaaaaaatgatttgaaagaatgccctrtagaagagattattgtgtatgcatgtgaatgaaacagagaaaactaaattcaaatcatttactctctctgaaacttactttgcaaatctacaaaatgaaa

SEQ ID NO: 45604 - DNA, 201 bp, Homo sapiens
caaactacaggcctgtctgcctgattcccgcccagagctgtataatgcttgcagtgtctgtccatgtccttcacttgaaaaatatgacacaatgagagggmcaattatgatggtctattgtagtgtgagaaatgtcataatttgaatatttttataaaaatacatataggagaaaaggggggaacacaaccctcactctca

SEQ ID NO: 45605 - DNA, 201 bp, Homo sapiens
ccacatgcctggcaaggcctcacaatcatggtggaaggcaaggaggagcaagtcacatcttacatggatggtgccaggcaaagagagcttgtgcagaaaawctcttgtttttaaaaccatcagatctcatgagactcattcactatcacgagaacagaccaggaaatatccacccccataattcaatcacctcccacgggg

SEQ ID NO: 45606 - DNA, 201 bp, Homo sapiens
tatttcaaaaataatacattctagctttagtttttgctggtgtgtcagaaggtcaaacagtaatatccattccaactaacattagatttgaaattatatayatatttaaattatttaaatgcatgtttatatatatatcatctattacatatattattagaccaatttagttacattctgtaaagtttcagagttaaagtt

SEQ ID NO: 45607 - DNA, 201 bp, Homo sapiens
ctctagactataaagtccttgaatatttttacatgatttatggtgcagtggccaacgactataaaggatgcaaccggcaaaattatgcaggttggcttagycttaaaagtacacattgggttttgcatttagaaggtgtttttatatctttttaaaagcagtatcagtattatggtgaaggcaaaaattgtatcatgatca

SEQ ID NO: 45608 - DNA, 201 bp, Homo sapiens
taaaaagaacaaagtatttgggctagggcatgcactggagatcacttgtattcatattttagcatggaaagccataaactccatgaggataggaatttttrttccgctgatatatcctaagaataatgcttgacacatagtaggtactcagtacatttttgctgagtgaatgattatacctcaatgacctttttcagatta

SEQ ID NO: 45609 - DNA, 201 bp, Homo sapiens
aataattgtcttttgtagcaaacacacacatagtcagcacatatacacaagcagattgggaaagagaaagacagagagacacagacagagagagtgagagrgacaaaaaaagagagaaagagaattaatgatatgttctggaattactgagatcttattgttataattgttttctgtgtgtgttttaaagaaatagtcgtt

SEQ ID NO: 45610 - DNA, 201 bp, Homo sapiens
tctgcatagacaggactattttgtaaaaacagcaacttgttctgattaagttatgatgtatttagcacacacttcagtaagagcattagactatctctttmaaatggaaagctatgtgcttatttgtatgggttttttatttgtttttctggtagagaagttgtcatatctgcgaactgaaagcacttaattttctaagta

SEQ ID NO: 45611 - DNA, 201 bp, Homo sapiens
taatgtatatatttttattatactttaagttctagggtacatgtgcacaacgtgcaggcttgttacatatgtatacatgtgccatgttggtgtgctgcacmcattaactcatcatttacattaggtatatctcctaatgctatccctcccccctcccccaaccccacaacaggccctgatgtgtgatgttccccttcctgt

SEQ ID NO: 45612 - DNA, 201 bp, Homo sapiens
taaaaaagacttaaatgaggtgattttatttttaaaaagcttataataattgagtggtgtatcctcaagactgactagggtgatttcaaatgtaagtttastaccagtttctttctagtgatggtgtggtatctatgtggggagagagtgcgtgggtgcagctatgagcacagctactaagactggaaataaatgtctgtg

SEQ ID NO: 45613 - DNA, 201 bp, Homo sapiens
ggtcatccatttagctcaaaaggagatagaataaaataaagaaaaatgctgaagaacaaatatatatatatatatatatatatatatatatatatatatayacacatctcaagaaggattagctaaattcagaaaaagcataatttagcaattttaatacattcacctatttcaccatatacagtgggagaagaaacttta

SEQ ID NO: 45614 - DNA, 201 bp, Homo sapiens
cacatctaccgcctgatgccttgtgaagaaggtgccttgcttccccttcaccttccaccatatttgtaagtttctcgaggcttccccaaccatgctaaacwgtgagtcaattaaacctctttcctttataaattacccagtcttgggcagttatttataccagtatgaaaacagactgatccaaccatgttgtactgaatc

SEQ ID NO: 45615 - DNA, 201 bp, Homo sapiens
aacccgggaaccggagcttgcagtgagcggagattgcgccactgtgctccaggctgggcaacagagcaagactccgtctcaaaaaaaaaaaaaaaaaaaaaaaaatggagaaaggcaagtcatattttaagccagaataattttaatagcaaaacctttccattataaaaattacagagaaatattcttcgtgaatatgaa

SEQ ID NO: 45616 - DNA, 201 bp, Homo sapiens
attttatgtgaatcctaaacaacatggaacaaagttggttttgttgtagagaatgaggaggtcagcatgcatttcctgaggcaggaacatttgcctagtgrcttgaaagaatagtaggagttgagcaagcaggtcaaaggggacagactgttcaggccaaggttctaatatgcccacaggacagaggcatggaagatcatg

SEQ ID NO: 45617 - DNA, 201 bp, Homo sapiens
tgatacagtcacagtggtggggatcaaccttttctggggaggccagaaagctcagaatcagcactaagacacaacttccacctcccccagtccagtctttytaataaccaaaagtgccttcacacatttccataaacctcccagtaaagtgatgttgccccacttaagaaccagtgggagggcatagtctgtggaaaggta

SEQ ID NO: 45618 - DNA, 201 bp, Homo sapiens
taatgtcaaagaaaattgattttagtgcaaaaaaatcactcagcatatttttaaaatacttatcaactatcagagaaaatagatttttgaacagaattttktttaacaaatatcaaagaaaataggctaaacggaaaaaaaggaaaatgtgcccagagaagctatattaatatcagagaagatagacttcaaggaaaaaaa

SEQ ID NO: 45619 - DNA, 201 bp, Homo sapiens
tggtcatggtgaatgatctttttaatgtattattgatttttgtttgctaatattttgttgaaaatttttgcatctatgtgtgtcagatatattggtctgcrgtttcctttttttgttgagtctctctggtgttggtatcagggtaatttttcaatattgccttttgtcttcagaatctacatagtgcagtaggcttttaag

SEQ ID NO: 45620 - DNA, 201 bp, Homo sapiens
gacttcttaaaaattgatgattattataccttctaaggtccaacctatacttctgttccaggggaaatatgataatatacatatgctttctgttgagattrgaccatgactgtatttactgtagggcttaatgatacattcataactgaatgctgcaaattaggttaaagccctagttaatttataatgaaggttttcagt

SEQ ID NO: 45621 - DNA, 201 bp, Homo sapiens
ggagctgctcctatttggccatcttggttaggtgaaaatggtagcttcttaatgtgtcattaaagtgtacatctgtggacttcttaaaaattgatgattaytataccttctaaggtccaacctatacttctgttccaggggaaatatgataatatacatatgctttctgttgagattggaccatgactgtatttactgtag

SEQ ID NO: 45622 - DNA, 201 bp, Homo sapiens
ggtggtttaaactgtgttctaaaagatgagtacatgctaacccagtaaatgaggaaagaacatttcagacccagagatgagcatgtataaaagtctgtcgygatacccgagcggggggtgcatggtggcataagaaactgaaagaaactcaatgttgtacaccaaattctccatgaagcagaatctcagctgctaattgga

SEQ ID NO: 45623 - DNA, 201 bp, Homo sapiens
gtattagtctgctttcacactgctgataaagacatacccgagacgggcaatttccaaaagtagaggcttaagggacttacagttccacatgcctggcaagrcctcacaatcatggtggaaggcaaggaggagcaagtcacatcttacatggatggtgccaggcaaagagagcttgtgcagaaaaactcttgtttttaaaac

SEQ ID NO: 45624 - DNA, 201 bp, Homo sapiens
caagtcaacaccacaacgagatattatctcacacttgttaggatggcccttataaaaatatcaagagataagtgttggtgaggatgtggagaaaagggaamcctgatatactcttggtgggaatttagattaatgtagccattgtggaaaacagtatagctgttccttaagaaactaaaaatagaactacaatatgaccga

SEQ ID NO: 45625 - DNA, 201 bp, Homo sapiens
gattaagaattttgtcttttttccactgatgtatcaccaaatcttagaagagtcatgacataaagtaggccctttacatatttgttcaatgaataaatgtrtgactcatggcagaaatgatgttattactttaactggaaaattatttaatgtattgatatatccagagcttctaaatggcaggttagatatagccagctc

SEQ ID NO: 45626 - DNA, 201 bp, Homo sapiens
gaatcagttaggaggtgacagacttcatctggtacccgcagtctggtttttcagtcttcaggctgccctaggcttgaaggtggagtttcgctggacctccygctatctcctgtctctatccctaccacagccatcatggatactgtttatccaaatatagtaagtactaaaataactaaaatacagtggttaaacattaat

SEQ ID NO: 45627 - DNA, 201 bp, Homo sapiens
attcagagagaatcagttaggaggtgacagacttcatctggtacccgcagtctggtttttcagtcttcaggctgccctaggcttgaaggtggagtttcgcyggacctcccgctatctcctgtctctatccctaccacagccatcatggatactgtttatccaaatatagtaagtactaaaataactaaaatacagtggtta

SEQ ID NO: 45628 - DNA, 201 bp, Homo sapiens
tcccctagtgcgcaggtgggcattattcagagagaatcagttaggaggtgacagacttcatctggtacccgcagtctggtttttcagtcttcaggctgccytaggcttgaaggtggagtttcgctggacctcccgctatctcctgtctctatccctaccacagccatcatggatactgtttatccaaatatagtaagtact

SEQ ID NO: 45629 - DNA, 201 bp, Homo sapiens
atgctcttttgacttaaaaattaagaagcttatttttttctgcagggcatccagaattgatctgagttaccgtaactggcttctgctaacatgaccacatrtcacttacataaaaatcagaatgcttgtttatgatacaggtcacaaataccagctagcttagaaacaaataacaggtagctagtgaactgggccttctct

SEQ ID NO: 45630 - DNA, 201 bp, Homo sapiens
gtggtgttgcgtttctttgactctttgtgtttcttgaagctgtttgatggtgtcttcacatttgaagaaggagtcatctccttcagtgtttactgtctgayattaggaaagaaaaaccttgaccagtcagccccgttggagattttgggggtctttcagacctttttgtatgtagaggcacccactctatttctcttttct

SEQ ID NO: 45631 - DNA, 201 bp, Homo sapiens
tacctcatgaaactgtgggtgttgtgtgattattaaaacaattagtagagacaaaacatctagaattatagatgacagataaaacactttacatgtcaggkattatcattgtgtccatacttaagaatgaagaatagataagaaagttactcagtgaaagcaataataacaaaaaatgatttgaaagaatgccctatagaa

SEQ ID NO: 45632 - DNA, 201 bp, Homo sapiens
gatacatactatataataaagtatgatacatactacattattccaagtataataatacttggaaacattatactgagtgaaagaagccagtcaaacactayatattttatgattccattaatataaaatgttatttcatagcagactccaataggaaaatatatataagcacagaaagcagattagtggttgcctagaggg

SEQ ID NO: 45633 - DNA, 201 bp, Homo sapiens
tgacaatttaatatttacaaaaaagataaaattggcaagaagactgatactgttcctagaacatggaggtaaggaggtgtagccagattatgtttgaacaygagctctaccactaataccatttattggcaagtgagttaacctctctgtttgtcaatattctccttcactaaatgaggataatgattccacttacctcat

SEQ ID NO: 45634 - DNA, 201 bp, Homo sapiens
agggaaatccgctgaccccttgtgcttcccgggtgaggcaacaccctgtcctgcttcagctcaccccttgtgagctgcacccactgtccaaccagtcccartgagatgaaccaggtacttcagttggaaatgcagaaatcatccatcttctgcatcaatcacactgggagctgcagaccggagctgctcctatttggccat

SEQ ID NO: 45635 - DNA, 201 bp, Homo sapiens
tccccttccccagccaggctgccgcctcgcagatcgatctcagactgccgcactagcagtgagcaaggctccatgggcatgggacccactgagccaggcaygggagagaatcaccttttctgctggttgctaaaaccttgggaaaagcgcagtatttgggcagggagtgccctgtttttccaggtagtctgtcatggcttc

SEQ ID NO: 45636 - DNA, 201 bp, Homo sapiens
tcgagcttcctggccactgtatttatctactgaagcctcagcaatggcagattccccttccccagccaggctgccgcctcgcagatcgatctcagactgcygcactagcagtgagcaaggctccatgggcatgggacccactgagccaggcacgggagagaatcaccttttctgctggttgctaaaaccttgggaaaagcg

SEQ ID NO: 45637 - DNA, 201 bp, Homo sapiens
atctttgtaactatcttatgtaggaatagaatcggaggagggtttgcccaacatggttcccagcttgacttttctctttggtttagtgattttgggggccycaagatttatttttctttctcatatgaaacaactagcaaagagattatgtaattatatctttaaaaaatctttttttctgtaatggaacaactttttctt

SEQ ID NO: 45638 - DNA, 201 bp, Homo sapiens
gggtatcaccagcagaggctgcagaacagcaaatattgctgcctgatccttcttctggaagcttcatcccagaggggcagccgcctatatgaggtgtctgwtggcctctactgggaggtgtctcccagttaggctacacagaggtcagggacccacttaaggaggcagtctgtccattctcagagctcaaccaccatgctg

SEQ ID NO: 45639 - DNA, 201 bp, Homo sapiens
agattgtttatatatatgaagatttattaagagaaattggcttacatgggagctggtggtgtaaatcagttggagtttgaggacctgagaaccaggggagkcaatggagtaaatcctactcccagtgtctgagaagatatgagatgcctcagctcaaacagtgaggtaggaaaactgtagtgaatttcccctttcttgctt

SEQ ID NO: 45640 - DNA, 201 bp, Homo sapiens
atcactttcaggtgcaccaatcaaacatagatttggtcttttcacatagtcccatatttcttggaggctttgttcatttcttcttactcttttttgtctawccttgtcttctcactttatttcattaatttgatcttcaatcactgataccctttcttccacttgatcgaatctgctattgaagcttgtgcatgtgtcatg

SEQ ID NO: 45641 - DNA, 201 bp, Homo sapiens
taccagttgtttctttccatgtttcatgcttccttcaggagctcttgtaaggcaggcctgatggtgacaaaatctctcagcatttgcttgtctgtacaggrttttatttctccttcacttatgaagcttagtttggctggatatgaaattctgggttgaaaattcctttctttaagaatgttgaatattggcccctactct

SEQ ID NO: 45642 - DNA, 201 bp, Homo sapiens
cttagagacctacaaagagacttagactcccacacaataataatgggagactttaacaccccactgtcaacattagacagatcaacgagacagaaagttawcaaggatatccaggaattgaactcagctctgcaccaagcagacctaatagacatctacagaactctccaccccaaatcaacagaatatacattcttttca

SEQ ID NO: 45643 - DNA, 201 bp, Homo sapiens
tcaggtctgctctgatcttagttatttcttgccttctgctaggttttgaatgtgtttgctcttgcttctctagttcttttaattgtgatgttagggtgtcrattttagatctttcctgctttctcttgtgggcatttagtgctaaaaatttccctctacacactgctttaaatgtgtcccagagattctggtatgttgtgt

SEQ ID NO: 45644 - DNA, 201 bp, Homo sapiens
tgagacaggagaattgcctgaacttgggatgcagaggttgcaacgagctgagatcgcgccactgcattccagtctggagaaaagagtgagactctgtctcaaaaaaaaaaaaaaaaaaaaaaaacccaaaaacaatagttgctatgactgcaaaggaaatgttagacatgcacaaaagttataatctgaaattggttcaac

SEQ ID NO: 45645 - DNA, 201 bp, Homo sapiens
tgcacattgattttgtatcctgagactttgctgaagttgcttatcagcttaaggatattttgggctgatatgatggggttttctaaaagtacaatcatctsatatgcaaacacagacaatttgagttcctcatttcctaactgaataccctttatttctttctcttgcctgattgccctggccagaacttccaacactatg

SEQ ID NO: 45646 - DNA, 201 bp, Homo sapiens
ggattcacagccgaattctaccagaggtacaaggaggagctggtaccattccttctgaaactattcgaatcaatagaaaaagagggaatcctccctaactsattttatgaggccagcatcatcctgataccaaagcctggcagagacactacaaaaaaagagaattttagaccaatatccctgatgaacatcgatgcaaaa

SEQ ID NO: 45647 - DNA, 201 bp, Homo sapiens
attaaataaggaatcctttcctcatttcttgtttttgtcaggtttgtcaaagatcagatggttgtagatatgtggcattatttctgagcctctgttctgtyccattggtctatatatctgttttggtaccagtatcatgctgttttggttactgtagccttgtagtatagtttgaagtcaagtagcatgatgcctccagct

SEQ ID NO: 45648 - DNA, 201 bp, Homo sapiens
ttcccgttcactcatttattctgtagacacatatacatgatctctacaagatagctgcttactctgataaggcagtctttgaaaggtttatttgaaattaygtccaatagttaacaattattagataatatcccagaaatagtgactaagttggtgttatatttccttgactttttcttttaaatgcatataggttatcgc

SEQ ID NO: 45649 - DNA, 201 bp, Homo sapiens
gttttcagcaagttcttggaaactgtgactttagtggccctcaaataatgttgttttattcaacattgttttcttacaatgttgatgattttaaaaaaatkggtgtcatcatacattgtttcaattaaagtcacagtttccaagaactatggaagaatttaaataaggacttactgtactatagaaattaaacataaagga

SEQ ID NO: 45650 - DNA, 201 bp, Homo sapiens
tgacaaaaaccacatgattatctcaatagatgcagaaaaggcctttgacaaaatctacacccttcatgctaaaaactctcaataaattaggtattgatggracgtatctcaaaataaaaagaggtatctatgacaaacccacagccaatatcatactcaatgggcaaaaactggaagcattccctttgaaaactggcacaa

SEQ ID NO: 45651 - DNA, 201 bp, Homo sapiens
tcaatgggcaaaaactggaagcattccctttgaaaactggcacaagacagggataccctctctcaccactcctattcaacatagtgttgggagctctggcyagggcaatcaggcaggagaaggaaataaagggtattcaattaggaaaagaggaagtcaaattgtccctgtttgcagatgacatgattgtatatctagaaa

SEQ ID NO: 45652 - DNA, 201 bp, Homo sapiens
tataattatatatgctatacatttttggatagataatttttatttggctgaggaggtttctctttgtttcatatttgctaagtctttaattattaatgaaygtagaatttaattgaaaactattgggaagatgtgtttttctttataaatatggtaaattttttatagattatctgatgttaaataatcttgtatttctga

SEQ ID NO: 45653 - DNA, 201 bp, Homo sapiens
ctcaaaatatatatatgtaaaatataaaatacacatgtaaaatatactatatgtaaaatatatataatatatgtaaagtattattttatatatatatatakatagagagagagagacagacagacagacagacagacagacagacagagagaccaagtctcttattccgtcactcaggctagtgtgcagtagcatgatcat

SEQ ID NO: 45654 - DNA, 201 bp, Homo sapiens
aagttatgtgatagagttatgtgtttgtctaggtttatgagatcaaagtagctgatcatttcttttgcatgtatgaacctggagagcaacgtggatagatrgatgatagatagatagatagatagatagatagatagatagatagatagagatttggattgagttcttaaacgcatttgttttatacatcagagtttgtaa

SEQ ID NO: 45655 - DNA, 201 bp, Homo sapiens
tcctccatccctcccttccttactctcttcctctcttttctttctttctttctttctttttctttctttctttctttctttcgttctttctttttctttcyttctttctttccttctttctctctttctttattttcttctttctctcccttctttccttccttcccaacttaatacacagtaagtactgaaatatttttt

SEQ ID NO: 45656 - DNA, 201 bp, Homo sapiens
taaacatatatatatatatacatatttgggggggatctgggggtttggatcaagtaagagacttggtctcaaaatatatatatgtaaaatataaaatacayatgtaaaatatactatatgtaaaatatatataatatatgtaaagtattattttatatatatatatatatagagagagagagacagacagacagacagaca

SEQ ID NO: 45657 - DNA, 201 bp, Homo sapiens
aaataaaaaaaacaagaaactaaacattaccagagaaaacaccttcattcaaagggagacatgaagggaagaaagaaggaagagaagaccacaaaacaacyagaaaacaaacaacaaaatggcaggagtaagtccttttttaacaataataacattgaatgtaaatggactaaactctccaatcgaaagacattgagtggc

SEQ ID NO: 45658 - DNA, 201 bp, Homo sapiens
ataatattataacactgtaattgtggtgcataaactactcttaagtggaaagactacaggatgagccaataaaaataataactacaaagcttttaaagacytagatagtacaataaggtataaatagaaacaaaaaagttaaaaagtgagggaacaaagtatagagtttttattagttttctttttgtttgtttctttctt

SEQ ID NO: 45659 - DNA, 201 bp, Homo sapiens
ttatagaaaagaattagttttatttttaagcagctgctttatgaatacctgcaacgttttagtgcctacctttcttttctttctctttacttttctttccytttctcttttcttttcttttccttttctttcatttttttctctctcccccttctcccttcttcccttccctttccttcctccctcccttccttcctccat

SEQ ID NO: 45660 - DNA, 201 bp, Homo sapiens
acaactgcatgtgaatttgtaattatctcaataaagaacccaactaaaatttatttcagacatttacatagtgtctaatatattgtgtatgtgtgtatatmtatatataaacatatatatatatatacatatttgggggggatctgggggtttggatcaagtaagagacttggtctcaaaatatatatatgtaaaatataa

SEQ ID NO: 45661 - DNA, 201 bp, Homo sapiens
taggcaaatagtggtgtaaagatgtttctcagtcatctttgggtaattttctttgttgttggtggtgggttttttattacataatttttttttttttttttactaaccatttggtcatcattcacacagatctttatggttataatcttaaaaacttaagtttagtgctggtattccaagctactgctttagtccatttat

SEQ ID NO: 45662 - DNA, 201 bp, Homo sapiens
atcttttttgtagatggtgctttgtgaaatgtttcgtggtttataacatttagaatatgtgaaacttttgctgtatgctttcttgtagaagagatttttttatttgaaagtgtagttttaattcatatacagtaaaattgacttttttggtgtatatttctatgagttttggaaaataggtagagttatgtaacccattac

SEQ ID NO: 45663 - DNA, 201 bp, Homo sapiens
aatgagttccgaacgaagtctcacactgtacacaaaaataaactcaaaatggatcagagacaaaggtaaaatattaaaaaattataatataaatacaaaaygtttagaacaaaataggaaaaaatattcgggatctagggctaggcagagtccttgataccacaatcatgaagtgtgaatttaaaaaattgatgaattaga

SEQ ID NO: 45664 - DNA, 201 bp, Homo sapiens
tgttttttttttttttttttcctgcttgctctctatgccttttagatggggcatctatatcatttacattcaagattaatattgatatgtgaggttttgawccagtcatgatattattagcttgtagctttgtattctcaattgcattgtttctttatagggtctgtgggctctgtacttacatatgtttttatggtagca

SEQ ID NO: 45665 - DNA, 201 bp, Homo sapiens
gttgtttatctgttctagaaaccttttggcagagacttcagggttttctaagtatagaatcatatcatctctgaagagagagagtttgattttttttttttctatttgaatgccttttatttctttttcttgcctgaatgttctagctagaacttccagtactgtgttgaaaatgagtagtgagagtgggcatctttttct

SEQ ID NO: 45666 - DNA, 201 bp, Homo sapiens
tcaatcaaatacttgtaacacaattttataaaaattagatcttttatatcagacacgcaactacaaatcatatattatgtatgtggggtgcataacaaccrtaaaagtttctcaaagatcaatgttcaatcatccttcacacacatatcttgaatccagcaatattttccaggcatgtgtgtgtttggctgtatgtgaatg

SEQ ID NO: 45667 - DNA, 201 bp, Homo sapiens
cttctctgagtccatttcctctcctgtaaattagaaattgaataccaccaactacaccaggccattgtgaagaaaaataatatacatgaatatgccttatmaactataaaacggtatataaattaatgtattattaatagtatcttcatgtttatatttcatgaaacaaatgattatatgcagtagctatttctttttaaa

SEQ ID NO: 45668 - DNA, 201 bp, Homo sapiens
gagcttttaaaatattgagtagattaactctttgtaatatgacttgcaattacactttttccagattgttgtcttttgaatttgcttatggtgtattttcrccatggagaagattttaattgttgtcagatttatacatttttttcttttattgactcagtcatagttagctcgcaggcccaaggttgaaaaggaattatc

SEQ ID NO: 45669 - DNA, 201 bp, Homo sapiens
gttcaatcttttgtttgtccttctatcaagttgtaaaacttctttaaatattctaggtataagtcctttgtgggacatttatttttcgaatattttctccyattccgtggtgtactttttcattcattttttttggagctctgtaagcccttttcccaccagcttctgttttagattcaaggggtacatgcgcaggttttt

SEQ ID NO: 45670 - DNA, 201 bp, Homo sapiens
agcccttttcccaccagcttctgttttagattcaaggggtacatgcgcaggttttttacaagggtgtgttgtgtgatgctgagatttgggatacaattaarcctatcacccacatactgagcatagtacccaatgattagtttttcaacactttcctttctccctttttccgcactcttgttgtcaccatttttatgccca

SEQ ID NO: 45671 - DNA, 201 bp, Homo sapiens
ttgtacctctggaagagtttggctgtgaatatgtctggtcctggactgttcttgattggtaggctattaattattgcctcaatttcagaacctgttattgstgtagtcagagattcaacttcttcctggtttagtcttgggagagtgtatgtgtccaggaatttatccattttttctagattttctagtttatttgcgtag

SEQ ID NO: 45672 - DNA, 201 bp, Homo sapiens
taacctccgcctcccgggtttaagcgattctcctgcttcagcctccctagtagatgggattacaggcacgtgcccccacacccagctattttttgtatttktagtagagacggggtttcaccttgttggctaggctggtcttgaactcctgacctcaagtgatccacctgccccaacccctcatagtgctgagattacagg

SEQ ID NO: 45673 - DNA, 201 bp, Homo sapiens
gcccaagagtttgaggttgcaatgagctatgattatggcactgtaccccatcctgggtgatagaaggagaccttatctctctctctctctctctctctctstccatatatatatatgaatgaaactgaacaactagaaaaaattataattttaaaaatgcatttcaaaattttattgtgctacacttcctgtggtgactga

SEQ ID NO: 45674 - DNA, 201 bp, Homo sapiens
ataagtgctgcagagtttgtataagtattgttgataattggcttgtaaatagcaatattggactttatttttctttcaataattttcaaaagtaagtcaastaaattcgagctgtctaaaagcgaaagaataagcagctttcagtgcaaagaaactgggcaaattttgttaaagtttaacaaaacttttgtaaaattacca

SEQ ID NO: 45675 - DNA, 201 bp, Homo sapiens
ctgatatagggatttttaaaagtatcatttattataaacactgctggcagtatttctttaagattccagatattctaaagtctagtgttgattgtaggttrtagtgatttaagaaaggttatacaaattcccttaccacatgcctcaaaatgcttatgtaaaaagaggaattaaagtatggatgttgataaaaaatgaaat

SEQ ID NO: 45676 - DNA, 201 bp, Homo sapiens
acaggcatgagccatcatgcccagcatctttttattcttttaagtgtcttttgcagagtagaagttttaaatttttatgaagtccaatgtattcattttttgtaaaaaaattgttaattatgtttttggtgttatattttaaaagttcttgccaaacccaagatcacctagagtttctcctctgttatcttacagaagctt

SEQ ID NO: 45677 - DNA, 201 bp, Homo sapiens
ttttcttggcttgatgtatcatttttcatcgctttttgtacattccattgactgagcgttccagtttatccattcatctactgaagaacatgttggttacmcctaagttttggcaattacaaataaaactgctattaagacacatgtgcaggttttgtgtgaacgtaagttttaaatttatctgggtaaataccaaggtat

SEQ ID NO: 45678 - DNA, 201 bp, Homo sapiens
agtatcatttattataaacactgctggcagtatttctttaagattccagatattctaaagtctagtgttgattgtaggttatagtgatttaagaaaggttwtacaaattcccttaccacatgcctcaaaatgcttatgtaaaaagaggaattaaagtatggatgttgataaaaaatgaaattatttttgagggaagaagaa

SEQ ID NO: 45679 - DNA, 201 bp, Homo sapiens
agtgagtcagtaggctttaagaaggtcagatgctaactaataatggctaaattatattattttcctaaattgaatgcgattattttctgagcttataaaakttggtctgatatgaaaggagcaggggcagccagtatatcacggtggtttaaagcgaagctggaaaaaatgcccaggctctgtaagaatcatgtgcatgat

SEQ ID NO: 45680 - DNA, 201 bp, Homo sapiens
agataaaccttgattttgagttatgactcaaattactataactttgtgaattttgagaacatatttatcagctcaaaggctctattttgctccaactatamaaatgaaatgtaacagatctatctcttggaattattatgagaattaaacaaaatcttatgtatatgttacccaacacagtgcctggaaaagaagagagac

SEQ ID NO: 45681 - DNA, 201 bp, Homo sapiens
agatgctaactaataatggctaaattatattattttcctaaattgaatgcgattattttctgagcttataaaatttggtctgatatgaaaggagcaggggyagccagtatatcacggtggtttaaagcgaagctggaaaaaatgcccaggctctgtaagaatcatgtgcatgattaatgctgaggccactgccaacaggaa

SEQ ID NO: 45682 - DNA, 201 bp, Homo sapiens
ggaagtagtctcactctgttgcccagggtggagtgcaatggcaggatctcagctcactgcaacctttgtctcccaggttcaagtgattctcccacttcaayctcccgagtatctgggactactggcatacaccaccacacccggctaattttttgtattttttagtagagatagggtggtatgggaaggtcaagacaactt

SEQ ID NO: 45683 - DNA, 201 bp, Homo sapiens
ttatgtgatagagttatgtgtttgtctaggtttatgagatcaaagtagctgatcatttcttttgcatgtatgaacctggagagcaacgtggatagatagatgatagatagatagatagatagatagatagatagatagatagatagagatttggattgagttcttaaacgcatttgttttatacatcagagtttgtaaaac

SEQ ID NO: 45684 - DNA, 201 bp, Homo sapiens
acaaagtaattaatgaaataaaaatgtaagaaaaagccaatgtatgatattggttcatttgaacaacttttattgaacgcttattgtattcctgacactctttttggtactgaacatttaataaatgaagaagacaaagtgtttttcctcaaggaaatcacagtcagcagggaaatatacaggtaaagagggttgaacagc

SEQ ID NO: 45685 - DNA, 201 bp, Homo sapiens
gtgatagagttatgtgtttgtctaggtttatgagatcaaagtagctgatcatttcttttgcatgtatgaacctggagagcaacgtggatagatagatgatagatagatagatagatagatagatagatagatagatagatagagatttggattgagttcttaaacgcatttgttttatacatcagagtttgtaaaacagta

SEQ ID NO: 45686 - DNA, 201 bp, Homo sapiens
tacaaagtaattaatgaaataaaaatgtaagaaaaagccaatgtatgatattggttcatttgaacaacttttattgaacgcttattgtattcctgacactctttttggtactgaacatttaataaatgaagaagacaaagtgtttttcctcaaggaaatcacagtcagcagggaaatatacaggtaaagagggttgaacag

SEQ ID NO: 45687 - DNA, 201 bp, Homo sapiens
ctttaaagttcatatggaagcaaaaaagagcccgcattgccaagtcaatcctaagccaaaagaacaaagccagaggcatcacgctacctgacttcaaactrtactacaaggctacagtaaccaaaacagcatggtactggtaccaaaacgaagatatagaccaatggaacagaacagagccctcagaaataatgctgcata

SEQ ID NO: 45688 - DNA, 201 bp, Homo sapiens
tcaggtctctgttaactgttaatatattgacatatgagtaaactgaaaataatttacaaagtaattaatgaaataaaaatgtaagaaaaagccaatgtatratattggttcatttgaacaacttttattgaacgcttattgtattcctgacactctttttggtactgaacatttaataaatgaagaagacaaagtgttttt

SEQ ID NO: 45689 - DNA, 201 bp, Homo sapiens
gtatgggcaaggacttcatgtctaagacaccaaaagcaatggcaacaaaagcaaaattgacaaatgggatctaattaaactaaagagcttctgcacagcaraagaaactaccatcagagtgaacaggcaacctacagaatgggagaaaatttttgccatctactcatctgacaaagggctaatatccagaatcttcaaaga

SEQ ID NO: 45690 - DNA, 201 bp, Homo sapiens
ttggctgttgttttaggctacgattatcttcttgtttaacaagttccttattttccttatttatttctaggactaactaggttcctagaatttccatcctrgaaactcagcatttgtctttatgtccatgattgagatccataggcttttaaaaagtggtatccctgctctatctcaataatatttcaggtctctgttaac

SEQ ID NO: 45691 - DNA, 201 bp, Homo sapiens
ctcttctagctattttgaaatacacattagttcagactatagttaccttactgtgcagttaaacactagaacttattcctcctaactataactttgtatcyattgaacatatatatttttatatgtgtgtatgtgtgtacatatccgtgtatatatatgtgtatgtgtatatatatatagagagagagtgtgtgtgatgag

SEQ ID NO: 45692 - DNA, 201 bp, Homo sapiens
taactttgtatccattgaacatatatatttttatatgtgtgtatgtgtgtacatatccgtgtatatatatgtgtatgtgtatatatatatagagagagagwgtgtgtgatgagagagagatgtttgtgtatacatatatataagtatacatattcacattgacaatatactttatttgggttcttatctaaatattagata

SEQ ID NO: 45693 - DNA, 201 bp, Homo sapiens
gaataggaacacttttacactgttggtgggactgtaaactagttcaaccattgtggaagtcagcgtggtgattcctcaggaatctagaactagaaataccwtttgacccagccatcccattgctgggtgtatacccagaggattataaaacatgctgctataaagacacatgcacacgtatgtttactgtggcactattcc

SEQ ID NO: 45694 - DNA, 201 bp, Homo sapiens
aaatttaaattattatagaccatggtttcagtcttgtgactgactttgttgttcacgaggatggacattttgctttcattttaggatcttaaattatttcttttaaaaaaaaatcatctttttttggcattaagatcctgggagtttggccatgttgttaaaaagtagacagattgagtggaaaaagaaaattccacacat

SEQ ID NO: 45695 - DNA, 201 bp, Homo sapiens
tgagcccagattgtgccgctgcactccagcctgggcgacagagcgagactccgtctcaaaaaaaaaaaaaaaaaaaaaatgtgtatggtataagtttctgygataactagaggagctacatacttttgactcacactaaaccaaattgttctaacaagaagctatctgactctagtttatttgtgagaagaaatgtttctg

SEQ ID NO: 45696 - DNA, 201 bp, Homo sapiens
cggttactttcttttaaatttagtgaaagtttatgaatataaatttctcattttgaagtccacataagtctaaatgactttttactttgcttttgtactcatagtgttttgagtcagcacacttacctctaagtgatccctgaatataaattttcttaccatcagtcaaatcctctttgcctttttatacttggactagaa

SEQ ID NO: 45697 - DNA, 201 bp, Homo sapiens
aaaaactaatttgattcatttacttacagaaagccatatcttggaagatgtcaacaagtgtatcatagccttaagagaccaggatgctgataatttagacygtgctgcgggtgctatcagaggccgggcagcaagagttgctcacatcgtcacgggtgaaatggacagttacgagccaggggcttacacggaaggtgtaat

SEQ ID NO: 45698 - DNA, 201 bp, Homo sapiens
ttctaaaaggagacttggggaactgcgacagtgcactagcaattcagcttttgtgtaaattactttatttatcaagagttatgtttcaaatatttaaaagrcctaaaagtttctgtagaccatcttctcattttatgggtgaggaagtgagactcagcaagacttcaagaagcaatttcacaatacgtctagggagaactc

SEQ ID NO: 45699 - DNA, 201 bp, Homo sapiens
tttacactcccatcaacagtgtaaaagcgttcctatttcttcacatcctctccagcatctgttgtttcctgactttttaatgattgccattctaactggcrtgagatggtatctcatcatagttttgatttgcatttctctgatgaccagtgatgatgagcattttttcatgtgtctgttggctgcataaatgtcttcttt

SEQ ID NO: 45700 - DNA, 201 bp, Homo sapiens
ggttactttcttttaaatttagtgaaagtttatgaatataaatttctcattttgaagtccacataagtctaaatgactttttactttgcttttgtactcatagtgttttgagtcagcacacttacctctaagtgatccctgaatataaattttcttaccatcagtcaaatcctctttgcctttttatacttggactagaaa

SEQ ID NO: 45701 - DNA, 201 bp, Homo sapiens
gaatatttttttcgtatgtttggtggccacttgtatgtcttcttttgagaaatgtctgttaatgttctttgtccactttttaatggggttatttgtttttygcttgttgaattttctaagttccttatagagtctggattttagaccattgttggatacctagtttgtgaatattatcaccaactctgtaggttgtctttt

SEQ ID NO: 45702 - DNA, 201 bp, Homo sapiens
tttataggcatttacttttctctgtagccttcaccaacatctgttttttttttgactttttattaatagacattctgacttgtgtaagatgggatctcatrgttttgattaatgatgttgaatatttttttcgtatgtttggtggccacttgtatgtcttcttttgagaaatgtctgttaatgttctttgtccacttttta

SEQ ID NO: 45703 - DNA, 201 bp, Homo sapiens
aagtctcagccagaggtgagcagacaatgggatgaccagctgcagagagtagttaccttctctgctgagagtgggagatgtcagtatgaccagaacctgaraggagctgcccactttatggcctcctctttgctgagagcttcagaaacttgcagagaagtcaggactatcagctgtagagaacagcaacccactccaggg

SEQ ID NO: 45704 - DNA, 201 bp, Homo sapiens
ggcgtgaacccgggaggcggagcttgcagtgagccgagatcccgccactgcactccagcctgggcgacagagcgagactctgtctcaaaaaaaaaaaaaarcaaaaaaaacttcctcttaacatgtataggattatatttaatgtaatgcaaacaagtttcttttcatctgttttttctctgaaatagtgattagttgaaa

SEQ ID NO: 45705 - DNA, 201 bp, Homo sapiens
aggcctgtgcgaggcacttatttcttctgaattttgtccatttacatataagcttctcatggagtctgaggtgcagccgcattctttttctttttttttttcttttttgcttgagatcacagaattattattgatagccttcaaaccctctcaaagtgtcagaataagaggtcattaattatacccatttttctctgaagt

SEQ ID NO: 45706 - DNA, 201 bp, Homo sapiens
tagtgaaaggctttctaaaaacatttattatgtacaaagttcatgatatgttttgttctaagtactagagatggttggtttaaaaactttgacttggtccrtgaggtgttcgaattctagcaaggaagcaaacacactatttaaaacaacaataaaataactggatatgggttgatatcagtgttctactccaagtgatat

SEQ ID NO: 45707 - DNA, 201 bp, Homo sapiens
ccttttagtgaaggcaattttcattagtggtgtgatgaatttattgctttttatgttttgtgtatctgttgtatattttgatttgaggttactatgaagcwtgcaaatactatcttataatctattattttaaactaatgacaacttaaagttgatggcataaacaaacaaatgagaaaaaaactaatagaaatgctacac

SEQ ID NO: 45708 - DNA, 201 bp, Homo sapiens
cagcctcccaagtagctgggactacaggcgcccgccactacgcccggctaattttttgtatttttagtagagacggggtttcaccgttttagccgggatgstctcgatctcctgacctcgtgatccgcccgcctcggcctcccaaagtgctgggattacaggcgtgagccaccgcgcccggcctctccagactaattctat

SEQ ID NO: 45709 - DNA, 201 bp, Homo sapiens
gacttggtccgtgaggtgttcgaattctagcaaggaagcaaacacactatttaaaacaacaataaaataactggatatgggttgatatcagtgttctactycaagtgatatgggaaaacaatgagggagcaactgattattttagggaagtcctcacattttttagagaagaggtggaaattaaacaatgaatggcatagg

SEQ ID NO: 45710 - DNA, 201 bp, Homo sapiens
gtatctttttttatttcttatttctgtctgtgtttatctttataggggaagtatgttttttataggcaacagatcattgtgggttttttaaaatctattcwtctactccatgtcttttttattggagagtttaatccatttacatgtaatgttattattgataaataaggacttactcctgctattttttttctgtttttt

SEQ ID NO: 45711 - DNA, 201 bp, Homo sapiens
actccaactagtacagaaaccccatttgttgcctgttaattgaaggccctaatttggctgggtcaagtctcaatgtctagttcaatgcaatcattattgcrttatcacttgatagaagcattacttcctttgaaattaagatctctaaactcacagggcctaaaataatggcaatgagcggcaaaagtttgctagtatatc

SEQ ID NO: 45712 - DNA, 201 bp, Homo sapiens
gaggtgagaggaaaagtgctttcttagaccccccatgtctgtatactactattccctggaatgctcatttcattccctacctgtacccttttcggcttcamaaactcctcagaaatgcactcaccttctatttatccatctaattaccctccctgcttattttgaaatatataatttggactacaaagatatgctggtaaa

SEQ ID NO: 45713 - DNA, 201 bp, Homo sapiens
gataaatgtgttaagtgtgaaatgttgatgagatgctgaaatggcatggactaacacagtagttacatggatcgcctgatgacagagctggatgttagaawtttgtagtttgtgttgtgtaagtgacagatgaagccagagcactgtctactgttgtccaagaagagaatgaaagtaaaaaaaaaaaaattgctcaggaac

SEQ ID NO: 45714 - DNA, 201 bp, Homo sapiens
gttaacactttaacatcctgatttccattcctttgggtatataccttgcagtgggattgctggattgtatgttagttctatttttagtttttgtttgtttstttctttgtttgttttgagatggagtctcgctctgtcccccaagctggagtgcagtggtgctatctcggctcactgcaagctccgccttatttttagtat

SEQ ID NO: 45715 - DNA, 201 bp, Homo sapiens
aagttgaaagttatatgcagctgaaaatctgtgtggggtttgacactcctaactcccatgttattcagtggtcatctgtacattgattttgatgcttatawtaaaacatgatcaaattacatagctggaatgataattttaccaatatgataattttgatgatgataccatattaataatgataatatctattgaatttag

SEQ ID NO: 45716 - DNA, 201 bp, Homo sapiens
ttttcatttctctaataatcagtgatgttaagcttttttaaataagtgtgttggctacatgtatgtcttgtttggaaaagtgtctgttcatgtcctttgcytatttttatatggggttgtttgttttattttttcttgtagatttgcttaagttccttgtagatggtggatattagagcttagtcagatgcagagtttgga

SEQ ID NO: 45717 - DNA, 201 bp, Homo sapiens
actgaaaacttgagaaacacccttaatttctatattcttgtctgattgtgtctctgtctggctatcctgtatctattcatgcatatgtccatgcctatctkgcagattgatagtatttctgcagaagagttgaattctttgctacctttgttgattattatcgactttgactcagggtaatgtgttctcatcttgtgcaca

SEQ ID NO: 45718 - DNA, 201 bp, Homo sapiens
ccacaatggttaaactaacttacactcccaccaacagtgtaaaagtgttcctatttctctgcaaccttgccagcatctgttgtttctggactttttaatasttgccattatgattggcatgagatggtatttcattgtggttttgatttgcatttctctactgatcagtgatgttgagctttttttcacatgtttgttggc

SEQ ID NO: 45719 - DNA, 201 bp, Homo sapiens
ttattaattggcctaatttcaacattgtatctcaaggaataaaaaagccctaggagaaggagagatggaggagatggggacaactggttattggagcagcyagaacacataaaacattgagtaattaagttcactttcttttatgggtgctgttcatggtgccccacaacaattacgatggtaacatagatcacagatcat

SEQ ID NO: 45720 - DNA, 201 bp, Homo sapiens
aaatccttaataaatattagcaaaaaaatccaatagtatataaaaggataatatgttatgaccaactagaaacatttaaaaatgtattataagaaagatayatatttttcaggaagtgcaaagttgctgtaagactcaaaaatcaattgttgtaattgatttttaattgatttaattaaacatatgaatttacaaaatact

SEQ ID NO: 45721 - DNA, 201 bp, Homo sapiens
tctattttttgtacccattaactatcctcacttccccctaagtccccaactacccttcccagcttctggtaactattcttctaccctctatctccacgaaytcaattgatttaatttttagctctcataaataagtgagaacatgtgaagtttatctttctattcctgactcatttctttctatttctgactcatttcact

SEQ ID NO: 45722 - DNA, 201 bp, Homo sapiens
acttttatgtctagctagaggattttaaatgcaccaatcagcactctgtgtctagctaaaggattgtaaacacactgatcagcactctttgtctagctcamggtttgtaaatgtaccaatcagtgctctgtgtctagctaatctagtggggacttccagaacttttgtgtctagctaaaggattgtaaatgcaccaatcag

SEQ ID NO: 45723 - DNA, 201 bp, Homo sapiens
gtattcctaggtattttattctttttgtggcaattgtgaatgagattgccttgctgatttgggtctcggtttggctattgtgggtgtataggaatgctagygatttttgtacattgattttatatactgcaactttgccgaaggtatcagctggaggagattttgggctgacactttggggttttctagatatagaatcat

SEQ ID NO: 45724 - DNA, 201 bp, Homo sapiens
gccaacatattgtgaactagaaaaataagctgaattatttcatacaagatatttcatgaaagccttggcttttcagtttaagcagatactaaaattacctrgggaattattttgcaagtaagtaggttgaaggaaaaacaaaaggcagtggaacgaagtccaggaaactgaataaagaagtcaaagattcattcacttatt

SEQ ID NO: 45725 - DNA, 201 bp, Homo sapiens
tctatcattctgtaggttgtcttgtcactctgttaattgttttctttgctgtgcaaaacctttttagtttgatataatcccatgtgtttatttttgctttygttgcctgtgcttttgaggtgttagccatcaaatctttgccaaaatcaatgtcctgaagccccgtgttttcttctactagttttatagttttggatttta

SEQ ID NO: 45726 - DNA, 201 bp, Homo sapiens
aactgcctggagtttaaatcctggttccaccacttagtagttgtattatgttaggcaagttgcttaaactctctgtaagtgtttcctcatttgcaaaatgrggatgataaatctcccactgaggattaaatgctccaatgcaagttaagctcttggaaccctggcacaaagtaaatacttaatagttattatcttattatt

SEQ ID NO: 45727 - DNA, 201 bp, Homo sapiens
ttttttgaaattttctgcttttctgttctggtttctccccatctttgtggttttatctacctttggtctttgacattggtgacctgcagatggggttttaytggggatgtcctttttgttgatgttgatgctattcctttctgtttgttagttttccttgtaacagtcaggcccctcagctgcaggtctgttggagtttgc

SEQ ID NO: 45728 - DNA, 201 bp, Homo sapiens
ttttgaaattttctgcttttctgttctggtttctccccatctttgtggttttatctacctttggtctttgacattggtgacctgcagatggggttttattrgggatgtcctttttgttgatgttgatgctattcctttctgtttgttagttttccttgtaacagtcaggcccctcagctgcaggtctgttggagtttgctg

SEQ ID NO: 45729 - DNA, 201 bp, Homo sapiens
tttgggaggccgaggcgggtggatcacgaggtcaataaatcgtgaccatcctggccaacatggtgaaaccccatctctactaaaaatacaaaaattagccrggcatggtggcgcgcgcctgcagtcccagctcttcggggggctaagactggagaatcgcttgaacccgagaagcggaggttgcagtgagccgagactgca

SEQ ID NO: 45730 - DNA, 201 bp, Homo sapiens
ttctatgttggaagaccatttaactcagattatttggctttgtgtgtgaacaccagtgcattatcttgagtaatgttggaactgagttcatataaactgtytcttatgttgttttcatcctgtttccttccttttagagactccaagagtagaaacatccatgggtactggaattgggtaattagaatgatttggaaaaac

SEQ ID NO: 45731 - DNA, 201 bp, Homo sapiens
aggtctgaagtggagtctaaaaatttttatttctaacaaattcctaggtaatgctgatgctgctggcctggacatgacacttcgagaaccattaatctaargcaatagctaactgatgatgtagttctaagaatgaaatacatgtgcagccttccaatgtactgtcttacatatataggcagaaaaattctgccttatgtc

SEQ ID NO: 45732 - DNA, 201 bp, Homo sapiens
cataaataataactttgaaggtaaatggattaaattttgctcttaaaagatatagcttggtgactcagacctttaatctcagcactttgggaggctgaggygggcagatcgcgaggtcaggagttcaagaccagtctggccaacatggtgaaaccctgtctctgctaaaaatacgaaaatgaaccaggcatggtggcacat

SEQ ID NO: 45733 - DNA, 201 bp, Homo sapiens
ttggaacaaatatgatgattaaagttcagtcttcacttccccttatctgaggtcttcatgccagtggatcccttaggtggggggttccctgtgggggtccragtttctgaaagacaactcagtgacattaagatgttaccataagtttctatgcagaaagcaagcatctctggaactctaacttccttggctgttgtttta

SEQ ID NO: 45734 - DNA, 201 bp, Homo sapiens
aatgattaccacagtcaaatgaattaacacatccatctctacccatagttaccactgtgtgtgtgtgtgtgtgtgtgtgtgtgtgtgtgtgtgtggctaasacacttaaaatctactttcttatcaaatttcaagtaaagaatacaatatgttaactatagtcaccatgctacacagtagagtcccaaaacttattcatct

SEQ ID NO: 45735 - DNA, 201 bp, Homo sapiens
tttatcaattacctggtcacaggtatgtctttatagaggtgtaagaatggactaatataccagatatctacaccaggatagtgatagaaagaaaggctttmattgcagggtgccaagcaaggaggaccaggcagctaaatgctcaaatcctgatctccttgatggcttgcacacaaggttgtctaaaggcaagggtaaatg

SEQ ID NO: 45736 - DNA, 201 bp, Homo sapiens
ttgtgctagagtggggattttcctataaaacctcttttctcttctgttcattcctgcatttccaaattttgaagtctctgaattatgactcacttgtgctyccaaaccagcgtatctgccgtgtattccagttttgtctggcttcagcttattgctggtggatggtgactgctgctggtggtactctgggaaactggaaat

SEQ ID NO: 45737 - DNA, 201 bp, Homo sapiens
cttgcttctccttcaccttccgccatgattttaagtttcttgaggcctccccagccatgtggcactgtgagtcaattacaattcttctttatcaattaccyggtcacaggtatgtctttatagaggtgtaagaatggactaatataccagatatctacaccaggatagtgatagaaagaaaggctttaattgcagggtgcc

SEQ ID NO: 45738 - DNA, 201 bp, Homo sapiens
acatctggaaaaaaaaatctgaggttctacagtagtgatgttatctgtaggagcaattgagaaggtcacaaatcttgactcctgaccacataactcctgaycagtaagcgattttagaaattacatctatcttgtggcctctcagtcttacaaagacagtttcagtctccaaacaaggaggagttagttttagggaaggaa

SEQ ID NO: 45739 - DNA, 201 bp, Homo sapiens
atcttttggcttccctgggccacagtggaagaagaagtgttgggccacacataaaatacactaatactaatgatagactatgtgaaaaaaaaaacccacargaaaaacctcataatgttttaagaaagtttacaaatttgtgttgaactacaccacattcaaagctgtcctgggccacagggctgcaggtcggagaagtct

SEQ ID NO: 45740 - DNA, 201 bp, Homo sapiens
cactccagcctgggtgacagagcgagactctgtctcaaaaaaaaaaaatatgtaaaagttgtgaaagtgggcttttagcttcaaataaatatatgtctcayatcaaagccacagctaattaaagaactaagaaagaaaaggaatattcaaatatctggagtaatctaacaaacagcagtgttcagagtttttaaattatta

SEQ ID NO: 45741 - DNA, 201 bp, Homo sapiens
cgagttaatggatgcagcacaccaacatggcacaagtatacatatgtaacaaacttttaccttgtgcacatgtaccctaaaacttacagtataataaaaaraagaaatatgtgcttacttctttttcatatttcacaactgaccagtgaattgcctgttctatattttattttttgagcttggaatcatgtcccatttaac

SEQ ID NO: 45742 - DNA, 201 bp, Homo sapiens
tacatctaagactagtcatacaaatgcttttctcccattaatcttaaatttggaaagaaaaaagagacaaactgatttttctcgtctgcttgaccagattmtgcagagagagagactgggagtctgactggtaagaatttcttatcattctgttcacctatcaggtcctgtgttcctttgactgcagcttctagaggagca

SEQ ID NO: 45743 - DNA, 201 bp, Homo sapiens
aatcgcttgaacccaagagtcagaggtgatagtgagccaagatcatgccactgcactccagcctgggtgacagagcgagactctgtctcaaaaaaaaaaaatatgtaaaagttgtgaaagtgggcttttagcttcaaataaatatatgtctcatatcaaagccacagctaattaaagaactaagaaagaaaaggaatattc

SEQ ID NO: 45744 - DNA, 201 bp, Homo sapiens
attaacaaaatcgctttttatcgttcgtctagaattcaaaaagggagattatattggtctcttttttttcaaaattgtgatattttcttccctgaaaaaartagatccctccaaaaatgcagtgttgttcttgaaataaagaacaaaatttttaaaaatctggtgcatttagatgtatgtttctactcattttttggacct

SEQ ID NO: 45745 - DNA, 201 bp, Homo sapiens
tatatgtacagtagtgaaagctctacaaattaaataaattaaggcttaataaatgtggtttttcagatgagttttttcttttaggaaacagtttgcattckcaatcttgatttgcaagataccatatttcgttaatttaaacacattttcccacattgtccacctcacattttttaccatttctgaaattaggatgcatcg

SEQ ID NO: 45746 - DNA, 201 bp, Homo sapiens
cctttaatcccagctactcagaaggctgaggcaggagaatcgcttgaacccaagagtcagaggtgatagtgagccaagatcatgccactgcactccagccygggtgacagagcgagactctgtctcaaaaaaaaaaaatatgtaaaagttgtgaaagtgggcttttagcttcaaataaatatatgtctcatatcaaagcca

SEQ ID NO: 45747 - DNA, 201 bp, Homo sapiens
ttacagtccaattacttgagcttcatgacttacagggtattatataaagtaaataaagtttctttgaaattaatttttcagtctgaaaacactagaaactwttcaagtatatttgatataactctatttctgtgagaaaaaaaagtattaaatttttctcgtccagctatgtgtgatgcacattcactcattcgcccattg

SEQ ID NO: 45748 - DNA, 201 bp, Homo sapiens
attctaccaaagttttgttccaaggtcaaggctgatcttttttatctttttgatctgattatttaacagccatccttaaatgtatttagttacttataaarctttcctgaatagatttactgcaacattttgtaattagagcattcatgttagaaagtccttttaaaaatatagatgtatttgtctggatgtttattgctt

SEQ ID NO: 45749 - DNA, 201 bp, Homo sapiens
tgtgatgcacattcactcattcgcccattgttcaactgttcgttcattctttcattttattttgacatacgatagtacttttgtagtaggttttttttttyccctgaaacatgttcaagccctagggtttctaatggcagagctgaagactggtgtaccaggcagtgccgcatgttatactccattatagactgtgacagt

SEQ ID NO: 45750 - DNA, 201 bp, Homo sapiens
ggtcaggagtggggggcaatcagtatttagaattgcctcatctcaaggactgaggatcagaggtagactctattccacagaaacagttgtgcatgataaargcgtggggccaaggcacagaagcttaggtttgctagtaccagggcctaacatcagggtgggactagcatactctttatttggtactgggttgcaaagttc

SEQ ID NO: 45751 - DNA, 201 bp, Homo sapiens
tttttccctgaaacatgttcaagccctagggtttctaatggcagagctgaagactggtgtaccaggcagtgccgcatgttatactccattatagactgtgrcagttaattttatgcgttcatttgagtaggccacagggtgcccaggagaaacattgttttggggtgttacactgtaagggtgcttctggctgagatttgc

SEQ ID NO: 45752 - DNA, 201 bp, Homo sapiens
cagtttttctagaagctttgccaagcaggacatcataacgaacacatgcttaaggtccatagattgtgcacatttaatttatgtcattttttatattaaattttttttttttttgagatggagtcttgctctatcacccaggctggagtgcagtggcgcgatctctgctcactgcaacttccgcctcccagattcaagcaa

SEQ ID NO: 45753 - DNA, 201 bp, Homo sapiens
gatatttctttcagttttttcacacttgctgtttcatctgctagaaggctcttgccttcatatgttcctaactacatacccttcacttttacccagtaacttttttttttttttttgggtaaacattgctttctctgaagcatcttctctgatctatataactagactaagccttttatatgcagttttccctacttggtg

SEQ ID NO: 45754 - DNA, 201 bp, Homo sapiens
ccggaggcagaggttgcagtgagccgagatcgtgacattgcactccagcctgggcaacaagagtgaaactccatctcaaaaaaaaaaaattatatttatatgtgtgtgtgtgtgtatatatatatatatatatatatatatatatgtatatatgtgtgtgtgtgtatgtgtatgaatttatccctctttttcctgcttcac

SEQ ID NO: 45755 - DNA, 201 bp, Homo sapiens
cggaggcagaggttgcagtgagccgagatcgtgacattgcactccagcctgggcaacaagagtgaaactccatctcaaaaaaaaaaaattatatttatatgtgtgtgtgtgtgtatatatatatatatatatatatatatatatgtatatatgtgtgtgtgtgtatgtgtatgaatttatccctctttttcctgcttcact

SEQ ID NO: 45756 - DNA, 201 bp, Homo sapiens
ttacttgaagtattcattcaatcaagctaaaaatattctaagtttagtattgttttgtttttctgtctcagtttggacactaatactgtggtttgcccaayatggaatattcagaatctgagagctctatgaatatttgttgtttgggcttaactaaattagaactcttgtggagtaccatatttagagttctcctttaga

SEQ ID NO: 45757 - DNA, 201 bp, Homo sapiens
cagcactccatatctagctaatctggtggggacttggagaacttttatgtctagctagaggattttaaatgcaccaatcagcactctgtgtctagctaaasgattgtaaacacactgatcagcactctttgtctagctcacggtttgtaaatgtaccaatcagtgctctgtgtctagctaatctagtggggacttccagaa

SEQ ID NO: 45758 - DNA, 201 bp, Homo sapiens
ggaggcagaggttgcagtgagccgagatcgtgacattgcactccagcctgggcaacaagagtgaaactccatctcaaaaaaaaaaaattatatttatatgtgtgtgtgtgtgtatatatatatatatatatatatatatatatgtatatatgtgtgtgtgtgtatgtgtatgaatttatccctctttttcctgcttcactg

SEQ ID NO: 45759 - DNA, 201 bp, Homo sapiens
gctatttacaaatacctcgttatttttaatgtaaattctttgcaaagtattattataagtaccgacagcaataattcacattttaaataacaaagaataaygacaaacacaaatcccctgatagtagttacaatttcctccagtttggcaatcctcctataagacatgaggatgtggattgctcttcagtatcactgattc

SEQ ID NO: 45760 - DNA, 201 bp, Homo sapiens
caacccccctccccacgcaaggcccgagcctccccgatgggcgctgcccccttctctgcggcgcccagtcccattgaccccccaagggctgaggagtgcggcacttggtgtgggactggcaggcagctcagcccagggatcctgcacgtgatccactagaggaagccagctgggctcctgagtcaggtggggacttggaga

SEQ ID NO: 45761 - DNA, 201 bp, Homo sapiens
gataaattcagcctcttaagttcctaatttagtaggtttgatatagtcagtctaagtattaacagcattttagcacctacaattcttatattcgatgtttyggggtgtgcaaacaatatgtagaccagacgttctgtctttaagtcatgtccgtgacaaatagagatcacagacgtttacaaaagtgacgattactctaag

SEQ ID NO: 45762 - DNA, 201 bp, Homo sapiens
tagttttctgttaaaattaagatatgagcactctattcaagtttcattttagcaatagaacaaaataaggatgtccacatctcaatcacttttctcaacaytgcttagaagagaaaataacctaagttcacagcaagtttttgagatcatgaacagagatagcatatgatagacattttttaccagagccaagctccagga

SEQ ID NO: 45763 - DNA, 201 bp, Homo sapiens
aaaaaacaatcaacactgtatagattactagagggtgaagtgggctgggtgggttaaaaagctacctatcaggcactatgctcactaccagggtgacgagrtccatgctccaaacctcaacatcatgcaatattcccacataacaaatctgcacatgaaccccctgtatctaaaataaaagttgaaattaaaaataaattt

SEQ ID NO: 45764 - DNA, 201 bp, Homo sapiens
tcttaagttcctaatttagtaggtttgatatagtcagtctaagtattaacagcattttagcacctacaattcttatattcgatgtttcggggtgtgcaaamaatatgtagaccagacgttctgtctttaagtcatgtccgtgacaaatagagatcacagacgtttacaaaagtgacgattactctaagtgggcagagaaca

SEQ ID NO: 45765 - DNA, 201 bp, Homo sapiens
ttaaggtatgttcaaattcagtctttaagagtaaaatgtgaaagcggatgtatggatgtttgagtttgtctatgttgctgaacagtatgaatgtgggtttmcttcagagctgttgccagaaaggagcagtaattacacttgaaattactgttgaaattgggcttaaaacttaatagaaaaagaaacctttatgtctgagca

SEQ ID NO: 45766 - DNA, 201 bp, Homo sapiens
ttgtgactttcataacacttgagacccatttcattccttccctgatgtgagcagaagacaggctctaggtataacttccagatatttaattatatcttctrtgatcacctaggatgcatttccttaaaagttgcagaaaaattatggggtaaaaggcaaaacataactcttccttgaataaataatacaaaccagtatatt

SEQ ID NO: 45767 - DNA, 201 bp, Homo sapiens
ttaagttcctaatttagtaggtttgatatagtcagtctaagtattaacagcattttagcacctacaattcttatattcgatgtttcggggtgtgcaaacamtatgtagaccagacgttctgtctttaagtcatgtccgtgacaaatagagatcacagacgtttacaaaagtgacgattactctaagtgggcagagaacaga

SEQ ID NO: 45768 - DNA, 201 bp, Homo sapiens
agttgatcatatatacatgggttcatttttggactgtctattccattccattggtctttgtgtacgtttttatgccagtaccacactgttttgattactayagctttgtagtatattttgaaattggagaatgtgatacctctgattgtgttattttggctcaagattgctttggctattcagcatcttttgtgcttgcat

SEQ ID NO: 45769 - DNA, 201 bp, Homo sapiens
aagttttctctttatgagagttagatattagattagatattatttttttcataaattatggccccgttttttgctctccctcttaggtaaattctgtccaygcggaatcttgactgtgaacttaaacagttcccacattttgtgactttcataacacttgagacccatttcattccttccctgatgtgagcagaagacagg

SEQ ID NO: 45770 - DNA, 201 bp, Homo sapiens
gtcagtctaagtattaacagcattttagcacctacaattcttatattcgatgtttcggggtgtgcaaacaatatgtagaccagacgttctgtctttaagtmatgtccgtgacaaatagagatcacagacgtttacaaaagtgacgattactctaagtgggcagagaacagagatacttatgagctgtgggtggttaagcaa

SEQ ID NO: 45771 - DNA, 201 bp, Homo sapiens
tgaacagtttttcatatacatgttggccagtgtgcatgacttctttggagaaatgtttattcagatattttgcctatttttttaattgggttatttgggtwtttttctattgaggagtttcacatacatttttggtattaactccttatcagatatatggtttacaatattttcttccattccataggttgtctcttcact

SEQ ID NO: 45772 - DNA, 201 bp, Homo sapiens
ccagacgttctgtctttaagtcatgtccgtgacaaatagagatcacagacgtttacaaaagtgacgattactctaagtgggcagagaacagagatacttakgagctgtgggtggttaagcaaaagatcaagaaagagtcagtgatcaagaaagagtcagtgatcaaccatgaataaaattcagatcatcggccggatgcag

SEQ ID NO: 45773 - DNA, 201 bp, Homo sapiens
ttaaactagattgtgttgcatatcataggcaatctactgaaagatttcaaagaaaaaaatctcattcttttacatagccaagaagatacaatctattacaygcatgttttaagataaacaataactagtcctcaagcaagacaacttcccagcaccacttgccacatatagcttacgctagattcacctggtaattggagt

SEQ ID NO: 45774 - DNA, 201 bp, Homo sapiens
tgatcaagaaagagtcagtgatcaaccatgaataaaattcagatcatcggccggatgcagtggctcacgtgtgtaatcccagcaatttgggaggccaaggmgggcggatcatgaggtcaggagatcgagaccatcctggctaacacggtgaaaccccatctctactaaaaatacaaaaaaaattagctgggtatggtggca

SEQ ID NO: 45775 - DNA, 201 bp, Homo sapiens
gacattcaaagaagaaaggcggccgggcgtggtggctcacgcctgtaatcccagcactttggtggagacagaggcgggcagatcacgaggtcaggagatgsagagcatcctggctaacaaggtgaaaccctatctctactaaaaaatacaaaaaattagctgggcgtggtggcgggcgcctgtactgtagtcccacctact

SEQ ID NO: 45776 - DNA, 201 bp, Homo sapiens
cccacgtgtgtacctctgaacttaaagttaaaaaaaaaaaaaagaaagttggaggctaggcacagtggctcatgcctataatcctagcactttgggagtcygaggatggcagattgcttgagcccaggagtttgagaccagcgtgggcaacatggcaagactcagtctctacaaaaaatacaaaaattagccaggcatggt

SEQ ID NO: 45777 - DNA, 201 bp, Homo sapiens
gcttagcagcaaattcatagctttaaatgcttatataagaaaaggagaacaatctaaaactaaagtcctaagatttcaccttaacaaggtgaaagtaagtkagcaagtaagcaggtaaaagaaaacagtgaagacaaaagtagaaatcaatgaaatagaaaacagatgagaaagggaacagctcactttgaagagaccaac

SEQ ID NO: 45778 - DNA, 201 bp, Homo sapiens
gtagatatctaagaaaacacccaatatctataaattaaacagcacacttctaaataattcatgaattaaaacaaaattacaagataattagaaaatgtttyaaactgaatgacatggaaaatataaaatattacaatttgtaggaaaagctaaggtaatgcttagcagcaaattcatagctttaaatgcttatataagaaa

SEQ ID NO: 45779 - DNA, 201 bp, Homo sapiens
acctctactcagagaaaaacttcaaattttcttatttgagctctttgcatgaaagtgcaagagtatgaagtgtggggacatatggattatcttttaaaagytttaacaatgacaattttggcaggaaacagctttacaattgtcagaagaatattttttcttactcttgggaaggggctacattgcaaaaaacaaaaacaa

SEQ ID NO: 45780 - DNA, 201 bp, Homo sapiens
catgacacttcgagaaccattaatctaaagcaatagctaactgatgatgtagttctaagaatgaaatacatgtgcagccttccaatgtactgtcttacatrtataggcagaaaaattctgccttatgtcaagtcttgtgggcagaaacaatttaacttagtgttttcagatgtatgccaatttatatattaggtcctttca

SEQ ID NO: 45781 - DNA, 201 bp, Homo sapiens
gcagctcaggctgctgttccaggcaagcaagtgcttcaatgcctggagatatgcctgggtatggattggaaagggccttgctgcaccatgatctttgtgcwggaagggtggggtagctcaggctggaggagtgggtgctccgactgcctggagatctgtctgggagtggggtggagagggacccactgcaccactctctct

SEQ ID NO: 45782 - DNA, 201 bp, Homo sapiens
cccacaagaacatgacaacttatgtaaaagaattgtagttttactaagaggagcctgagctctagagtgggtggtgaagagtggggaggcagtgggggagkgggtggtggttatgtgttactgtagggaggagaagtaggtgccaaatgttttctgtttaatatttgtgagggaatggcaacccttaggcaaattttggaa

SEQ ID NO: 45783 - DNA, 201 bp, Homo sapiens
taataatagaggaggaaactgtgtggtcctgatttatggatgaatctttatggcatactgagaccagctgtaattggataggtgctgcactaaaaccccayatggggatgaccctgaaagccagtgggaaagagaaatcttcacaatataaagaatcctacagccttctaccagggtgactttacacgggagaaaaggaaa

SEQ ID NO: 45784 - DNA, 201 bp, Homo sapiens
atattacagttgtcttctttccattttatttcactctagccaagactcaattgtataaaatcagctatgataatattgtatggcaaacttcccttgcctcsttttcctttacttaaatcttcttgtgatgatttagattttttttttcagttaacatctggtttcaatccttcacattattcctgactatattatactaat

SEQ ID NO: 45785 - DNA, 201 bp, Homo sapiens
tgtgggcctttctgctaacacttgcagggctgtgtctactcagagagtggcacagttttcttttttttcttgtcttgtcttttttttttttttttttttttgagatggaatttcactgttgttgcccaggctggagtgcaatggcgtgatctcagctcactgcaacctccgcctcccaggttcaagtgattctcctgcctc

SEQ ID NO: 45786 - DNA, 201 bp, Homo sapiens
agccctccctctgctgggcaaactgtgggcctttctgctaacacttgcagggctgtgtctactcagagagtggcacagttttcttttttttcttgtcttgwcttttttttttttttttttttttgagatggaatttcactgttgttgcccaggctggagtgcaatggcgtgatctcagctcactgcaacctccgcctccca

SEQ ID NO: 45787 - DNA, 201 bp, Homo sapiens
actattttatgaaagctccaattttaaatgtctacttttccgagtatattagcaggcatttcagatttagataaaaatgtggttctcttacacatttttttctttcacaactcaggcagattcaattgagcagaggctcgagtctgctgtttattagtggttttaaaaatagcactaaaacagattctcatgtgccaatac

SEQ ID NO: 45788 - DNA, 201 bp, Homo sapiens
ggggactattgcctatataaaatatattgaaaattcagatacagcatatagtgtatggaggcatttttgctaaaagtaaaaaggagtattttaagtaagtagtatctattcactgcttattcaatctctccctacccctaagcgttatccttaattttttttaatctacaaatagaattgaggctaataaggcctttagat

SEQ ID NO: 45789 - DNA, 201 bp, Homo sapiens
gggggactattgcctatataaaatatattgaaaattcagatacagcatatagtgtatggaggcatttttgctaaaagtaaaaaggagtattttaagtaagtagtatctattcactgcttattcaatctctccctacccctaagcgttatccttaattttttttaatctacaaatagaattgaggctaataaggcctttaga

SEQ ID NO: 45790 - DNA, 201 bp, Homo sapiens
gtgactggtatttaatttttaccccaaacaatgagacaaaatgactattgacttagagagagttctgacaaatgaggtggatacagcctaatcaatcttaractgaatataagtatttaatttgctgatgagctatatttaaatcatattttggttgctataaaatcttcagccctgcaaatctaatcactatctttgatg

SEQ ID NO: 45791 - DNA, 201 bp, Homo sapiens
atctaattttgaagctatggtatccaagaaaaatggaaacctcatatttccatcaagggctcatgtgtagccagggtttttaccaagtttacaacatgccrtcacacttaattctgaggacatgtgcctagtttggccaactaaaacatatacagttccttctacttttccataaatgtaagcattttcaggaagagaaac

SEQ ID NO: 45792 - DNA, 201 bp, Homo sapiens
ggggggactattgcctatataaaatatattgaaaattcagatacagcatatagtgtatggaggcatttttgctaaaagtaaaaaggagtattttaagtaagtagtatctattcactgcttattcaatctctccctacccctaagcgttatccttaattttttttaatctacaaatagaattgaggctaataaggcctttag

SEQ ID NO: 45793 - DNA, 201 bp, Homo sapiens
tgtaaaccagggagacagaacttgcagtgagccgagatcatgccactgcactccagcctgggccacagagtgagactctgtctcaaaaaaaaaaaaaaaaatagtatttggctctctgatttcccttctactactttttaagctatctttctgtgcagctcacatttgttccaccaacctatttaataccttggcctctca

SEQ ID NO: 45794 - DNA, 201 bp, Homo sapiens
aggggggactattgcctatataaaatatattgaaaattcagatacagcatatagtgtatggaggcatttttgctaaaagtaaaaaggagtattttaagtaagtagtatctattcactgcttattcaatctctccctacccctaagcgttatccttaattttttttaatctacaaatagaattgaggctaataaggccttta

SEQ ID NO: 45795 - DNA, 201 bp, Homo sapiens
gtgtaaaccagggagacagaacttgcagtgagccgagatcatgccactgcactccagcctgggccacagagtgagactctgtctcaaaaaaaaaaaaaaaaatagtatttggctctctgatttcccttctactactttttaagctatctttctgtgcagctcacatttgttccaccaacctatttaataccttggcctctc

SEQ ID NO: 45796 - DNA, 201 bp, Homo sapiens
attcagagacatttcagaacactgtttgaaaatatagtaattctctaacaatgtaaaacagtttttctttgtgagtgtgaaaattaactatgtaaccttctagtgcagggctttttaaacttgaatgtgatacacatcatctgagaatcttttaaaaatgtaggttcttatccagtaaatccggagtggtacctgagattc

SEQ ID NO: 45797 - DNA, 201 bp, Homo sapiens
cctattgtgaacagcgcatgtgaaggacctagtttgtgtgctctttatgagactctaacgcctgatgatttgaagtggaatggtttcatcctgaaaccatycccattccccccatccaccatctgtggaaaaattatattccatgaaaccggtttctggtgccaaaatggttggggacaactgttctaagccacacaagtg

SEQ ID NO: 45798 - DNA, 201 bp, Homo sapiens
tattcagagacatttcagaacactgtttgaaaatatagtaattctctaacaatgtaaaacagtttttctttgtgagtgtgaaaattaactatgtaaccttctagtgcagggctttttaaacttgaatgtgatacacatcatctgagaatcttttaaaaatgtaggttcttatccagtaaatccggagtggtacctgagatt

SEQ ID NO: 45799 - DNA, 201 bp, Homo sapiens
ttatttttattaggttattctaggtgccttgaacctcatagaaattttagaattagcttgttaatttttacaaaaaagtccactgagattttggttaggastagattagatctatggatcaatttgtgctgaactgacattttaacagtgatgagtcttctgattaaaaacatggtatatatctctacatttattgtggat

SEQ ID NO: 45800 - DNA, 201 bp, Homo sapiens
atattcagagacatttcagaacactgtttgaaaatatagtaattctctaacaatgtaaaacagtttttctttgtgagtgtgaaaattaactatgtaaccttctagtgcagggctttttaaacttgaatgtgatacacatcatctgagaatcttttaaaaatgtaggttcttatccagtaaatccggagtggtacctgagat

SEQ ID NO: 45801 - DNA, 201 bp, Homo sapiens
tcttggtctctccagtgtagcagggccagagaacaaagctgtgggcttggtcccagcccccacagggttagagcatgcagcacagaagtgatgagctgagycttgaccttctgaaatcatccagaaatgaagccagttgaccaaatccaacttataccacagtcaaaccaccaagggcatcaaagaatataaaagcaaaaa

SEQ ID NO: 45802 - DNA, 201 bp, Homo sapiens
ttgaatatctattacatatattaaagatatgtacatatgtgcatatgtttctatatatttacaatattatatataaatatatgtattatatgtaatgttgmaactatatatgtatagtatgtattatatatataacatgtcaatgattgatttcttttgttttaaatgatcatttggaaaagagttatcttacagctgggc

SEQ ID NO: 45803 - DNA, 201 bp, Homo sapiens
tttttttaaaaaaaaaaattctctatttttcatggattttagaaattttaactatagtataccatgaagaagaactttttgtattgtgtctgtttggtgaytgctgggactctgtatctggatgtttaaatctcttgctagatttgggaaattttcctctattaattcattaaataggtttttaaactctttctctctttg

SEQ ID NO: 45804 - DNA, 201 bp, Homo sapiens
tacttcattgcagtgctttacacaatatatggtataccgcagatgcctaataaacatttgtttaattaaatctgttttactcaaataaacttgtatatgawttttacaggagtaacgtccaaagtgatcaagggcaaaatttactctgtttatgtttcagagatgcccaacataggctttagagcaaagccagatgtatgt

SEQ ID NO: 45805 - DNA, 201 bp, Homo sapiens
gaggcagaggttgcagtgagccgagatcgtgacattgcactccagcctgggcaacaagagtgaaactccatctcaaaaaaaaaaaattatatttatatgtgtgtgtgtgtgtatatatatatatatatatatatatatatatgtatatatgtgtgtgtgtgtatgtgtatgaatttatccctctttttcctgcttcactgc

SEQ ID NO: 45806 - DNA, 201 bp, Homo sapiens
cccattctctcctggcctataaggtttctactgataaattttctcttgttctgatggaggtttcttataggtgactagatgcttttctcttgcttttttttaaaaaaaaaaattctctatttttcatggattttagaaattttaactatagtataccatgaagaagaactttttgtattgtgtctgtttggtgactgctgg

SEQ ID NO: 45807 - DNA, 201 bp, Homo sapiens
atgccatgtcaatcagagtacagtttgattataattaaatgaaacattagccctatacagtgctcttttctaatcatgtttgttcctatcctttccactayagttatctcaatatggtgaaatgaattataattaaatgaaaaattagccctatacagtgttttcttttaatttgttgtttcctatctttttcattatatt

SEQ ID NO: 45808 - DNA, 201 bp, Homo sapiens
acagctgaactgagactagattctacctctgtgagttaccagttttttgctttttgtttttaaccatagataagctacttaatctttctgaaacttcttcttttttttttttttttttttgagacagactgtcactctgtcccccaggatggagtgcagtgcagtggtgcgatctcagctcggttcaaactctgcctcctg

SEQ ID NO: 45809 - DNA, 201 bp, Homo sapiens
gtatttctgttgtatcagttgtaatgtctcctttttatttctgagtttatttgggtcttctcttttctttgttagtctagctcgtagttttttttttttttaatgttttcaattttgtttatactttcaaaaaactagtgttacatttcattcatgctttttattgtttttctagtttctgattcatttagttctgctctg

SEQ ID NO: 45810 - DNA, 201 bp, Homo sapiens
cagctgaactgagactagattctacctctgtgagttaccagttttttgctttttgtttttaaccatagataagctacttaatctttctgaaacttcttcttttttttttttttttttttgagacagactgtcactctgtcccccaggatggagtgcagtgcagtggtgcgatctcagctcggttcaaactctgcctcctgg

SEQ ID NO: 45811 - DNA, 201 bp, Homo sapiens
tgtatttctgttgtatcagttgtaatgtctcctttttatttctgagtttatttgggtcttctcttttctttgttagtctagctcgtagttttttttttttttaatgttttcaattttgtttatactttcaaaaaactagtgttacatttcattcatgctttttattgtttttctagtttctgattcatttagttctgctct

SEQ ID NO: 45812 - DNA, 201 bp, Homo sapiens
aaacctaagaataatcagtgttcctgaggaagaagagaattccaaaaattcggaaaacatatttgggggaataattgaggaaaacttcccctgtgttgctrgagacctagacatccaaatacaagaagcacaaagaacacctgagaaattcatcgtaaaaagatcattgcctaggcacattgtcatcaggctatacaaagt

SEQ ID NO: 45813 - DNA, 201 bp, Homo sapiens
tttgacactaattcacaagacagagaaagaaggaatcctccctaattcattctatgaagccagcatcatgctaataccaaaaccaggaaagaacataaccaaaaaaaaaaaaaaaaacagaaaacaaaaaactaaagaccaatatctttgatgaacatagatgctaaaatccttaacaaaatactagctaaccgaacccaa

SEQ ID NO: 45814 - DNA, 201 bp, Homo sapiens
atcaatattgtgaaaatgaccatactgccaaaacaatctacaaattcaatgcaatttccattaaattaccaccatcattcttcacagaattagaaaaaacmattctaaaattcatatggaaccaaaaaagagcctgcatagccaaagcaagactaagcaaaaagaacaaatctggaggcttcacattacctgacttcaaac

SEQ ID NO: 45815 - DNA, 201 bp, Homo sapiens
aagcaagactaagcaaaaagaacaaatctggaggcttcacattacctgacttcaaactatcctataaggccatagtcaccaaaacagcatggtactagtayaaaaataggcacataggccaatggaacagaatagagaacccagaaataaacccaaatacagccaactgatctttgacaaaacaaacaaaaacataaagtg

SEQ ID NO: 45816 - DNA, 201 bp, Homo sapiens
atgcatgtttatagcaacacaattcacaacttcaaaattgtggaaccaacacaaatgcccatcactcaatgaatggataaagaaagtgtgattatctatctatctatctatctatctatctatctatctatctacatatctatctatctatcatctgtctatctatctatctatctatcatctatctatctatctacctac

SEQ ID NO: 45817 - DNA, 201 bp, Homo sapiens
accaatcattttcttttatggccaaaggattaagatgatgcaaagatagtaccttccgagctcatgggctttcatatacctcactatgataacaaaattgrataaacataaaggaggccgtataggatatgaaagcaaatcatgtgtatctctgtgagaaaatgaattattcttcagatgattagaaccaaacagcccatt

SEQ ID NO: 45818 - DNA, 201 bp, Homo sapiens
tgcatgtttatagcaacacaattcacaacttcaaaattgtggaaccaacacaaatgcccatcactcaatgaatggataaagaaagtgtgattatctatctatctatctatctatctatctatctatctatctacatatctatctatctatcatctgtctatctatctatctatctatcatctatctatctatctacctacc

SEQ ID NO: 45819 - DNA, 201 bp, Homo sapiens
aatttacatttctgtcattatactttaatttcaattgtaatttctatttttgacacccagaaatctatgatgattttaatgaaaatatcttatgaaaatamtactgtcatattttaccttaaaacttaatattttagatgagaatagaagcacatctcttttatgatatgttgcctgtataaagaaggaaaaatagggact

SEQ ID NO: 45820 - DNA, 201 bp, Homo sapiens
gcatgtttatagcaacacaattcacaacttcaaaattgtggaaccaacacaaatgcccatcactcaatgaatggataaagaaagtgtgattatctatctatctatctatctatctatctatctatctatctacatatctatctatctatcatctgtctatctatctatctatctatcatctatctatctatctacctacct

SEQ ID NO: 45821 - DNA, 201 bp, Homo sapiens
tgttttctgtttacatgatagatcttttcccaactcattacttggtagcctatgggtgtcattatgtgtgtgtgagcgataggtcttgtttttttttttttaattcaacttgccaatttgtgccttttaagtgggggtgtttagactgtttacattcaaggttaatattgatatatgaggttttgatcctatcaaagttgt

SEQ ID NO: 45822 - DNA, 201 bp, Homo sapiens
tgcagatgacatgattgtatatgtagaaaccccattgtctcagcccaaaatatccttaagctgataagcaacttcagcaaaatctcaggatacaaaatcartgtacaaaaatcgcaagcattcttatacaccaataacagacaaacagagagccaaatcatgagtgaactcccattcacaattgcttcaaagagaataaaa

SEQ ID NO: 45823 - DNA, 201 bp, Homo sapiens
aacttaaattagaaaacagatgctataaatcattgtttgtgcattaaattcccgtgatctgagtgaaagcacatagaggtttatttgctaaatatttaacrtatatatttagtatcatacttgctaaattgctgcatattttcatatatatgtacatataatttcatatctaacatattacatgttatatggtacatatat

SEQ ID NO: 45824 - DNA, 201 bp, Homo sapiens
aaataaagggtattcaattaggaaaagaggaagtcaaattgtccctgtttgcagatgacatgattgtatatgtagaaaccccattgtctcagcccaaaatmtccttaagctgataagcaacttcagcaaaatctcaggatacaaaatcaatgtacaaaaatcgcaagcattcttatacaccaataacagacaaacagagag

SEQ ID NO: 45825 - DNA, 201 bp, Homo sapiens
cactgacttccacagtggttgaactagtttacagtcccaccaacagtgtaaaagtgttcctatttctccacatcctctccagcacctgttgtgtcctgacyttttaatgattgccattctaactggtgtgagatggtatctcattgtggttttgatttgcatttctctgatggccagtgatggtgagcattttttcgtgtg

SEQ ID NO: 45826 - DNA, 201 bp, Homo sapiens
ttacttaatgggcttttcaagctcaacatgtccaaaatttaaatgaatgaatgaatatatgtatatacacacacctaatgtgtgtatatatatatatatawaaaatcatgtattataaatatacttaagtatatataaatttaatatatttttatttcctcattttctccatttctaccctttctttccactctatttcct

SEQ ID NO: 45827 - DNA, 201 bp, Homo sapiens
aaagcaactttatctagttacttaatgggcttttcaagctcaacatgtccaaaatttaaatgaatgaatgaatatatgtatatacacacacctaatgtgtrtatatatatatatatataaaatcatgtattataaatatacttaagtatatataaatttaatatatttttatttcctcattttctccatttctaccctttc

SEQ ID NO: 45828 - DNA, 201 bp, Homo sapiens
atgagaataaaattacattaagattggtgctttgtgttaaagatacctgtgatgagttttcttttcaagaggaatgaaatgacctagatacaaaaagacaratattacatgatctcacttaaatgtggaacccaaagcaactttatctagttacttaatgggcttttcaagctcaacatgtccaaaatttaaatgaatgaa

SEQ ID NO: 45829 - DNA, 201 bp, Homo sapiens
aaaaatttgccatagttcaggtccatacatataattttatttgatactcatatgtaacttatatagacttatagtttttgacaaaaggcatattttcagtkctggtccactcaatacaatggttgatataatatgctaaactatttaaattaatatactctctttcctttaggattgtatttcatgaaaataatatacatg

SEQ ID NO: 45830 - DNA, 201 bp, Homo sapiens
caaacaatagaaaatgagggactcctccctaactcattttatgaggccaacatcatcctgataccaaaacctggcagagacacaacaaaaaagaaaatttkgggccaatatccctgatgaatatcaatgcaaaaatcctcaataaaagactggcaaaccgaatccagcagcacatcaaaaagcttatccaccatgatcaag

SEQ ID NO: 45831 - DNA, 201 bp, Homo sapiens
aatcacctttgcatgaaagcagtcatagaaaatatgtaaatgaatggtcacggttgtgtccaatttaaaacgatttttgctaaattaggtggctggcctgkgagcctattttgcatatcccttgcctaagcattccaattaaaggatagagaatgccaaagtggataaaataaaataagattttactctaagctacttcaa

SEQ ID NO: 45832 - DNA, 201 bp, Homo sapiens
aggtcgggttacccgcaaagggaagcccatcagactaacagtggatctctctgcagaaaccctacaagccagaagagagtgggggccaatattcaacattmttaaagaaaagaattttcaacccagaatttcatatccagccaaattaaacttcatcagtgaaggagaaataaaatcctttagagacaaaaaatgctgaga

SEQ ID NO: 45833 - DNA, 201 bp, Homo sapiens
agccatttcccctagatgcactgtttccattactctacctagggatgtagtattagtcctgtgcacagacacttgtaatcagagccccagcattccatttktcattaggggaaacacaaggaaaactgtacaatttggactccgaacatctgataagcagatggcaggttagcctcaatgtagtgcaaatattgtctgttt

SEQ ID NO: 45834 - DNA, 201 bp, Homo sapiens
accactgtagcttttcaaggatagtcttcaaataagcatgatgttttccttcatgaaattagactagacaagcactgaatgggtctctgatactagtgctrtggtttatatgaatgggatatttagttgctgaggtaaaaacaaccaaccaaccaaccaaacaaacaaacaaacaattaatcagtagcatgttgtatagaa

SEQ ID NO: 45835 - DNA, 201 bp, Homo sapiens
tcactgcaagctccaccttctgggttcacaccattctcctgcctcagcctcccaagtagctgggactacaggcacccaccaccatgcccagctgattttttgtatttttagtagagacggggtttcaccatgttagccaggatggtcttgatctcctgaccttgtgatccgcccgccttggcctcccaaagtgctgggatt

SEQ ID NO: 45836 - DNA, 201 bp, Homo sapiens
agaaggcagagattcaggactgcaaaggcttttcatgccatctgttggaactcagtatatgacgatatgctatgacttttaatcaattagcattactgccmgtataatttgatcagttattagatactgctttctgctagttgacaagttgatttcctttacttttctataagacactgaagagagaaccgaaaatgtagc

SEQ ID NO: 45837 - DNA, 201 bp, Homo sapiens
ccagcagagggctctagagaggctcagagccaaagctatcaagaaaatggtccaatgcagtgtgatgatctggggttgtgggagactgatggagaagaaaytctgaggagctattagctggtaaaatatcatcagcacacgcatgctgatttttcctctttttccggccactcattgccatttttgaaacttcctctgtaa

SEQ ID NO: 45838 - DNA, 201 bp, Homo sapiens
gtctcgctctgtcacccaggctggagtgcagtggcgcgatctcggctcactgcaagctccacctcccgggttcacaccattctcctgcctcagcctcccasgtagctgggactacgggcgccccccaccactccctgctaattttttgtatttttagtagagacggggtttcactgtgttagcaaggatggtcttgatctc

SEQ ID NO: 45839 - DNA, 201 bp, Homo sapiens
aaaataataataataataataataataataataattattattattattattattattattattataaaagaagccttaaaaagatgcagaaaaccagaatmactaaattagtcacatgataaagaaagcaattcgctatcctctgtaaaatgcattactctaccagtccccacccaggaggcttagaatatcatgaatcta

SEQ ID NO: 45840 - DNA, 201 bp, Homo sapiens
ttgtatttctgttgtatcagttgtaatgtctcctttttatttctgagtttatttgggtcttctcttttctttgttagtctagctcgtagttttttttttttttaatgttttcaattttgtttatactttcaaaaaactagtgttacatttcattcatgctttttattgtttttctagtttctgattcatttagttctgctc

SEQ ID NO: 45841 - DNA, 201 bp, Homo sapiens
tggatccacattagaatacaaagtcagcgggctcccagaaaataataataataataataataataataataattattattattattattattattattatwataaaagaagccttaaaaagatgcagaaaaccagaatcactaaattagtcacatgataaagaaagcaattcgctatcctctgtaaaatgcattactctac

SEQ ID NO: 45842 - DNA, 201 bp, Homo sapiens
ccacttcctgttgtcaaaaaaatggggaaaatataagtgattgctatcattgttgaacttcaacagacttccacaatagaagtttaaatcatttatgagcrtgaacagcaaagaagatggtgacctgggcaacatagcaagaccctgtctctaccaaaaaaaaaaaaaaaattagctgggccttgtggcgtgcgcctgtag

SEQ ID NO: 45843 - DNA, 201 bp, Homo sapiens
atcttgaacatccttgtgtcccttgggtaaatcccacttgatcattgggtattatttttttgatgtgctgttaaattcagtttgcttgaactttgttgggkttttttgtgtttatgtttatcagagatattgacctatacctctgtgtgtgtgtgtgtgtgtgtgtgtgtccctgtgtgcttttggtatcagaatgatacc

SEQ ID NO: 45844 - DNA, 201 bp, Homo sapiens
gattttgaaattggctaccttttgaaatcctattttaattccttttgcctccttcagatacaaaaagacaaatttttccctaatccatttaaggatgtctrtttaccaaaagagcaggcaaaaggattctgaaataaaaaggacttcatataggagatctgaaattagtactaatttctcatgggcaaatatgtagggttt

SEQ ID NO: 45845 - DNA, 201 bp, Homo sapiens
cagatgcccagcagatccagaaagcaatggatccacattagaatacaaagtcagcgggctcccagaaaataataataataataataataataataataattattattattattattattattattattataaaagaagccttaaaaagatgcagaaaaccagaatcactaaattagtcacatgataaagaaagcaattcgc

SEQ ID NO: 45846 - DNA, 201 bp, Homo sapiens
aaattagtactaatttctcatgggcaaatatgtagggttttttcagagaatattaattttaaaaataaaatggtcattacatttaattctgtgcatttctytgggaataaataaatatgttaaaagttcataggcttcttccactccatctggagaaattttgaaagaaattttgtaaactgtttcagctggattatatgg

SEQ ID NO: 45847 - DNA, 201 bp, Homo sapiens
ggcagatgcccagcagatccagaaagcaatggatccacattagaatacaaagtcagcgggctcccagaaaataataataataataataataataataataattattattattattattattattattattataaaagaagccttaaaaagatgcagaaaaccagaatcactaaattagtcacatgataaagaaagcaattc

SEQ ID NO: 45848 - DNA, 201 bp, Homo sapiens
tggcagatgcccagcagatccagaaagcaatggatccacattagaatacaaagtcagcgggctcccagaaaataataataataataataataataataataattattattattattattattattattattataaaagaagccttaaaaagatgcagaaaaccagaatcactaaattagtcacatgataaagaaagcaatt

SEQ ID NO: 45849 - DNA, 201 bp, Homo sapiens
catgtttatagcaacacaattcacaacttcaaaattgtggaaccaacacaaatgcccatcactcaatgaatggataaagaaagtgtgattatctatctatctatctatctatctatctatctatctatctacatatctatctatctatcatctgtctatctatctatctatctatcatctatctatctatctacctaccta

SEQ ID NO: 45850 - DNA, 201 bp, Homo sapiens
gttggcagatgcccagcagatccagaaagcaatggatccacattagaatacaaagtcagcgggctcccagaaaataataataataataataataataataataattattattattattattattattattattataaaagaagccttaaaaagatgcagaaaaccagaatcactaaattagtcacatgataaagaaagcaa

SEQ ID NO: 45851 - DNA, 201 bp, Homo sapiens
gctattcagctttgccttacacctgggtgtgattctctctaactctctttatgctacttttagctagtgcaacttgccataggaaaaaaatactgaaaacytaaaatgaccgtaagagcaacaaactttctgatttctgtcattcttttaaccaagataattttgaaggtagctatctatgtgtttggatacttggttcct

SEQ ID NO: 45852 - DNA, 201 bp, Homo sapiens
ttcaaaattgtggaaccaacacaaatgcccatcactcaatgaatggataaagaaagtgtgattatctatctatctatctatctatctatctatctatctayctacatatctatctatctatcatctgtctatctatctatctatctatcatctatctatctatctacctacctacctacctacctatctatgatagaatac

SEQ ID NO: 45853 - DNA, 201 bp, Homo sapiens
ggtttatgcagagaacctaataagaatctccagagtttgcatgtcacagaacaactgtttataagttacctttttcctccttatctgtgcctggggacttytctttcttgtctttttcctcttgttcctatttctgttcccttgctcctgcttgcttgcccatctttgcatttctttacacctggcagcaaccatactctt

SEQ ID NO: 45854 - DNA, 201 bp, Homo sapiens
gcaagttggcagatgcccagcagatccagaaagcaatggatccacattagaatacaaagtcagcgggctcccagaaaataataataataataataataataataataattattattattattattattattattattataaaagaagccttaaaaagatgcagaaaaccagaatcactaaattagtcacatgataaagaaa

SEQ ID NO: 45855 - DNA, 201 bp, Homo sapiens
tcaaaattgtggaaccaacacaaatgcccatcactcaatgaatggataaagaaagtgtgattatctatctatctatctatctatctatctatctatctatmtacatatctatctatctatcatctgtctatctatctatctatctatcatctatctatctatctacctacctacctacctacctatctatgatagaatact

SEQ ID NO: 45856 - DNA, 201 bp, Homo sapiens
attgctaagaatagaccagaacacagtgcccaaacccttaccatactgaggtccaggatggggtcacaaaaggaacacaggcaggatttcttatcaaaacragctggccaaccatgaagtaggagtgagaggagggaaagacaggtgccaggtgatgcagaggtaagaaagtcaggcagctcagtccatttctctgtcctg

SEQ ID NO: 45857 - DNA, 201 bp, Homo sapiens
tttgtatcctgtagtgtaactgaatttgtttaacaactctaagggttttttggtggagtcttttgacttttctaaatatgagtatcatgtcatctgcaaasagggacaatttgactttctctttttgaatctggatgccttttctttctcttgcctgattactctggctaggactttcagtgctttgttgattaggaatgg

SEQ ID NO: 45858 - DNA, 201 bp, Homo sapiens
aaattgtggaaccaacacaaatgcccatcactcaatgaatggataaagaaagtgtgattatctatctatctatctatctatctatctatctatctatctayatatctatctatctatcatctgtctatctatctatctatctatcatctatctatctatctacctacctacctacctacctatctatgatagaatactact

SEQ ID NO: 45859 - DNA, 201 bp, Homo sapiens
catggaaaaaaatgaagggacaatggaagtggtgagtggtgatactttcttcctttaatgtatccaagctattgctttcctttcctgacttccgaaaaccragtgcctggcaagaactgccaacgatttattgaaactacattttccttacccaccatagaaacaaatcatttctgtagtgggtaaattatacaaagcact

SEQ ID NO: 45860 - DNA, 201 bp, Homo sapiens
aattgtggaaccaacacaaatgcccatcactcaatgaatggataaagaaagtgtgattatctatctatctatctatctatctatctatctatctatctacmtatctatctatctatcatctgtctatctatctatctatctatcatctatctatctatctacctacctacctacctacctatctatgatagaatactactc

SEQ ID NO: 45861 - DNA, 201 bp, Homo sapiens
ccaacacaaatgcccatcactcaatgaatggataaagaaagtgtgattatctatctatctatctatctatctatctatctatctatctacatatctatctrtctatcatctgtctatctatctatctatctatcatctatctatctatctacctacctacctacctacctatctatgatagaatactactcagccataaaa

SEQ ID NO: 45862 - DNA, 201 bp, Homo sapiens
aaagtgtgattatctatctatctatctatctatctatctatctatctatctacatatctatctatctatcatctgtctatctatctatctatctatcatctatctatctatctacctacctacctacctacctatctatgatagaatactactcagccataaaaaggaatgaattaacagcattttcagtgacctggatgg

SEQ ID NO: 45863 - DNA, 201 bp, Homo sapiens
gccaggcacggtggctcacacctataatcctagcactttgggaacccaaggcaggtggatcacccaaggtcaggagttcaagaccagcctggccaacatgrcaaaacactgtctccactaaaaatacaaaaattagccaggtgtcatggcacatgcctgtaatcccagctactagggaggctgaggaaggagaatcgcttg

SEQ ID NO: 45864 - DNA, 201 bp, Homo sapiens
tatctatctatctatctatctatctatctatctatctacatatctatctatctatcatctgtctatctatctatctatctatcatctatctatctatctayctacctacctacctacctatctatgatagaatactactcagccataaaaaggaatgaattaacagcattttcagtgacctggatggaattggagactatt

SEQ ID NO: 45865 - DNA, 201 bp, Homo sapiens
agataaaatatacaagatgaggtcacaggaggagaatgtggccaagagggaggaagagaaaagggagtagaacccacaaaagagaaataattgcattggargggaattgcgagtggcatctatggtgaccacagataggctgaaatctctaaattaagacttcattcatttcaaagcaatagactaggtcaagtgagggat

SEQ ID NO: 45866 - DNA, 201 bp, Homo sapiens
ttctcactgatatatgagaactaagctatgaggatgcaaaggcataagaatgatacaatggactttggggacttgcgaggagtagtgggagggggacgagrgataaaacactacaaataaggtgcagcgtatactacttgggtgatgggtgcaccaaagtctcacaaatcaccactaaagaacttactgatgtaaccaata

SEQ ID NO: 45867 - DNA, 201 bp, Homo sapiens
aatatccagcatctgaaatgaggagcaataaaaatatgtccttatggtcattgacagtttctatttggaactgatttagccaagggaaaggaggctacatygtagatgatagtaacatgttgaaagtagatgcatgctaacaattttagaatgaacaatgttttcggataatcattcactgcctattttggtttcaaaaat

SEQ ID NO: 45868 - DNA, 201 bp, Homo sapiens
aaacactacaaataaggtgcagcgtatactacttgggtgatgggtgcaccaaagtctcacaaatcaccactaaagaacttactgatgtaaccaataccacytgtaccccaataacttatggaaaaattttaaaaaaggaaataaggaaagcaaaacaaaacaaaaccaaaacccaaatgcaaatgaaatacaaaactgaaa

SEQ ID NO: 45869 - DNA, 201 bp, Homo sapiens
acctacagaatgggaaaaaatttttgcaatctacccatctaacaaagggctaatatccagaatctacaaagaagttaaacaaatttacaagaaaaagcaaycccatgaaaaagtcaggaaaggatatgaacagacacttttcaaaagaagacatttatgcagccaacagacacatgaaaaaatgctcatcatcactggtca

SEQ ID NO: 45870 - DNA, 201 bp, Homo sapiens
tagacctaaaaccataaaaacactagaagaaaacctaggtaataccattcaggacataggcatgggcaaagacttcattacccaaacacccaaagcaatgrcaacaaaagccaagatagacaaatgggatctaattaaactaaagagcttctgcacagcaaaagaaactaccatcagagtgaacaggaaacctacagaatg

SEQ ID NO: 45871 - DNA, 201 bp, Homo sapiens
agtgaaaagaaaatattagaaagtttctttaaatttgttatctaaaacgtaaacattgtagccttcccaggatttaatgtatgattggcattgacactctsctttagtgtatatcccagacaagagagctttattaaagggttgtctgtggtgctgtcacttgttctgtagctttcaacattatcacaatcaaagatacct

SEQ ID NO: 45872 - DNA, 201 bp, Homo sapiens
aattaaagacttaaatgttagacctaaaaccataaaaacactagaagaaaacctaggtaataccattcaggacataggcatgggcaaagacttcattaccmaaacacccaaagcaatggcaacaaaagccaagatagacaaatgggatctaattaaactaaagagcttctgcacagcaaaagaaactaccatcagagtgaa

SEQ ID NO: 45873 - DNA, 201 bp, Homo sapiens
agtacagatttcccattgtgtccagagagggtgtcaacgaataatgacttttagtcttttggtttgttgggtgtgggggggtgttggtgaggaggacattscaggggtaactttcccatgtacaagggaagataaaaatggctttgcagcatggtgcagtggctcacacctgtaatcccagcactttgggaggccgaggcg

SEQ ID NO: 45874 - DNA, 201 bp, Homo sapiens
aaggtacacattttcacttataagatgaacaagttctggggacctaataaacagcacgagtgatgatagacgtgttaatttaatggtggtagtcattacamaatgtgtatatatctctcaatcatcttgttgcacactttgaatatattcaatctttgtcaatcaaatatttcaaaacaaaaaataaaattctagatagat

SEQ ID NO: 45875 - DNA, 201 bp, Homo sapiens
cagaaagtgtttttcttctaatggaaaagattcaggcctctgtaaaattgccagtttagcaagaaagtttcctctttataaggtggtattctttgtattasagaattagtcatggtttgttccctggtccaaccatatttatcattccgcactgggacagaacataagctccaaaaggacagggcctcgtctgtcaccttt

SEQ ID NO: 45876 - DNA, 201 bp, Homo sapiens
atgcaagaatttcattgccattggaagaaagagcagagaagagtggcagtgtttcttagacagctgtgctctttagatgttatagaaaacaaacttagtcmcaaaataggctgaagtccttagaagaacttctacctagaaaccacaattttcactagggtaaagtttctcagctaacattaatggctacttttgttggtt

SEQ ID NO: 45877 - DNA, 201 bp, Homo sapiens
cttgtgatcatgtattgttactggattttctccatttctcctttggccatgggcatattacctgaagtgttggttttctgtgtttcttattttgaacactytttttttttttttttttttttttttgagacagagtctcgctgtcgcccaggctggagtgcagtggcgcaatctcggctcattgcaagctccgcctgccgg

SEQ ID NO: 45878 - DNA, 201 bp, Homo sapiens
actgggagatcatttatttggagaaataatcaatataagaaaattatcatgtactgaacaaatatagaaaatcttggaggtttgtttcaatgattaaccaytgtggcctattagaaaaatcttcaagccaagtgaatactctttaaaacctaggcctcaacctaacttttatcttctgtacttcagcatcacttggaaagt

SEQ ID NO: 45879 - DNA, 201 bp, Homo sapiens
acctacatagaactatttctaatttagatctcaagcccaattttgctctatgttcttaacttttatagtcattccttacagcaaaaaaaaaaaaaaaaaaatcatttgagatatgtatgtgagctttaattttctgcttcagttgtaaacttctttttattgagtggtattatcatcttgtaagttcatttggaaaatatg

SEQ ID NO: 45880 - DNA, 201 bp, Homo sapiens
tataaacaattattgaatgacccttttgttcagtccttattcactactgaaaggtgtcatgatcttaatgacaatggtcttttcaattttatggaacttttaagtttataaagcagtaacctataaagctagattgtaaaatctgttagggtaagagttgtttctcttttgttttcctctgtttcttacatgtctggtatg

SEQ ID NO: 45881 - DNA, 201 bp, Homo sapiens
tatgatactgttcaagtgtttcagacttttctgtactatttgttcttcttaggattccacatcttgttttattggcatatggatttcttttttttttttttgagacagagatttgctctttttgcacacctggagtgcaatggcatggtcttggctcactgcaaccttcacctcccaggttcaagtgattctcctgcctca

SEQ ID NO: 45882 - DNA, 201 bp, Homo sapiens
accaacaacctttgtaacaagcattttaatgatcattacagattaggaaattgaggctcagagagtaagcaatttgtctaaaaccacacaaaactaagtamtggagctggattaaaatgggagtcctcactccaaattctatttttattagtctacaaaccctacgtattggtgattttgttttatcatcacaagcaatgc

SEQ ID NO: 45883 - DNA, 201 bp, Homo sapiens
aaaaaaaaaaaaaaaaaaaaggaaaagaaaagattccctaatcccgtgaatgaacctgtacaattttcaggatcaccatgagctatgcatgtacggacagstccaaaacagtacatcaaacctactgagagctaaactgaaatttaatccctatcattctcagaaggtaaaacagaacttacaaacggaacttgagttgaa

SEQ ID NO: 45884 - DNA, 201 bp, Homo sapiens
aatactaggtcaaggatattaataaaatttctaggaacccatcagaaggagagagaaggagaccatgcaagagcatgaacaatgagagaggaatgagaaaragaagtcaaccctaactatttcgaccctatttgtaccttgtactcatattttcttaacatgcccttgcaactcagggaaaacattgcttacatagatttc

SEQ ID NO: 45885 - DNA, 201 bp, Homo sapiens
aactttcttgtacattacacatacctcttagataaacttaataaaagataaaacatcatcattataggcctggcaatgagaatattgtataggtgttccaygaaatcccttatctatgaagaatacagctgtagtttcctcagttttatttgtttggttggttggttttgtttccagattagagcttagtagcctagaaga

SEQ ID NO: 45886 - DNA, 201 bp, Homo sapiens
cttctattccagtaaaaatggctttataattttacaatttatgatctatctgttgtcatgaattaacttttaaaaaatcctgctttctttctgagaccttwaagaaagaattttcttttgagtattttcatttttatttcaagagaacaatttaaaatatgttttctcacagatagtaggcatttaattagtgatcatgaa

SEQ ID NO: 45887 - DNA, 201 bp, Homo sapiens
tcatgggggcaggatgtgtttttagtattagcatctttggggtgaattatgatgttgttgaaggcatttaattcaacgagtactcatttttattgtgtcastttttaccaatactgctaaagtaacagaacattctattcctctaatttgcctgagcaatatatcgtagtcattagcaagaattagaactgtacctaccaa

SEQ ID NO: 45888 - DNA, 201 bp, Homo sapiens
gatatttcacctcattggtttattcctatgtaatttttttggtagctagtggaaatgggattgctgttctgttcttctgtttttgtttttgttttgctttkcttttttttgctatttcattattggtgtatagaaatactactttaaaaaaatgttgattttgtatcctgtagtgtaactgaatttgtttaacaactctaa

SEQ ID NO: 45889 - DNA, 201 bp, Homo sapiens
cgagtgtgaggtctgtggcttagaagtcttaagatgaatattgtgattcctagtgatactatctttgcttggtttttataagcagagttttaaagtctttwcattaatggcccaggcaagttcatggttcatagtagtaaatgttggtgctgtattatgctttaaatcaatgtcttaataccatgattaggaaggggctac

SEQ ID NO: 45890 - DNA, 201 bp, Homo sapiens
tgtttgtacttattaacctacctctcttcaccctccgctaccaacccagtcaaccttcccagcttctagtatctatcattcttctctctaccattatcagrtcaatctttttagttcccacatatgaatgagaatatgcaataatttgtctttctgtgcctgggttatttcacttaacataatgacatccatgttgctgca

SEQ ID NO: 45891 - DNA, 201 bp, Homo sapiens
tcagcctcccgagtagctgggactacaggcgtgcaccaccaagcccaactaatttttgtattttttttagtagagacagggtttcactattttggccaggwtggtctcgatctcttgacctcattatctgcctcccaaagtgctgggaatacaggtgtgagctactgcatccagcctaaaatttcactttttatggataca

SEQ ID NO: 45892 - DNA, 201 bp, Homo sapiens
aatgctatccaaagtggcatgttgctgctaaatattttgatatgtatagggcattttcatgtccatgtcctatgtagagaatctgtaggtgtcctcttggmaaatgccagtgacctaatgtagcatagaatcagcatgtgtatttggcactcctccacaactcgagaaggtcatttgttaaggctttctgaactatttcag

SEQ ID NO: 45893 - DNA, 201 bp, Homo sapiens
tttttcttgtgtgtgtgtgtatatatatatatatatatcacatttattatgaagctcttagaaatttaaaaacacacttttctttttttttttttttttttgagacagagtcttgctctgccatccaggctggagtgcagtggcacagtctcggctcactgcaacctctccctctcgggttcagccatttctttgcctcag

SEQ ID NO: 45894 - DNA, 201 bp, Homo sapiens
ttttttcttgtgtgtgtgtgtatatatatatatatatatcacatttattatgaagctcttagaaatttaaaaacacacttttctttttttttttttttttttgagacagagtcttgctctgccatccaggctggagtgcagtggcacagtctcggctcactgcaacctctccctctcgggttcagccatttctttgcctca

SEQ ID NO: 45895 - DNA, 201 bp, Homo sapiens
tttttttcttgtgtgtgtgtgtatatatatatatatatatcacatttattatgaagctcttagaaatttaaaaacacacttttctttttttttttttttttttgagacagagtcttgctctgccatccaggctggagtgcagtggcacagtctcggctcactgcaacctctccctctcgggttcagccatttctttgcctc

SEQ ID NO: 45896 - DNA, 201 bp, Homo sapiens
ctttttttcttgtgtgtgtgtgtatatatatatatatatatcacatttattatgaagctcttagaaatttaaaaacacacttttctttttttttttttttttttgagacagagtcttgctctgccatccaggctggagtgcagtggcacagtctcggctcactgcaacctctccctctcgggttcagccatttctttgcct

SEQ ID NO: 45897 - DNA, 201 bp, Homo sapiens
ttcttttcacactctctttctaaatatcaatatacacaatggaaaaaattttaataatcatattatagggtcctaagaattgcacttgaagatttttaaarggagagaataagattagagataatatttttgagggaaaattgatagggtaattgattctagaatgcaaaatttgaacgacaatggcaaagaaatatatgc

SEQ ID NO: 45898 - DNA, 201 bp, Homo sapiens
aggtatttctacaaagaattgatatcagcaggattcatttcaaccctgtaattctgaattctttttttcttgtgtgtgtgtgtatatatatatatatatatcacatttattatgaagctcttagaaatttaaaaacacacttttctttttttttttttttttttgagacagagtcttgctctgccatccaggctggagtgc

SEQ ID NO: 45899 - DNA, 201 bp, Homo sapiens
tgattgccagaaactactacagggagtttctaaaaacgaaatatactatcacttgcctttgacgaaaattgttggtggaagccactgtcattgtgagtagytttcggcaaatgggaaaatgttgccattaacagtagcttgcaagtaagagccacagctaatgtaaaaatccacccttgaaaatgaatatcaagatatttt

SEQ ID NO: 45900 - DNA, 201 bp, Homo sapiens
aaggtatttctacaaagaattgatatcagcaggattcatttcaaccctgtaattctgaattctttttttcttgtgtgtgtgtgtatatatatatatatatatcacatttattatgaagctcttagaaatttaaaaacacacttttctttttttttttttttttttgagacagagtcttgctctgccatccaggctggagtg

SEQ ID NO: 45901 - DNA, 201 bp, Homo sapiens
cctgatacttttatggtttaattttttttgctataataatgagatagtttattccattgtttttaaagtgaaagactataaaaatggatgatactcagcttaatttaatttataaagaactgtaattttaataatctgaaaaagatgcataagaatgtaaactacaaactaattttacttatgattaagaatgctaccatt

SEQ ID NO: 45902 - DNA, 201 bp, Homo sapiens
tttatgaacattgtatacattaaactttgataaaaagcatgtgtgtgaatatatatgtgtgtgtatatatgtgtgtgtgtgtatatatatatattctttayatgaagaatgtagcacattaaaactacaaatgtgtatataggtaaaactaaaattctaggaaaaagaacttgggagaaggaagaggaaggttccattagt

SEQ ID NO: 45903 - DNA, 201 bp, Homo sapiens
ctgatacttttatggtttaattttttttgctataataatgagatagtttattccattgtttttaaagtgaaagactataaaaatggatgatactcagcttaatttaatttataaagaactgtaattttaataatctgaaaaagatgcataagaatgtaaactacaaactaattttacttatgattaagaatgctaccattc

SEQ ID NO: 45904 - DNA, 201 bp, Homo sapiens
tctatacaaattaaaattgaatccagagttcaatttttataaacacatcttacatacttttataagcatattaatatacatacatgctaatataaacatarcatactatacatacatactatacatactatacatacatactatacatactatactaaacataatatgcatactaatataaacatattttacatactttta

SEQ ID NO: 45905 - DNA, 201 bp, Homo sapiens
ttttcagtgactctctaagtacaattttaagtcaacctctcttatatgtgctgttattttggggatattttgtcactatcagatgaataaattatttatcrtttatataaaatcaattcactggagtatgacaaaaacaataaaactttaatctatatttatctgtacctcatccctccaaatctcacttaaatatgttga

SEQ ID NO: 45906 - DNA, 201 bp, Homo sapiens
catgtccttcacttgaaaaatatgacacaatgagagggacaattatgatggtctattgtagtgtgagaaatgtcataatttgaatatttttataaaaatayatataggagaaaaggggggaacacaaccctcactctcaaaatctaaaagtgacttgtaaaacctagaaagcaagagttgggaaacctctgaacacacata

SEQ ID NO: 45907 - DNA, 201 bp, Homo sapiens
tctcattttggatacaaatgttatcaaagtagagatagaatgcttgtcagttttgttgaagggacactgtctacaatcaggttggactctaattgattttsaatgaagcactctcagctactacttcagttaggcaccagtttggctataatagatgattttttaaggtccttaatagatttctatttgaaaaaaatgtca

SEQ ID NO: 45908 - DNA, 201 bp, Homo sapiens
aacaatgcaggcttttaaaattgagtaatcatttttatcagccatttttcaacagtggctcttttcatgcatggttaagtgtgattttggctgttaaatcsttcttctcgaatgaaataagcattttaattcagcaatctgaaaatcatcaataacagacattgtcttgcccttttgctctcccaatttacctaatcagtt

SEQ ID NO: 45909 - DNA, 201 bp, Homo sapiens
catgtgtcaactagtcaaaaacattttcattcaactcaaaaataaatacgcccactcaattcatgaaaattgcttttgcgtttgattttgaattgtttgamtacttcagacgtgattatttcaattatgtaagctaagctgcatttcaatctgggcacagacttatcatcaaaatgttcctgttgagaagaaccagtttct

SEQ ID NO: 45910 - DNA, 201 bp, Homo sapiens
catatttataccaactggctttctaaatcagatgcctctattgccagtaccattggtcagttcgtctgaaggatgtttccttctatagaaatcataaactwtcataaagagactgtttgggaccatagagagaagactttagatcataagggtagtggtatctaatttaggtttatttaagtaaacagtggcaggaatttc

SEQ ID NO: 45911 - DNA, 201 bp, Homo sapiens
ggtttatgatactgattgtcagaaagtgatggagaaaagtgttaataatgtagactaaacttatattttgctgtgtgtataacaattaccttgtaacaccaaaaaaaaaaagtgaagaaattactatttagtgtttgaaaactattatccaatttagtaaaaagtagcttatgccatgattaagttctggcatacatcttt

SEQ ID NO: 45912 - DNA, 201 bp, Homo sapiens
gaacttaaaacaatgaaagaatacatatttcttttataataaaatatattttaaatgaaaaggcattaaaaatagtggacacaatattctctaacaattakgtactatgaagtactatttctgtgactaaatttaggatatagtttattcattatattgatagtttagaataaatttgcctatgttaaacttttatcagag

SEQ ID NO: 45913 - DNA, 201 bp, Homo sapiens
ttcatggaaaaatttctggacagatatgcaagagctgaatagttggtgctttgggggattagtttggagacttttaaaatttttacttgatgttctttagygtggtaaattatttaaaagtaatggacacgtattatagtacttttataataaaaagaagtttagatttaaaaacttaaaaaatagtggatgtggtaatta

SEQ ID NO: 45914 - DNA, 201 bp, Homo sapiens
attgaataatattatcaaaggatcctgaaaggcattatttcaatgagcatttcccagtgagaaatatcagtgagagagatttttttcccatgggatttttcttcctagcaacatcagcttctgggctgaatgctatgttctgctccctaccaggaagagtaggagagacggaacatacctagatgattccagtcagttaat

SEQ ID NO: 45915 - DNA, 201 bp, Homo sapiens
taatgtttggtgataacaaacaaaagaaggtcagctttctaagatagacagaaaatgagttaatccattttctgagttagggagggaagacaacatttaayaaacattgaccaggactattataggtattttacctaagtaattttatccctttaaggtagtacttttaaatatttaatgtgcctatgaataacctggggt

SEQ ID NO: 45916 - DNA, 201 bp, Homo sapiens
tctcttcaaggagaactacaaaccactgctcaacgaaataaaagaggactcaaacaaatggaagaacattccatgctcatggataggaagaatcaatatcrtgaaaatggccatactgcccaaggtaatttatagattcaatgccatctgcatcaagctaccaatgactttcttcacagaattggaaaaaaactacttaaa

SEQ ID NO: 45917 - DNA, 201 bp, Homo sapiens
caaaccgaatccagcagcacatcaaaaagcttatccaccatgatcaagtgggctttatccctgggatgcaaggctggttcaacatacacaaatcaataaaygtaatccatcatataaacagaaccaaagacaaaaaccacatgaattatcttaatagatgcagaaaaggcttcgacagaattcaacaacccttcatgctaa

SEQ ID NO: 45918 - DNA, 201 bp, Homo sapiens
ttggcaaaccgaatccagcagcacatcaaaaagcttatccaccatgatcaagtgggctttatccctgggatgcaaggctggttcaacatacacaaatcaawaaatgtaatccatcatataaacagaaccaaagacaaaaaccacatgaattatcttaatagatgcagaaaaggcttcgacagaattcaacaacccttcatg

SEQ ID NO: 45919 - DNA, 201 bp, Homo sapiens
aatttaattcatgttttcatgttgaaggccttagattacacatttcttaggcttggactttccatgtttgaatcaactgtggagaatagataatgggattaaaaaaaacacaattaatggaaagactgtaaaaacagatttaaaaaataaagattggaacaggactccaagatggctgactagaggcattcagcaattgcc

SEQ ID NO: 45920 - DNA, 201 bp, Homo sapiens
tatcctttctgtagagataatcttaccaatggggttctactatgtatggtttattatataaagctcttactctgttggaaactgtttggatgaatatcacmaactttcttttttccatggttgacacagtccctttttgattgataattcctttttttagatataccaaaacttttagttaatttatagtcaaggttagcc

SEQ ID NO: 45921 - DNA, 201 bp, Homo sapiens
tctgttcttttacatctgctgaggagtgctttacttccaactatgttgtcaattttgtaataagtgcgatgtggtgctgagaagaatgtatattctgttgrtttggggtggagagctctgtagatgtctattaggtccacttgatgcagagctgagttcaattcctggatatccttgttaactttctgtctcgttgatctg

SEQ ID NO: 45922 - DNA, 201 bp, Homo sapiens
ttcaaagggaatgcttccagtgtttgcccattcagtatgatattggctgtgggtttgtcatagatagctcttattattttgagatatgtcccatcaatacktaatttattgagagtttttagcatgaagggttgttgaattttgtgaaaggccttttctgcatctattaagataatcatgtggttttgtctttggttctgt

SEQ ID NO: 45923 - DNA, 201 bp, Homo sapiens
cctgagactttgttgaagttgcttatcagcttaaggagattttgggctgagatgatggggttttctagatatactatcacgttatctgcaaatagggacartttgacttcctcttttcctaattgaataccctttatttacttctcctgcctgattgccctggccagaacttccaacactatgttgaataggagtggtgag

SEQ ID NO: 45924 - DNA, 201 bp, Homo sapiens
aaatcataattgtattacatttatagcatagaatttgatgttttggatgtatgtatacagtgtggaatgattaaatcaaattaattaacatatccattacytcactatttaacttttttcttgtggtgatacatttgaagtttactctcttagttattttgaactatgcaatatgttgtttttgactgtagtcaccctgct

SEQ ID NO: 45925 - DNA, 201 bp, Homo sapiens
cctcctccacatccccctcacacatcactatctttcttcctctattctggagattgcaacttccatacagcatgtttagaggtgaaaagggttgggaaaascacacaacacatttataaagcaaattataagtagaactgtaaaataccagtagtgcgggaaatagaagaaaataatttcaggctgcttaaaattatccag

SEQ ID NO: 45926 - DNA, 201 bp, Homo sapiens
gtatactttatgaacattgtatacattaaactttgataaaaagcatgtgtgtgaatatatatgtgtgtgtatatatgtgtgtgtgtgtatatatatatattctttatatgaagaatgtagcacattaaaactacaaatgtgtatataggtaaaactaaaattctaggaaaaagaacttgggagaaggaagaggaaggttcc

SEQ ID NO: 45927 - DNA, 201 bp, Homo sapiens
atttagtgataatcccaggtctatgggtgactgagatgactgaaatttattttgtatcctcctccacatccccctcacacatcactatctttcttcctctwttctggagattgcaacttccatacagcatgtttagaggtgaaaagggttgggaaaaccacacaacacatttataaagcaaattataagtagaactgtaaa

SEQ ID NO: 45928 - DNA, 201 bp, Homo sapiens
ttatagagcagtacagctgtgagatgtatactttatgaacattgtatacattaaactttgataaaaagcatgtgtgtgaatatatatgtgtgtgtatataygtgtgtgtgtgtatatatatatattctttatatgaagaatgtagcacattaaaactacaaatgtgtatataggtaaaactaaaattctaggaaaaagaac

SEQ ID NO: 45929 - DNA, 201 bp, Homo sapiens
cagtggcaagaagtgggaaatgttatctactagatccatagatctcagatgatattcagtatggctcatactcatcagcatggctgcaccagttgttcatkgctggtgtctactctggttgtcagtggccatgccatatgggttattaaatgttttgactgccacaccttcctataccagtcatgaattctgtggtgaaat

SEQ ID NO: 45930 - DNA, 201 bp, Homo sapiens
ctcccctatgttatttatttatatatcctttaatagctacttctgttggtaaatcggtattagtgtttttccattatttgcatttattaatgtatttgccrtatctccacaattacaatcaaataactttgagtcaaggtactaacaatgttttgttttgtcttttccatctatttagaaagctaacacaagagtaaactg

SEQ ID NO: 45931 - DNA, 201 bp, Homo sapiens
tgaagtgctgatagcttcccaggagagagataatagaacttactgtattatggatgtcaataacacaagtatatttaagagacagcctgaatggaggaatktctaatacaaataagatgacagtattcacaaggccacaaaccagtggcaagaagtgggaaatgttatctactagatccatagatctcagatgatattcag

SEQ ID NO: 45932 - DNA, 201 bp, Homo sapiens
tacttcacttctacctttaaataaatctacagttttattttttaaaaacaagttaaattggacaatactttaacagtataattaaaacaataactgagtascctatgacacagtcattccaagtatacacccaatagaaagcatatatgtgcaccaaaagacaagtactagccaaaagttggaaaaagaacaaatacggaa

SEQ ID NO: 45933 - DNA, 201 bp, Homo sapiens
ggtatgacttgaccaggtgtggtggctgacacttgtaatcctagcactttgggaggctgaggcaggagggtcacttgagatcaggaattcaagaccagccwgttcaacatggtgaaacctcgtctctactaaaaatccaaaaatcagctgggcgcggtggctggtgcctgtaatcccagctactcaggaggctgaggcatg

SEQ ID NO: 45934 - DNA, 201 bp, Homo sapiens
gtaatatacttcacttctacctttaaataaatctacagttttattttttaaaaacaagttaaattggacaatactttaacagtataattaaaacaataacygagtaccctatgacacagtcattccaagtatacacccaatagaaagcatatatgtgcaccaaaagacaagtactagccaaaagttggaaaaagaacaaat

SEQ ID NO: 45935 - DNA, 201 bp, Homo sapiens
aatacaaagtatttcttcagcaagaagagtaaattaaaaaagaaagcacggtaatcaatagcttttgaaagtgtatcagtaatatacttcacttctacctytaaataaatctacagttttattttttaaaaacaagttaaattggacaatactttaacagtataattaaaacaataactgagtaccctatgacacagtcat

SEQ ID NO: 45936 - DNA, 201 bp, Homo sapiens
aaatgaggagtttacaatccacaaatacaaagtatttcttcagcaagaagagtaaattaaaaaagaaagcacggtaatcaatagcttttgaaagtgtatcrgtaatatacttcacttctacctttaaataaatctacagttttattttttaaaaacaagttaaattggacaatactttaacagtataattaaaacaataac

SEQ ID NO: 45937 - DNA, 201 bp, Homo sapiens
ggttagagctgcactctttgcctttagatttgcttgcaggggagatgtagaacaggtgagcatcttcctcagaacaacccttcattgtcttcattgaaaasaattattaagaagctcattgttggccaggtgcagcggctcatgcctataatcccagcactttcagagatcaaggcaggaggatcccttgagcctaggagt

SEQ ID NO: 45938 - DNA, 201 bp, Homo sapiens
agctactagaaagaaaaacagattgcttgcataggaaaaaaaaaagattggcttttaacttcttaagaacaaagcaattaagttttatgtgaaaatcactrccagcctagaaatgtacttgtagctaagctatcctttaagagtgaaagcaaaatagagacattttcaaatattcaaaaaatgaggagtttacaatccaca

SEQ ID NO: 45939 - DNA, 201 bp, Homo sapiens
gtgccatggtggtttgtcacacctgtcaacccatcacctaaatattaagcccagcattcattagctattttttctgatgctctccctccccacatcccccsttcctgctgataagactcatgtgtcattcccctctctgtgtccatgtattctcattgttcagcttccacttgtgagtgagaacaagtggtgttcggtttt

SEQ ID NO: 45940 - DNA, 201 bp, Homo sapiens
ttcccacaagttttattccagaaaagtatcttgtagtatttttattaggataggattcaactatattaacataggagaatttacatatttgtgatgtttatttgtagatcatggggtgcctttctattttttttcaagtacattttgtatgttctggagttttaaaaaaatgttattttaggtgctggggtacttgtacag

SEQ ID NO: 45941 - DNA, 201 bp, Homo sapiens
tagaattgaagagtgggatgatctttcaaattgaaagacttcattgagggccaaacaggtcaataaacacaatccttaactggttatatcatggaataaasaaagaagttaatggtaagaggcaatttaaaagctactagaaagaaaaacagattgcttgcataggaaaaaaaaaagattggcttttaacttcttaagaac

SEQ ID NO: 45942 - DNA, 201 bp, Homo sapiens
tatgcacttctctaatgatcagtgatattgagctttttttcctatgctcattggacgcatgtatgtcttcttttgaaaagtgtctgttcatgtccactttycaatgggattgtttgcttttgtcttatagatttgtataagttccttatagatgctgactattagacttttgtcagaaaatatttgcataatttgcaaata

SEQ ID NO: 45943 - DNA, 201 bp, Homo sapiens
gtacatgaacaacgtaggtgactggtttgccttcccatccctagcccctcttcccttgtactttgaatataggctgagatactttccgtatacaaaatagrgtaaattacaaatgagtatgtgattttacataggttgattttctaagtgagttctgcttggttatttacagggaacaacaaccctgggaatttctaggga

SEQ ID NO: 45944 - DNA, 201 bp, Homo sapiens
atagaattgaagagtgggatgatctttcaaattgaaagacttcattgagggccaaacaggtcaataaacacaatccttaactggttatatcatggaataargaaagaagttaatggtaagaggcaatttaaaagctactagaaagaaaaacagattgcttgcataggaaaaaaaaaagattggcttttaacttcttaagaa

SEQ ID NO: 45945 - DNA, 201 bp, Homo sapiens
gcagaaagatgttcgattgatataagtatcttgtagggcacataaaacacaaaccagataacaaattcagctaaagtatttcgaaaaagaataaacaataytcaaaaatgatgcagttaaaaacacacctaaaaaacactgtcataataagcatgcctttccttggttccgtactcttgtcttaccacaacacttacaata

SEQ ID NO: 45946 - DNA, 201 bp, Homo sapiens
ctgcttgcctgtaccttaatagaagttttttgtttgtttttgttttttgagacagagtttcactcttattgcccaggctggagtgcaatggcacaatctcrgctcactgcaacctccacctcccaggttcaagcaattctcctgcctcagcctcccgagtagctgggattacaggcatatgccaccacgcccagctaattt

SEQ ID NO: 45947 - DNA, 201 bp, Homo sapiens
ggctggagtgcagtggcgcgatctcagctcactgcaagctccgcctcctgggttcacgccagtctcctgcctcagcttctcaagtagctgggactacaggygcccgccaccaagcctggctaatttttttgtatttttggtagagacggggtttcaccgtgttagccagcaggatggtctctatctcctgacctcgtgatc

SEQ ID NO: 45948 - DNA, 201 bp, Homo sapiens
aagagactggcagcattttgcccctgccctagagagatttgtggaactttgaactttagagacataatttagggtatctggcagaagaaatttctaagcarcaaagcattcaagatgtgacttgggtgctgttaaaggcattcagttatataagagaagcagagcataaaagttcagaaaatgtgtagcctgacaatgcga

SEQ ID NO: 45949 - DNA, 201 bp, Homo sapiens
gtccctactggggcactgtctagtggatctgtgagaagagggccaccatcctccagaccccagaatggtagatccactgacagtttacaccctgtgcctakaaaagccacactcaatgccagcccataaaagcagtcgagagggagcctgtaccctgcaaagccacagggacggagctgcccaagaccatgggaacccacc

SEQ ID NO: 45950 - DNA, 201 bp, Homo sapiens
acaaagaaaaactaaaatagcaagtacataatcattctttgaatacagcatctaagacagaacactggaattcaacagaggagtgtcatgaaacacctgargcaagaaaaaaaacagggaagtaaagctgccagcttggtcaggatcacctgggagcttggagagtcaccccagtgtgggaaaatggtatatgccccagca

SEQ ID NO: 45951 - DNA, 201 bp, Homo sapiens
atattagacaggaaagccctttgataccacatgggctctttattggttcctcatcagcaactaccacagtatctggcatattaatgagtgcttatttaataaaaaaaattgattgaatacatgaacgaatgaaaaacaagaatgagaacctaattatcctgtctttttacctaagaatgactgaatttaccccttactcag

SEQ ID NO: 45952 - DNA, 201 bp, Homo sapiens
agtgcagcttccctgacattgctaatggcctctcttcttgagccccatggccctcatctctcagttcccacatcattttatataaattagctattacttgrcatctgtctcattgttacctacacattttacttatttctctctccatctcttatgtatcctttgtattcccagaacgtaaaatggtgctagaacagtaaa

SEQ ID NO: 45953 - DNA, 201 bp, Homo sapiens
gaaacaaaaattctggaactaagaattcaatgaatgaaatacaaaattcatgtgagagcttcaacaacagattttattatgcacaagaaataattttatarcaggaataaaggattttttaaataacttggtcaggcaaaatagaataaataataaaaaaagattgtacaaatcctgtgtaacaaatggggctccataaag

SEQ ID NO: 45954 - DNA, 201 bp, Homo sapiens
aaatacagagcataattcttccttaggtgttgtccaaatatttgttttgtcgcattctagttttctattttatatataagctgccaacttaagctactttaatttagcagtgtagggaattcttatgtcccataaagcaaacttcaatccagtaaccttgaataatatgtccaaaagtctaatatagatctgaattactgt

SEQ ID NO: 45955 - DNA, 201 bp, Homo sapiens
gaagagaatgatgttaagtcaaatataaaggaaaccttattaaaactaacagcagatttttcagcagaaaaattacagatcaggagagaatgagatgatayattcagagagctgggaggagaaaaaccaaaaaaaaaaaatgtcaatccagaacactatacccagcaaaattgatccttcagctataaaaaagaaataaac

SEQ ID NO: 45956 - DNA, 201 bp, Homo sapiens
gagcaacacccccctacagtaatgtgtaatttctttcatatttttttttgaccagtgaaataggagtgtcagttttggccgtcctgcttatccttacttarcatccgtggctggaacacagcaggcagttttttgctttattactgtgcctaggattactttgcaaatgtaaccagatgaatttggttaggattgttgata

SEQ ID NO: 45957 - DNA, 201 bp, Homo sapiens
ttcctaggtattttattctctttgaagcagttgtgaatgggagttcactcatgatttggctctctgtttgtctgttattggtgtataagaatgcttgtgayttttgcacattgattttgtatcctgagactttgttgaagttgcttatcagcttaaggagattttgggctgagatgatggggttttctagatatactatca

SEQ ID NO: 45958 - DNA, 201 bp, Homo sapiens
aattacagatcaggagagaatgagatgatacattcagagagctgggaggagaaaaaccaaaaaaaaaaaatgtcaatccagaacactatacccagcaaaaytgatccttcagctataaaaaagaaataaactctttcccagataagcaaaaactgaggaaatttattactttcctttgttttcgtgactcctttaaagggt

SEQ ID NO: 45959 - DNA, 201 bp, Homo sapiens
cttgggcagtatggccattttcatgatattgattcttcctacccatgagcatggaatgttcttccatttgtttgtatcctcttttatttcattgagcagtrgtttgtagttctccttgaagagatccttcacatcccttgtaagttggattcctaggtattttattctctttgaagcagttgtgaatgggagttcactcat

SEQ ID NO: 45960 - DNA, 201 bp, Homo sapiens
aatgattttaatttgtgaaaatggaaacaggctcctcattctaaagaaacatgaccttgtaatcctactttttgcagacatatttcccttttatgtttccyattatattcccctatatagtttccttttccatcatcagttcttaatttccttattacttagcaaaaacgctatttcttagtgataaattagtaaattgag

SEQ ID NO: 45961 - DNA, 201 bp, Homo sapiens
ggtacaactacagaaaaacaccaaaccataatgataaacaataagaaagaaaggaacgaagtatacacaaaacatccagaaaacaatttacaaaatgacaraaataaatcctcacacataaataataactttgaaggtaaatggattaaattttgctcttaaaagatatagcttggtgactcagacctttaatctcagcac

SEQ ID NO: 45962 - DNA, 201 bp, Homo sapiens
ctcaggtttgtcaaagatcagctggttgtagatgtgtgtggtattatttctgagggctctgttctgtttcattggttgatatctctgttttggtaccagtmccatgctgttttggttactgtagccttgtagtatagtttgaagtcaggtagtgtgatgcctccagctttgttcttttggcttaggattgtcttggcgatg

SEQ ID NO: 45963 - DNA, 201 bp, Homo sapiens
ccttttatgtttcccattatattcccctatatagtttccttttccatcatcagttcttaatttccttattacttagcaaaaacgctatttcttagtgatawattagtaaattgagtgttggaaagaaactcttttaatatacccttattagaagaaagcatttaactcttttaatacacccttattagaagcaagcattta

SEQ ID NO: 45964 - DNA, 201 bp, Homo sapiens
ctacatagatacctcatatttaagtactttctataaaatgtcctgccatcctaaatagattatatattctatttcagggatcatggcttgtacttatattyccaatgtttataacagtaaggatgtaatacctcttcttattattgttatttatgatgataatgtttggtgataacaaacaaaagaaggtcagctttctaa

SEQ ID NO: 45965 - DNA, 201 bp, Homo sapiens
cagagaattagtttttctacatagatacctcatatttaagtactttctataaaatgtcctgccatcctaaatagattatatattctatttcagggatcatrgcttgtacttatattcccaatgtttataacagtaaggatgtaatacctcttcttattattgttatttatgatgataatgtttggtgataacaaacaaaag

SEQ ID NO: 45966 - DNA, 201 bp, Homo sapiens
tctattatttttatttatttcaaagaattttttggttactgccttaatttcattgtttacccaaaagtaaatttattagtccattttcacattgctatgargatactgagactagctaatttattaaaaaaaaaaaaagagaggtttaattgactaacatttcacatgtctaacacttttagtgagttgttgaagttcctc

SEQ ID NO: 45967 - DNA, 201 bp, Homo sapiens
tgaatgaaatcatttacacagaagagaagatttaacaagtccatgatgggaatattatagttatgtttggtaggataactacatttgaagagcattaacamagagatatatttgaaagtttgtcttttagttgtgggtaatttgtctctttgtttcttggctattatctcagtctctttttaggccctactctttaatcat

SEQ ID NO: 45968 - DNA, 201 bp, Homo sapiens
ggcttccatttctgtattggcatattgcattcttctttaaactttttgtatatcacccaactgaaaggaatgcattgtgccactgggcaggaaaataatayggaaataaataagatagaggctactttgctattatatgtaggtatatatgactatacaatttaatgaaaacaattccatatgaatatgccagaacatata

SEQ ID NO: 45969 - DNA, 201 bp, Homo sapiens
tggcttccatttctgtattggcatattgcattcttctttaaactttttgtatatcacccaactgaaaggaatgcattgtgccactgggcaggaaaataatrtggaaataaataagatagaggctactttgctattatatgtaggtatatatgactatacaatttaatgaaaacaattccatatgaatatgccagaacatat

SEQ ID NO: 45970 - DNA, 201 bp, Homo sapiens
tcatgcctggccacaaacaggtatttattgaaagtatgtatctgtaattcctattggcctcccactaacttcagattttagtgctttggcttccatttctrtattggcatattgcattcttctttaaactttttgtatatcacccaactgaaaggaatgcattgtgccactgggcaggaaaataatatggaaataaataag

SEQ ID NO: 45971 - DNA, 201 bp, Homo sapiens
gtatcccctgccctagtcactctctgtatctattaatgtatgttatttttattcatacctcatatttttatctgacatacagtaaatcctcacttaacatygctgataagttcttagaaactgtaactttaggcagcatacatataatgaaagccaattttatcacaaagctaattgatataaacaggagttaagatttta

SEQ ID NO: 45972 - DNA, 201 bp, Homo sapiens
atttgacacaatgttgtttccctctcactgacttccagacataccccagcaggcatctacatggggatggcatcttactttcccaaacaatacaaaagttyaagacatttgtagtcttcatcctacttcctctgttagctaaatcattctattcttatatggttaatttttaaaaacctcatttcaaaactcagagttaat

SEQ ID NO: 45973 - DNA, 201 bp, Homo sapiens
tatcccctgccctagtcactctctgtatctattaatgtatgttatttttattcatacctcatatttttatctgacatacagtaaatcctcacttaacattrctgataagttcttagaaactgtaactttaggcagcatacatataatgaaagccaattttatcacaaagctaattgatataaacaggagttaagattttaa

SEQ ID NO: 45974 - DNA, 201 bp, Homo sapiens
gaaaaatgatttgattttctttttgtagtgcaaacccatgaatgtttatttcatgtttggtgaatatcggttaaaattctgtattctggcgtgagtatctytggtctgagaacacaggcaacaagctggagtgtagtgttctcagtacttaattagttgtttactagactagataccaacagagaactctaatgccacaca

SEQ ID NO: 45975 - DNA, 201 bp, Homo sapiens
cagatcctctgatggtgactcagtaaaaaagttttggaattaaaatatcagtaaagacataatgtgcaatttaatcattaattgatattgaaggatttatraactttggcctagatatctatatttcagatatatgattgactcttcatggaaacacctttaaaagacaaagtcatagtttatattgatacctgtgagtaa

SEQ ID NO: 45976 - DNA, 201 bp, Homo sapiens
tattgttgttccacctctgtttacaagagcaaaaatatgataaatgacttcaaatgtccatgttaccaatagaaaactgggtacatttcctctagttagakaaacacattatacacattgcaaaaattcatttgtctaatcactaatctttcttcagtgcctactgtatagtttgaagtgcccagatactgaccctataga

SEQ ID NO: 45977 - DNA, 201 bp, Homo sapiens
taaggaaagaagccagcttcataacatgaaaatgccaggtgaagcagcaagtgctaatgtagaaggtgcagcaagttatccagaagataatagctaagatygttgatgaagtagttacacttaacaacatattttcaatgtagacaaaatagtctcatggaagaagacgccttctaggactttcatagctaaagaggagta

SEQ ID NO: 45978 - DNA, 201 bp, Homo sapiens
aatgaaggaatttatttaaagatgttttccttttcagaaatagtcacttttttagagaattaaaaagatatcaagaacatctaattaatagttatcttaaygacagatgacagtttaattaaatgtgaaaagcaaatttgaaagcatcttagtctgtaaaactacttcatgtataaaaaataaacatttgacagaactctc

SEQ ID NO: 45979 - DNA, 201 bp, Homo sapiens
aaagagctcaaagacatacacctgtattgggaataaatacacattgcctgtttgcaatatcttgcatccatgtagcattttgtagtttgtattttacctgmatcatttttatgtaactctcacaatgccatttgaaatatgaggaaactggatcttagtgaggtttagtgagttattccagataatataactagtcatggt

SEQ ID NO: 45980 - DNA, 201 bp, Homo sapiens
acgtgagatgggtttcctgaatacagcacactgatgggtcttgactctttatccaatttgccagtctgtgtcttttaattggagcatttagtccatttacrtttaaggttaatattgttatgtgtgaatttgatcctgtcattatgatgttagcttgttattttgctcattagttgatgcagtttcttcctagaattgatg

SEQ ID NO: 45981 - DNA, 201 bp, Homo sapiens
aactcatgcttttctaaacatgcgttgcccaggtctacctctgcatcataattttcactctgccttctgtctctatctattcctgagtgttcccagtacargagtccaagataattgctctatctctgttgtatgctcattctatctattatttgtgtcattcagctggcattcctgactcttatcattacttaactcttc

SEQ ID NO: 45982 - DNA, 201 bp, Homo sapiens
ctccatccttttattttgagcccatgtgtgtctctgcacgtgagatgggtttcctgaatacagcacactgatgggtcttgactctttatccaatttgccartctgtgtcttttaattggagcatttagtccatttacgtttaaggttaatattgttatgtgtgaatttgatcctgtcattatgatgttagcttgttatttt

SEQ ID NO: 45983 - DNA, 201 bp, Homo sapiens
tatcagagactaggattgcaacccctgcctttttttgttctccatttgcttgatagatcttcctccatccttttattttgagcccatgtgtgtctctgcaygtgagatgggtttcctgaatacagcacactgatgggtcttgactctttatccaatttgccagtctgtgtcttttaattggagcatttagtccatttacgt

SEQ ID NO: 45984 - DNA, 201 bp, Homo sapiens
ttgacaatgggatgttgaagtcttccattatcattgtgtgggagtctaagtctctttgtaggtcactaaggacttgctttatgaatctgggtgctcctttwtatggtgcatatatatttaggatagttagctcttcttgttgaattgattcctttaccattatgtaatggccttctttgtctcttttgatctttgttggtt

SEQ ID NO: 45985 - DNA, 201 bp, Homo sapiens
attccgtgaactgcagagttcctccaataaaccagtgtccatgtctccaatatcatgtacattacatctctatctctcaaagctgaatagaggtgtaggargtaaagacaacaaataaagaccctttttaaaattttactcttttatcagccagactaaaatgtaagggaacctatttttgagattgtagttgataatttt

SEQ ID NO: 45986 - DNA, 201 bp, Homo sapiens
tgttaactttctgtctcattgatctgtctaatgttgacaatgggatgttgaagtcttccattatcattgtgtgggagtctaagtctctttgtaggtcactmaggacttgctttatgaatctgggtgctcctttatatggtgcatatatatttaggatagttagctcttcttgttgaattgattcctttaccattatgtaat

SEQ ID NO: 45987 - DNA, 201 bp, Homo sapiens
catattgcttctcagaagggactacactatgtccatgcatgttttcagacactcctttattctttctctttttctcttttttatatcctaaaatatacaartttcaaatatataaaataaaaaatgaaattttgtaaaccagtgcattcacttatcctctttggctatttttaaaactttaaactgaaattacttcctcaa

SEQ ID NO: 45988 - DNA, 201 bp, Homo sapiens
ccccctacagtaatgtgtaatttctttcatatttttttttgaccagtgaaataggagtgtcagttttggccgtcctgcttatccttacttaacatccgtgkctggaacacagcaggcagttttttgctttattactgtgcctaggattactttgcaaatgtaaccagatgaatttggttaggattgttgatactatacctg

SEQ ID NO: 45989 - DNA, 201 bp, Homo sapiens
ttctcgttggtttcaaagaacatctttatttttgccttcatttcgttatgtacccagtagtcattcaggagcaggttgttcagtttccatgtagttgagcrgttttgagtgagtttcttaatcctgccttctagtttgattgcactgtggtttgagagacagtttgttataatttctgttcttttacatttgctgaggagt

SEQ ID NO: 45990 - DNA, 201 bp, Homo sapiens
agttttggccgtcctgcttatccttacttaacatccgtggctggaacacagcaggcagttttttgctttattactgtgcctaggattactttgcaaatgtwaccagatgaatttggttaggattgttgatactatacctggcagcttaacgatttctgaaagtaaaagacatcgtgtcagtttatatctctatctctatct

SEQ ID NO: 45991 - DNA, 201 bp, Homo sapiens
gttctcgttggtttcaaagaacatctttatttttgccttcatttcgttatgtacccagtagtcattcaggagcaggttgttcagtttccatgtagttgagyagttttgagtgagtttcttaatcctgccttctagtttgattgcactgtggtttgagagacagtttgttataatttctgttcttttacatttgctgaggag

SEQ ID NO: 45992 - DNA, 201 bp, Homo sapiens
atagttcctttaaattaatgcctctttgattacaccaagttcaagcctatatctcgttatggctatatgtgatctttaaaataaagtttaatatcagcttyctttacatttattaatctgatttttttcagataaaatttggtttcttttctctcctcttataaaataatcccggagtttggctgctaaggcggtgggatg

SEQ ID NO: 45993 - DNA, 201 bp, Homo sapiens
acttaacatccgtggctggaacacagcaggcagttttttgctttattactgtgcctaggattactttgcaaatgtaaccagatgaatttggttaggattgktgatactatacctggcagcttaacgatttctgaaagtaaaagacatcgtgtcagtttatatctctatctctatctctatctctatctctatctctatctc

SEQ ID NO: 45994 - DNA, 201 bp, Homo sapiens
aatgtgtcccagatattctagtatgttatgtctttgttctcgttggtttcaaagaacatctttatttttgccttcatttcgttatgtacccagtagtcattcaggagcaggttgttcagtttccatgtagttgagcagttttgagtgagtttcttaatcctgccttctagtttgattgcactgtggtttgagagacagttt

SEQ ID NO: 45995 - DNA, 201 bp, Homo sapiens
cctggcagcttaacgatttctgaaagtaaaagacatcgtgtcagtttatatctctatctctatctctatctctatctctatctctatctctatctctatctatctatctatctatcatctatctatctatctatctatctatctatctatctatctatctatcatctatctatctatctatattccccattgggaagtcaa

SEQ ID NO: 45996 - DNA, 201 bp, Homo sapiens
taagtcacagtccaactttatcttcattgctgtacctcattggccctttagcttatttttcccacttatgtttttatttagtaaaaaagagtatatttttrtacaatgcctattaaggaaaacatacaggtgataaaaatgaagaatacttctggggtaaaatcaaatttattggagtggaatgaagttcctcaggcaagg

SEQ ID NO: 45997 - DNA, 201 bp, Homo sapiens
ctggcagcttaacgatttctgaaagtaaaagacatcgtgtcagtttatatctctatctctatctctatctctatctctatctctatctctatctctatctwtctatctatctatcatctatctatctatctatctatctatctatctatctatctatctatcatctatctatctatctatattccccattgggaagtcaaa

SEQ ID NO: 45998 - DNA, 201 bp, Homo sapiens
aaagacatcgtgtcagtttatatctctatctctatctctatctctatctctatctctatctctatctctatctatctatctatctatcatctatctatctrtctatctatctatctatctatctatctatctatcatctatctatctatctatattccccattgggaagtcaaaccacaacatctctttccctcaaaatct

SEQ ID NO: 45999 - DNA, 201 bp, Homo sapiens
gctgaggctggagtgcagtggggtgatcttggctcatggcaacctctgcctcctgggttcaagtgattctcctgcttcagcctcccgagaagctgggattwcaggcacgtgccaccacgcccaactaatttttgtatttttagtagagacggggtttcaccatggtggccaggatggtctcgatctcttgacctcgtgatc

SEQ ID NO: 46000 - DNA, 201 bp, Homo sapiens
tcttggctcatggcaacctctgcctcctgggttcaagtgattctcctgcttcagcctcccgagaagctgggattacaggcacgtgccaccacgcccaactratttttgtatttttagtagagacggggtttcaccatggtggccaggatggtctcgatctcttgacctcgtgatctgcctgcttccgcctcccaaagtgct

SEQ ID NO: 46001 - DNA, 201 bp, Homo sapiens
acggggtttcaccatggtggccaggatggtctcgatctcttgacctcgtgatctgcctgcttccgcctcccaaagtgctgggattacagatgtgagccacygtacccaaccgatatatatatatttttcattttattttcctctttctcacacacatacacggacaatatgagttttaaataattagactatatatatata

SEQ ID NO: 46002 - DNA, 201 bp, Homo sapiens
tctttaaaataaagtttaatatcagctttctttacatttattaatctgatttttttcagataaaatttggtttcttttctctcctcttataaaataatccyggagtttggctgctaaggcggtgggatgtataaagaactctgagagtttatgggctagccaaagaataattttattcttctaagtcatagtggtttatgc

SEQ ID NO: 46003 - DNA, 201 bp, Homo sapiens
ttcttactttctctcaaatgttgtttctctctgagctgagccacttggagctggaagtgggatgacacagggccccactgtggccacatcactggaactgscctaggctagacctgaaatcagcacagcactgggtcttgctcaaagcccactgtaactactacctggctactgcctatgttccctcaaggacctagggct

SEQ ID NO: 46004 - DNA, 201 bp, Homo sapiens
gtccactgacacacttctatgcatgctataggtgaaaattgaattcatctcaagcttagtataacttagagccagagtaccactaatcatcatggacatgaaaaaaaaaatacaatgagatatcacttcacacttcttaggatacctattatcaacagccacagaaaagataagtgttggtgagtatatgaagaaattgga

SEQ ID NO: 46005 - DNA, 201 bp, Homo sapiens
tttcttactttctctcaaatgttgtttctctctgagctgagccacttggagctggaagtgggatgacacagggccccactgtggccacatcactggaactsccctaggctagacctgaaatcagcacagcactgggtcttgctcaaagcccactgtaactactacctggctactgcctatgttccctcaaggacctagggc

SEQ ID NO: 46006 - DNA, 201 bp, Homo sapiens
tacacatatgactatattaaaggtagaatctgctaatgcatcagaaagttccagaacaaatgcttcgatacaacttaaaatataatgaaattgtttctccktctagaaataatggaaagagaataaatacacactagtcaagccttagtatatgctttgaagtaatttttaaaattgttagttaccttgattactatcttg

SEQ ID NO: 46007 - DNA, 201 bp, Homo sapiens
ccaggtgcagaacaatgtcaagactcattcctccacctacccagagacatctgcataatttcttcttcctttactctctttttctcttcaaacattcattwatcttatgtaaatgtagatttactgggcactaacccaagtctcatgggaatgtagccatttgccttcctgctcacctgcccctctttctacctgccctct

SEQ ID NO: 46008 - DNA, 201 bp, Homo sapiens
tctaaagctgaacttcaaattagccctgcaaatcagctcaagccattcccatctcagaaactgaaaactctattcctccagttttggcccaaggacaaaargcctgtgagataattttcaacttatttcatcttctccagctcctcatcagcaaatcctgttggctcaatcttcaaatatatatggactttcactaatttt

SEQ ID NO: 46009 - DNA, 201 bp, Homo sapiens
cttaccaactatgtgagatgacccccgtttctgaagaaatcttctatgtccacaccagatcactaggaggtctcctcctagtgacacaattagacaccctrttgctaaatttcactctcaacttctgactaacatgcctgattgcttattcaacctccctacttgcttttccagtacatttctcaaaataaaatgctctaa

SEQ ID NO: 46010 - DNA, 201 bp, Homo sapiens
tacaataaaatcaacagaacttttctaaggaaatagaagtggaggtatgaaataaagagggaaagtaaagatggttcatttttattggctaagcaaccctrgggatggtgaagccataactgttttcgtgggtcacattttgtgagcaagaccaagagtttaacacatttggattaaatctggatttggctcttgctttcc

SEQ ID NO: 46011 - DNA, 201 bp, Homo sapiens
ggtcccacctccaacactggggattacatttcaacatgagatttggcggggataaacatctaagcgatatcagtcagggattattgtgaatctgtggaccratatggggagtattgctatcttaacaatattaagtcttctaatccatgagcatgagatatgatcatttatttaggtcttctttaatttgtcagcaatgtt

SEQ ID NO: 46012 - DNA, 201 bp, Homo sapiens
aagaacagaggactgcagagctgggtacttgattttacttggtatttctattttctcacagctctaagcacaattccactatataaatacttgttgaaatmagtttttcagaatacctgaaatttagcaagattatcaacctaagttacctctgttttcctcgatcagatgaatctagttattggttaacatagggagcac

SEQ ID NO: 46013 - DNA, 201 bp, Homo sapiens
gagctgggtacttgattttacttggtatttctattttctcacagctctaagcacaattccactatataaatacttgttgaaatcagtttttcagaataccygaaatttagcaagattatcaacctaagttacctctgttttcctcgatcagatgaatctagttattggttaacatagggagcactaatttaactttctgaa

SEQ ID NO: 46014 - DNA, 201 bp, Homo sapiens
catcaattcataaaaactgaaaattcaaaggatttacaaaaattatcagttttacttacttctcatcttcattttaaaggtcaaggaatttaagcataggaaaagtctgagattggcctaacaaaaaacaactagtttagttaggacacccaagtatcctaacttcaagttccattaatatcccaccgtaacacaagccta

SEQ ID NO: 46015 - DNA, 201 bp, Homo sapiens
tgcatttaatttcccatggccctgctaccacatgagttcaagtgggcagagaaatgtcatctgagagaactgacacatttgagaactgccctaatgatacygtagaaatgttccccaaatctcctgttgcctcactaataaattatctctggttcatgaacttatataaattctctgataatagggttacagatttaacct

SEQ ID NO: 46016 - DNA, 201 bp, Homo sapiens
tctttattcattcatccaatgaaagacacctaggttgcttccatctcttagctattgtgaacatggaagtgcagatatctcttaggcatattgatttgaattttttttttttttttttttttagacagagtctcattctgtcacccaggctgcagtgcagtggcatgatattggctcactgcaacctccgcctcccaggtt

SEQ ID NO: 46017 - DNA, 201 bp, Homo sapiens
ggatatataccaaaagagggattaccggatcatatggtagttctatttttaattttttgatgaacttccatattcttttccataatggctatactgatttycattcccattaacagtgtggaagggctcacttttctgctcacccttgccaacacttataatctttcattttttgtataatattcatccttacaggtgtga

SEQ ID NO: 46018 - DNA, 201 bp, Homo sapiens
catttcatgagtggaaaacaagacaaacaacatccctattttcatgtaagttaagttctagtagggataaaataaaaaatgtaacccacctgccaaaaaarggaaaaaaatgaagaaaaaatataattttaggtgaaaatcatgaaaaaggacctaaagaaaatatatacactaatataagaaataaatgaaatggggaaa

SEQ ID NO: 46019 - DNA, 201 bp, Homo sapiens
aacaagacaaacaacatccctattttcatgtaagttaagttctagtagggataaaataaaaaatgtaacccacctgccaaaaaaaggaaaaaaatgaagaraaaatataattttaggtgaaaatcatgaaaaaggacctaaagaaaatatatacactaatataagaaataaatgaaatggggaaaagggttaactttagtt

SEQ ID NO: 46020 - DNA, 201 bp, Homo sapiens
tatagaaaggattgaactccttgtgggaaaaaggatatatatatgaaatgtattgtgaccctgaagtcttaatgtattactactatgtcattgctgtcctggcttctatgtaaacacctcagcctgaatgttttcagcttcaacttctatatttgtttttggcttcttttgcttgaatcaagtgagatagcaacagtaatg

SEQ ID NO: 46021 - DNA, 201 bp, Homo sapiens
aaagagatctcttacatggattttagaaggaagcagtgcatgggtaattatattaaaccctgtttagcacaatgacattagataatcaaactcaggtaactgtaactagaggcaactagtaaatgtaccatgtcaacccaaaataatgtctgtgtagaatctaaaggacagaaacattggtggcttatccaaagttccaaa

SEQ ID NO: 46022 - DNA, 201 bp, Homo sapiens
aagagatctcttacatggattttagaaggaagcagtgcatgggtaattatattaaaccctgtttagcacaatgacattagataatcaaactcaggtaactgtaactagaggcaactagtaaatgtaccatgtcaacccaaaataatgtctgtgtagaatctaaaggacagaaacattggtggcttatccaaagttccaaat

SEQ ID NO: 46023 - DNA, 201 bp, Homo sapiens
taaggtgggaggattgcttgaacccaggaggtggaggtagcagtgagcggagattgtgtccactgcactccagcctgggtgacagagtgagagactgcctaaaaaaaaaaaaaaagaaagaaaagaaaagaaagaaaaaagaaaaaaacaacatttaatttttctagatgtataatgattttttaaaaaaagagaaaaaaa

SEQ ID NO: 46024 - DNA, 201 bp, Homo sapiens
gcatttaatttcccatggccctgctaccacatgagttcaagtgggcagagaaatgtcatctgagagaactgacacatttgagaactgccctaatgatactrtagaaatgttccccaaatctcctgttgcctcactaataaattatctctggttcatgaacttatataaattctctgataatagggttacagatttaacctg

SEQ ID NO: 46025 - DNA, 201 bp, Homo sapiens
ctattgtttttgtaagaagcaccaagagtgcctgggtcttagggtcaccatccctaagattaatcttggctctttttattagtgacagtatgacatttagwaatatatatatatatatttctctgagatactggttccttatatttcaactcagagaatacctaccttgtaatattataattagaaataatgcatataaag

SEQ ID NO: 46026 - DNA, 201 bp, Homo sapiens
aaggagagggaaggcttcatttaggaagcttctttagctctgtgtgtgtttgtgtgtgtgtgcacgtgtgtgtgtgcatgcacaagtgtgtgtgtgcatgygcaagtgtgtgtgtgtacataatgttggggagtatcaagaggaagaaatagtgactagtttttattctttaagcgttaaatttcctcccctttataattt

SEQ ID NO: 46027 - DNA, 201 bp, Homo sapiens
gcattgaaaacctttataaaagtgcattctctttgtcttctagaatgtttgcccagatacatttggagaactgcagaaagatattcaccactcagtatacmcacacacacacacacacacacacacacacacacacacacacacacaaaacacctacctatctacataaatatgaaacaactgataaccattaataacatg

SEQ ID NO: 46028 - DNA, 201 bp, Homo sapiens
acttaagtgtaaatatttcagctgtgatatttccatgttcgatttccctctcaaaattcttaataaccagggtttaattgcacgactgccttcccatacgrtagctttgtaataatttgaagcaaaaagtaaaactatctgattttcaggtaagaaaattgcagaatttattttaaacaatatttagtgactaagattgct

SEQ ID NO: 46029 - DNA, 201 bp, Homo sapiens
ttaataattataatttctcatttgtttagcatcaccatctttctctcttatagattctcttcatcagaagtaaaatgttcacatttctgtcgtcttaaaawaataactatctgttaaggtttagtactagattgtatatatgttacttttcaaaaaagaaacatgaaaaatctttttaattgtgcaaatatctttaaagag

SEQ ID NO: 46030 - DNA, 201 bp, Homo sapiens
gagtacttaagctggttcactggtaattcaaaaatggaaaagaaccctggccagtttctcggccccaagggcagagacagacagatactccttctctaggrcttcaggatcccactgaagagtggcctcagccaaagatcattggtttctaagagtaaagtaccagactgttgagggaagcagagagaaaaaagaagggag

SEQ ID NO: 46031 - DNA, 201 bp, Homo sapiens
ttgtagggtactactcaagaaatctttgcccacactcatgttctggagagtttccccgatgttttcttttagtagttttatagtttctagtcttagatttytgtatatggtgagagataggggtctagttttattcttctgcatgtagagatacagttttctcagcaccatttattgaagagactgtcttttccccagtgt

SEQ ID NO: 46032 - DNA, 201 bp, Homo sapiens
ttttggagcattttggatttcagatttttagattagcaacgctcaacctgtatagcacatttttcacagtactaaaacacaattgtgtcagagaatgctcscataagagctccagtttatctcagacaatgcattctgtattttaggattaaagaagaagacatttccaaattgttcctccttctgagacctcttctcttt

SEQ ID NO: 46033 - DNA, 201 bp, Homo sapiens
ttcattctggcccttggctgggtgtgagtatgaaacctgaaatttatgagtggagaaaatagaagttgaattggaacactatactggctaaatcaattgayttattggaaaggccagtgtgaattataggggttttcttctgtatttgtggctgaatgagagctgagaagtgctgaattgtagattaagagaattttgaaa

SEQ ID NO: 46034 - DNA, 201 bp, Homo sapiens
ttggttgagtctttgggttttctatacataatattatataatctgcaaacagagaaaattttacttctttttttcctgatttgtatgccttttatttcttyttcttgcttaattgctctggctaggacttccaggaatatattaagtggaaatggtgagagtgggacaatatgtttaattttgtaagaaaccgccaaactg

SEQ ID NO: 46035 - DNA, 201 bp, Homo sapiens
ggaagcttctttagctctgtgtgtgtttgtgtgtgtgtgcacgtgtgtgtgtgcatgcacaagtgtgtgtgtgcatgcgcaagtgtgtgtgtgtacataaygttggggagtatcaagaggaagaaatagtgactagtttttattctttaagcgttaaatttcctcccctttataatttctgtaattcttccagttggccat

SEQ ID NO: 46036 - DNA, 201 bp, Homo sapiens
ggctttggtgagtatctgtgatcataggataatgttttcttgtttacttaagccctcacttctttttactcctcactaagaagatctctagcaaagagaaaaaaaaatagttttagactttcctttagggaagggactctttttcttcaggaaaatatgctgcaccgtgttgggagatgagactctgatggatgaatatat

SEQ ID NO: 46037 - DNA, 201 bp, Homo sapiens
ttattggatttgtaattcaatgagaaatacagccctcacataggtgtctgacttaatgactcctgctgaagttgaattgtgagatgttatccatctcctcyctgaaatatgaattctagtttagcagaattcgttgtccttagggagttggtaatatcacctttggtatgacttaaaaaaaagcccattaacgatatattt

SEQ ID NO: 46038 - DNA, 201 bp, Homo sapiens
tttgctgacatacatatgacaattcaggtgcatattttacattgtttttaattttttattttgaagtaattttataattacagaaagctgaaaaaagtacrgagatcctataggcctttcacctaatttcccctaatgttaacaacttgcatacccagggttcatttgtcaaaatgaagaaatgaccattggtattatact

SEQ ID NO: 46039 - DNA, 201 bp, Homo sapiens
gcagaattcgttgtccttagggagttggtaatatcacctttggtatgacttaaaaaaaagcccattaacgatatattttaagatgaaaagtaatagaatgmaggttattcatatatttattttcagcttgacagttgaaattacatgctaacattttactcttatcgtaaaagttataaaacattcctaaattaacttata

SEQ ID NO: 46040 - DNA, 201 bp, Homo sapiens
ctatgtttcatccagtttcatggatagagaaattagcaaagttatatgatttacctaagaatttaatttccatgaaaaaaagttatagttaaggaaagccaaaaaaaaaattgtggaaagggaaagctactaatgaagacacatggactgaaacatcacatctgtcactagccagctggagagttcttttaagtcatttcc

SEQ ID NO: 46041 - DNA, 201 bp, Homo sapiens
ttataaactcttacaatatggagctaaattaaagaccacatcaaggaaaacaacaattgtcaactagtggcttcagactttcttttggggagggcagaatrgggggaaactggagaagaaaggaacaacagaaaggggatgacacagcatgttatcccctaggggaatggctggagtggcctataagaacaagagttttta

SEQ ID NO: 46042 - DNA, 201 bp, Homo sapiens
gacactataatcttgataaatcacttaatgtttcagagagactcgatttcctcacttacaaaattgggataataataattcctcatagggctgctatgaaktttaaatgtttcttgtgtttggtaacacattccaagatcaatagttacacaatataatcttattcagatggcagtgattgaaaaagcctttgacagttat

SEQ ID NO: 46043 - DNA, 201 bp, Homo sapiens
tctatcatgtatatttccttcctcaaaacttcgaacaccaagttttattttgtgtgagtcatggaaaagagctgacttgtacatatggatgctgctctgcrgaatgctgtgatactccgtaaactgaactgctttgatagaagctgcagcttagctccctgagcatgtaagcctatggtgatttacagaaaccttggggag

SEQ ID NO: 46044 - DNA, 201 bp, Homo sapiens
gctgtgaacaggtgactgagtttgtgccaatccatataaaataatgaacccacggtcttgaattgtgactcttagcttttaaagagcttttgtgttagtgkagttaaaacaatttagcaccttgaaatcaagtaagatatttcaaaggtcattaaacaatcatttttgggtgctgacttctgaaatattttattacaattt

SEQ ID NO: 46045 - DNA, 201 bp, Homo sapiens
tatatccagaagataaatatattatatttaaatatataatatataatgtacatacataattttatgtagataaaacatacgtatatgtttgtagatatagwtatataaaatatacaaagacagaagctaaccacttgggaatgggcaagtgacttaaatatactaataacaaatgacaaaacccaaatatctaatgaacat

SEQ ID NO: 46046 - DNA, 201 bp, Homo sapiens
acactataatcttgataaatcacttaatgtttcagagagactcgatttcctcacttacaaaattgggataataataattcctcatagggctgctatgaagyttaaatgtttcttgtgtttggtaacacattccaagatcaatagttacacaatataatcttattcagatggcagtgattgaaaaagcctttgacagttatt

SEQ ID NO: 46047 - DNA, 201 bp, Homo sapiens
tattaaactgtagtgagaaaagatgaaaagcacctcagtttggttttgttctaacatctttcatgcctggccacaaacaggtatttattgaaagtatgtayctgtaattcctattggcctcccactaacttcagattttagtgctttggcttccatttctgtattggcatattgcattcttctttaaactttttgtatatc

SEQ ID NO: 46048 - DNA, 201 bp, Homo sapiens
taatcttgataaatcacttaatgtttcagagagactcgatttcctcacttacaaaattgggataataataattcctcatagggctgctatgaagtttaaakgtttcttgtgtttggtaacacattccaagatcaatagttacacaatataatcttattcagatggcagtgattgaaaaagcctttgacagttatttctatc

SEQ ID NO: 46049 - DNA, 201 bp, Homo sapiens
aagacatacacctgtattgggaataaatacacattgcctgtttgcaatatcttgcatccatgtagcattttgtagtttgtattttacctgcatcatttttrtgtaactctcacaatgccatttgaaatatgaggaaactggatcttagtgaggtttagtgagttattccagataatataactagtcatggttgagtcagtg

SEQ ID NO: 46050 - DNA, 201 bp, Homo sapiens
tctttataaacttttcatacgtgcatcatctgtatccatatctgtactatacttcagggaacctatccaaaggaaataatataaagtgataaactttttatttttttttgagatggagtctcgctctgtcatccaggctggagtgcagtggcacgatctcggctcactgcaacctctgcctttggggttcaaacgattctt

SEQ ID NO: 46051 - DNA, 201 bp, Homo sapiens
tgttcatcctacacatcactctcgtttcctaccctaatctcagcttgtgttgcctccttacctgggttttctctccatctatctcatctattataacatasctcaagtctctctctaagacatttattctcagctatctcagttttcaataaattacattatctattaattcctaatacattttagaattgataaaatagt

SEQ ID NO: 46052 - DNA, 201 bp, Homo sapiens
aaattcatgggcatatagatcatacttctacagaagaggtgactactcattcattgttagtgaatattctttgtatattttctcctctgcaaaattcactrgggaaaaaatagtttgtacaagctatcatttcatctttaattaaagagaaattacatagtgtattatatattattaatcttccaagaacagacattgttt

SEQ ID NO: 46053 - DNA, 201 bp, Homo sapiens
cctcaggggaaaatggaactgagcaacaggagaacagaaaaaaatcagagaaaaacttttgcttctgaagctgcttctaagtccttcattttggcgtatattttttttttctgagccccaacaggataactatagaattatttaaaataatagaaaaattgggatgattaaacaaatggttgcctgccacatgaaaagagt

SEQ ID NO: 46054 - DNA, 201 bp, Homo sapiens
atcagaagtaaaatgttcacatttctgtcgtcttaaaataataactatctgttaaggtttagtactagattgtatatatgttacttttcaaaaaagaaacrtgaaaaatctttttaattgtgcaaatatctttaaagaggtaactattctaatttctactttctaaaccttaagtaattttttaaatgacaaataaaattg

SEQ ID NO: 46055 - DNA, 201 bp, Homo sapiens
gtgtctaggacattttattgtatgaataactttaaaggaatcatttgtatatgaatgtttaagaagacatgactgcaatgaattccctgagaccacatttkcagggtatccctggcctcccccatgagagaggagaaggctattaagtgaaccaagaaagataattagaatctgatcattgagttcttccctgggctatga

SEQ ID NO: 46056 - DNA, 201 bp, Homo sapiens
aaatgtgcttgttctataataacatattctctttcttttaacctcattttaaaaatgatgcatttgttgagttcaagtgcatctacttcagaaaaaaaaawtttttgaggagagaaccaaatgacttttgctgtgtttaaagagtaaacccattccatcagaagcaaagtctaaagagattcaacagtaggaagttgtata

SEQ ID NO: 46057 - DNA, 201 bp, Homo sapiens
atggggagggacagaatgaaattgtaaaaggggaataaaaagctatagccaaaaatgagataaatggttagtgagaagggaaaacaaaacaaaacaaaacmaaaaaaaccatttaaaccaacataagtttacatggctgttccttctggtcacagcttgaatgaatgagctgagaatcagattagccttttttggccaccc

SEQ ID NO: 46058 - DNA, 201 bp, Homo sapiens
atgcaatctaccaattcaaatattaatctcggccagtaacccaccttcacagaaatgctcagaatgatatttgatcaaacagctgggaaccattgttctartcacattaacacgtaaaattaaccatgtcagctccaaacttctcgaatttcatcttttactactgtcctccactccttttctgctccagtaattctgtct

SEQ ID NO: 46059 - DNA, 201 bp, Homo sapiens
ttaagtatttgctagctcctttctttctctcaggagtaactcaagggcttgcaatgcgtgaacgagtgctcttaaagtaatagggaaagggtactgaaccaaaaaaaaaaaatagttctacctttaaggtgcagtgatgtgaagttgaaataccactgtggctcagagaagttttatgcaagaaggttctcaaaagatatt

SEQ ID NO: 46060 - DNA, 201 bp, Homo sapiens
ctcagaaaatagaggcgaggagtcaggtgctttatgttcttcctctctgtaccctcatcctctgaagccaaagttacactccataaaaataacacagaatrtgagagctaatagagcctcagtttatccttctttatatctccccctggaatgtcctgggcagtgccttatttcccatttgcaaatgtgaggacaatatgc

SEQ ID NO: 46061 - DNA, 201 bp, Homo sapiens
atttggattaaatctggatttggctcttgctttccttcatttttatgagactttagttcttgaaaatatttcttaatcttaagcctcaaagcaccatgatrtatttttaaatattttaaaggtagtttttgaacagaaagttatgaaatgatttgcaaaattagcccccaaacaatagcaaatggatttccattcaaatga

SEQ ID NO: 46062 - DNA, 201 bp, Homo sapiens
acatttcaacatgagatttggcggggataaacatctaagcgatatcagtcagggattattgtgaatctgtggaccgatatggggagtattgctatcttaayaatattaagtcttctaatccatgagcatgagatatgatcatttatttaggtcttctttaatttgtcagcaatgttttgcagttttcagtgtacaagtctt

SEQ ID NO: 46063 - DNA, 201 bp, Homo sapiens
tttattagttggaatattaacgcaatttattgttaataaataaatttattgagaacacattatgttctagacatcaggtcacttatttaatataaatcacrtaatttaacaccacaaccatagttttctgtgtcaagcagtctatcaaaaactttgattagatctaagccagagctgtgtagcaaggagtgcaatcatggt

SEQ ID NO: 46064 - DNA, 201 bp, Homo sapiens
aaaacccacaggaaaaacctcataatgttttaagaaagtttacaaatttgtgttgaactacaccacattcaaagctgtcctgggccacagggctgcaggtyggagaagtctgacctaaagtgtcttatttaaacatcttatgtgaatgtattcataagttgttctctaaaataacattaggcaaagtgttgttacttttat

SEQ ID NO: 46065 - DNA, 201 bp, Homo sapiens
tttagatgttaatttttggttttacaatgtccattcattcttttaccaaacatgattgagcacaacttgtgtgttaaggcctgtgcgaggcacttatttcwtctgaattttgtccatttacatataagcttctcatggagtctgaggtgcagccgcattctttttctttttttttttcttttttgcttgagatcacagaat

SEQ ID NO: 46066 - DNA, 201 bp, Homo sapiens
acctccaaatttcaatagtatcacctcttttaaggcgcagaaggtacagaataaacctcataaattataattttgtaaattcctttatactagttaccttytctgtggcacctggatattgtgtatgaaactggggaaaagtaaaacaaaagatgacagttaagctcattttcacaaattatctttattataaaatacagt

SEQ ID NO: 46067 - DNA, 201 bp, Homo sapiens
aaaacaaaagatgacagttaagctcattttcacaaattatctttattataaaatacagtaatttataataactaggagtaagaataaagtggttgatatgytttggctatgtcccctgtgtccccacacaagtctcatcttgaattatagtttccataatccccatgtgtggtgggagggacccggtgggaggtattgaat

SEQ ID NO: 46068 - DNA, 201 bp, Homo sapiens
tgaaatcttctgatttgtaaaatttctgaatagtgtgaattatttattaaaattctaaataagaatgcctcattatttgttgttttataattctcaaactygaaaaacattatcaaaatgccagggtatgctgattgatagtgtgttacactcaaattggactaagagagtttgatcggcgcaggagctgcattctttgaa

SEQ ID NO: 46069 - DNA, 201 bp, Homo sapiens
tattaaaattctaaataagaatgcctcattatttgttgttttataattctcaaacttgaaaaacattatcaaaatgccagggtatgctgattgatagtgtrttacactcaaattggactaagagagtttgatcggcgcaggagctgcattctttgaatattgactatggaccaggcactgagctatgcattttatatactt

SEQ ID NO: 46070 - DNA, 201 bp, Homo sapiens
cgtgagccactgcacccggcctcttttgactttctgctcaaactgtccccttacttatagttgaagaagacaagaattgcattttccaagccatgattgtycctagtacctagtagtagtagtagatgagtgatgttcacaagctatattaatgtgtaaaataagtaagcatcatgactgcctgagagtaaactgggaata

SEQ ID NO: 46071 - DNA, 201 bp, Homo sapiens
tctagcaggctatttgaagagctattagtgtattttgaccctggaagaaaagaatacattttgtgctttagtgaaatatttattttatgtggttgataaayacttatagaatatttactcagtaccagttactgttttagaaactttatacatcatttaattctcataaccattctgtgagataggtgttattattatccc

SEQ ID NO: 46072 - DNA, 201 bp, Homo sapiens
tttactcagtaccagttactgttttagaaactttatacatcatttaattctcataaccattctgtgagataggtgttattattatcccaggcttttagatkagaaaatgggcacagaggttaaataacttgtaaaagttcaccaagttgtctggtccagaacttaaaacttcaggctattttgcctctcagtgctgcattc

SEQ ID NO: 46073 - DNA, 201 bp, Homo sapiens
atagaaagaaaatagctgcttttgccctgagtcttagacgccaagttgatatcagtaatttagggccattatcaaacaaaaatggccctcactatggctastctgttgaacccagcatgtcttctcagttctacattttcagaggctgaactctattccaagggggtaattttgacttggtcattgtcacataatgtgggt

SEQ ID NO: 46074 - DNA, 201 bp, Homo sapiens
gctagtctgttgaacccagcatgtcttctcagttctacattttcagaggctgaactctattccaagggggtaattttgacttggtcattgtcacataatgygggtattaccgtacatgaccacacttcccagggataatggcacagctgggctgccaattgggcttaggagaatgacgtcgggtttattttgctcccagca

SEQ ID NO: 46075 - DNA, 201 bp, Homo sapiens
agttctacattttcagaggctgaactctattccaagggggtaattttgacttggtcattgtcacataatgtgggtattaccgtacatgaccacacttcccrgggataatggcacagctgggctgccaattgggcttaggagaatgacgtcgggtttattttgctcccagcaatcctaggaggacaaaacttgctttggttg

SEQ ID NO: 46076 - DNA, 201 bp, Homo sapiens
catacaagtttaaggcacagaataatcaagagatttattaatttgaacctaggatatattactaaaaacacagaaatttcttatattttctgttaaagcartctcagtccacatttattaaaatactcatctagcttggtttttgggctatatcctcatcaaacgatggtaataggaaatgaaccaaagtgacatctgtag

SEQ ID NO: 46077 - DNA, 201 bp, Homo sapiens
gagaccagccaggttaacagggtgaaaccctgtctctactaaaaatacaaaaattagctgggtgtggtggtggtcacctgtaatcccagctactcaggagsctgaggcaggagaattgcttgaatccgggaaggggagaggttgcagtaactccatcttaaaactccatcttaaaaaataaaaataggccgggtatggtgg

SEQ ID NO: 46078 - DNA, 201 bp, Homo sapiens
taaaatactcatctagcttggtttttgggctatatcctcatcaaacgatggtaataggaaatgaaccaaagtgacatctgtagtctcagcaacttaaagtytgcttgcaatgattagttttcctttcccaaccctctgaaataaggtcttctcaagctttaggatgcgttcaacattaagtcttcagttaagacatcttgc

SEQ ID NO: 46079 - DNA, 201 bp, Homo sapiens
gttcaaaagaaagtggacaagaaaaagaaaaacagtcgttactatttttggcatggattttcagtggggcaaaaataacatgtctgattatttctctgctytgtatttagcacatccatcttttgatattgccccctaagtagttctacttttctttttattatttatgtttgctaatcaagctttcaaagccttgtggat

SEQ ID NO: 46080 - DNA, 201 bp, Homo sapiens
tttatagttataatcaatttgagtaacagctgagaaagtacaatagaaatcatatagttttacttttatcccatcaaagtcatgaaatattctgacagggmaatttcatctacttgcctcttcctataaatctttaaaaatctgttttaataataggctaatttccctaccacataaaccaaatatactctcagtggattt

SEQ ID NO: 46081 - DNA, 201 bp, Homo sapiens
taaaactaaaaatacttaatacttaacatacttaaaaacctttaaaaacttaaaactaatgatgaaaatattattttcattaattacccttatgttttacrcttgattaacaaattgcttcgaatctagaccatttttatatagcatctgaaagatacgtttttatttcctaacttgttttcttgccttctaaaacaggtc

SEQ ID NO: 46082 - DNA, 201 bp, Homo sapiens
ttagcatttgctttatgacatggtaaaaggattgaaagtttttggattggctagcagccaaaatttttatattttaatttttgagtagtttcttataaaartggataatcccaattttaactcacataattatgtatctaggagtccaaaaaatcagtcttgtcttaaagtcttgaaatacttaaaactacttgaaatact

SEQ ID NO: 46083 - DNA, 201 bp, Homo sapiens
tgtttccaaggatcttttggatgcttggtatgtttgttcgcttttatctttatagttttaagattatgtctgccctcttggtattttgtctgcatcccagwtgggaggagaacaaaggggaaaaagtcaaaggaatatattctagtgaatcttgactactaatggtggggggaaaaattcttccctggggaactgtgccta

SEQ ID NO: 46084 - DNA, 201 bp, Homo sapiens
tgtaccagctattaaactaagcataaaagccatcatgattaaaacagtatagtactgacacaaaaataatcaaatagatctatggaaaacagtacagaacrtataatcagatccatttggaataggaattttaggtagcattttggataattctagaaaaataatatatttgttttggcaattggctgtctattttggaag

SEQ ID NO: 46085 - DNA, 201 bp, Homo sapiens
gatacaaggaaacacatgaaattagtaccaccattcttttattccctgccatctgtgtcaacctaacaaaatacaagctccaggagtcacccatattcatkaatgaacttatcattatactatttcattctctgtatctctagatatttcctccctttgtttttcatctcccaacccttcccataattctccagaaccata

SEQ ID NO: 46086 - DNA, 201 bp, Homo sapiens
gaggaatccaccagctccagtttcccagaacttggcttttaatgagagggtttgtgagagtggccccataaaatctctagcatccatcgtattattttatkaggaaattcattcatgatatgctgcagtaatatacattcctttttttgtgttcttcacccatcatggtgccaacctgtagcagagctcatcatgggatac

SEQ ID NO: 46087 - DNA, 201 bp, Homo sapiens
acaagtgaaatagaggcatatagaggataagctgcttgaataaattgtatcatataaacacatcctcagaatacaatggaaacaccaaagaaaggtacctracccaaccctcttggctcagaaaaggcttcctagagcattctaggcaaaggaaagagcataacgaggagacatgggagagcatagtgtattctgagttct

SEQ ID NO: 46088 - DNA, 201 bp, Homo sapiens
ttccagcagagctctggtcattgattacagactcacctggcttaacttgaaaaatgatttttcccaagcctcctgtctgagaggcctaattcagtccttgyagatataaaattattactgcccctttagccatgaatgccaacattattggtgataatctttggttagtatgttagtatatgtcagaataacaatactgtg

SEQ ID NO: 46089 - DNA, 201 bp, Homo sapiens
gttataagacaaaataaaattaaataatggtgttaataaactagagctgttattgtaattgtattatgctgcagtggtgaattgactctgctatttttgtrgctatgcacatagaatagatactatttagttggcatgaattaactggccgttcattggaataatttttttccaggactagcatacatcaagcagatactc

SEQ ID NO: 46090 - DNA, 201 bp, Homo sapiens
ttaggttactattactaacatcatttcttctaggtctttcataatttatttttacttttattctattgaagactttgttatgttattgtaaatcttttttyggacaaagggtaaagacaaagttagaaaataaaataattaaaaagacctttttttaaaaaaatgaataatgtacattttcttaaaatgtactattcataa

SEQ ID NO: 46091 - DNA, 201 bp, Homo sapiens
atttcagttagctattagcatgctaagaaaacttgggtaattccacccacttcacattaatttgctcttgttgattatttgctgtaatgtgttaaataatkgctcttgaatcggtcatgaaaagcagtcatttacccgtttgattgctataaatatctatgaagtcatccaaatgtgcttccatattattcagaactcttc

SEQ ID NO: 46092 - DNA, 201 bp, Homo sapiens
actttatttttgataataacatttgaaaatcattgaaatgctattcattgcttttggaaggtcaccactcaaatcaaatggtcaacattctatcatctgartaagtcactccttagaagaattttaaatgcctttgaggtgcattatgtatttcaggttcatgattcatctgctttggggaaaagtattatttcctggcac

SEQ ID NO: 46093 - DNA, 201 bp, Homo sapiens
caggttcatgattcatctgctttggggaaaagtattatttcctggcacgtgttcaaatgctgtaatttaagacatttatagtaaattattataccactgcygcaaatgcaattgatatgaccccaggagttatgcctggggaatagttgactcatctagttggatctggctgattgttctttagcaagctagagaaaaaga

SEQ ID NO: 46094 - DNA, 201 bp, Homo sapiens
agtaaaggaattggtgagaaatgcattcaatataggaactttacttcttatactgagaaagattttaatcatatatggaagtagctcagatgaagggaagmaatggaaggctaatcaggactttacttgacagaaaaaaaattgttgagtttctaatacacgaatattcttgcaaatgatccagaagagaaagtgcagaat

SEQ ID NO: 46095 - DNA, 201 bp, Homo sapiens
aagattgcaagagggattttgctaagctaaaaacccttgcagagaacgcctagaatggcattgcttagatttaagctttttcttggaaatgtgagaagtgrcgcagctgacagtcttgtcttgttcttccagtggtggaaggtgataatgagccatcagggtccaaagggtaggctgttagggaagagaaacattgtgcct

SEQ ID NO: 46096 - DNA, 201 bp, Homo sapiens
ccccctccccccaccccaaaacagtccccagagtgtgatgttcccctttctgtgtccatgtgttctcattgttcagttcccacctatgagtgagaacatgyggtgtttggttttttgtccttgcgatagtttactgagaatgacgatttccaatttcatccatgtccctacaaagggcatgaactcatcattttttatggc

SEQ ID NO: 46097 - DNA, 201 bp, Homo sapiens
gataccttgatgatactactccatcattaaatatcagtttcctcataaatgaaatatactattagtatctatattataaagttgttttgacaatgaaatgmaataatttgtgtaagattgtaagatgcttaacatatacactgggagctaataagtcctcaagaaatgttgtattattatttttagtatcattgtcaggta

SEQ ID NO: 46098 - DNA, 201 bp, Homo sapiens
ctcattacttacaaatcaacctgttaacatgcattaaatctttgctcccacctttgaattatacttcaaagtaaatggtacacagcttacagaatttctcrtactttcaaaactggaattactgttatttcttaaatcagcttgtctatatgtccagcatatcaagtaactcaaattggaatggctatgcacacatattaa

SEQ ID NO: 46099 - DNA, 201 bp, Homo sapiens
agggcctcaggctgcccccacttgtggaggaaggtgaaggggagcaggcatcacatggtttcagaaagggagagagatgccagcctctttttaacaatccrttctcaaaggaactaatagagcaagagctcagtctttactttgagaagggcaccaggccattcatgaaggttctgcccccatgactcaacacctcccaca

SEQ ID NO: 46100 - DNA, 201 bp, Homo sapiens
atcacttccccaatgaaatttgaataccacagatatttaagtacataacatatctgttaatgtactttatgtacattatatgtgctttatacattaaaaaagtaagttttttttccccaagaaccagttttcagcctcttgggggtgatatcactcctgttgagcatttatgggctttatttaatagagaatattctagaa

SEQ ID NO: 46101 - DNA, 201 bp, Homo sapiens
cttcatctagtctatggttgaagcttttaaatgtattttgtaattcattcaatgattctccatttataggatttctgtttgatacttttctacgttatctrtcactttgttacatttctcattcttatcctgaattgtttttctgattcctttgttttgtttttttagaattctcttatatctcactgaaattatttagaa

SEQ ID NO: 46102 - DNA, 201 bp, Homo sapiens
tttttgggggttggtcgtagggacactgggcttttcccatttctttgaatgccaatgaattgactgtatcctaatcccatcattgtctatacaccaattcrtaatgatgtcatgataatcacatcgatctaaaaggcgtaggagagcagcatagcttttattctatttatttttttacttttatttttgacacagggtctc

SEQ ID NO: 46103 - DNA, 201 bp, Homo sapiens
tatggttgaagcttttaaatgtattttgtaattcattcaatgattctccatttataggatttctgtttgatacttttctacgttatctatcactttgttamatttctcattcttatcctgaattgtttttctgattcctttgttttgtttttttagaattctcttatatctcactgaaattatttagaatcaataattgaa

SEQ ID NO: 46104 - DNA, 201 bp, Homo sapiens
ttccatgtacctcaagacttatcagtcacccttctccaagcaagttttgcacttgcttccttttctgtccaggctgcatgcttgcaaactgaaagaggaarcaaattttatctctggttttgaggaaattttttttgggggttggtcgtagggacactgggcttttcccatttctttgaatgccaatgaattgactgtatc

SEQ ID NO: 46105 - DNA, 201 bp, Homo sapiens
gagggggtaaggaaaactattaacaactatacaataatgcctcctctcattatatttgtatgtggccatttaaagtagttaaataaattcccagatacttyagataattcatctatttacttaggtcaaatgactctcaaggtcaaggcttaaaattaaacctgaaatgtaaaagtaaacaactgtttactttttacagaa

SEQ ID NO: 46106 - DNA, 201 bp, Homo sapiens
ggaggggggagggatagcattaggagatatacctaatgctaaatgacaagttaatgggtgcagcacaccagcatggcacatgtatacatatgtaactaacytgcacattgtgcacatgtaccctaaaatttaaagtataataataataaaataaaataaaataaagaaactatctgaatgcaagagaacactcttataatt

SEQ ID NO: 46107 - DNA, 201 bp, Homo sapiens
gggaggtacgagactgaggaagagttcatataggacttcagtgttatctacaatgctttatcctttaaaaattagagcaaaatccaatgggaaaaaaagtkcatgttattattgaggtagatagattattttctatattttatgatctctacttttcttaaacatttataataaaaaatacatattgaataggagaagtag

SEQ ID NO: 46108 - DNA, 201 bp, Homo sapiens
gtgtatcaaatacataacagtgattaactttagagagggaggtacgagactgaggaagagttcatataggacttcagtgttatctacaatgctttatcctktaaaaattagagcaaaatccaatgggaaaaaaagtgcatgttattattgaggtagatagattattttctatattttatgatctctacttttcttaaacat

SEQ ID NO: 46109 - DNA, 201 bp, Homo sapiens
gaagaacaaaataacaatatgtggcacctgggttatgttgccaggaatccccctctaggtttattgaagaaacttgtgcacatattcataaggaaaacccsgtacaagtatgatcattatagagttttttttttccatcaatggggaaatgagcaaatagcagcaaacacagtagttaagacaaatgagctagtttcatat

SEQ ID NO: 46110 - DNA, 201 bp, Homo sapiens
atggtatagtaagtgctgtacttaatttacattctggcacaagtttctcagcctgagggcagcattaaattaaactgtttaaaacaattggacagaagagygtgagtgaaggcttgctgtaccagctattaaactaagcataaaagccatcatgattaaaacagtatagtactgacacaaaaataatcaaatagatctatg

SEQ ID NO: 46111 - DNA, 201 bp, Homo sapiens
agtagttatcaggctaaaataataggttataagatagtatttgcaagcctcatggaagcctcaaaccaaaaatatacaatggatacaatcagaaaataaamaaaacaagaaactaaacattaccagagaaaacaccttcattcaaagggagacatgaagggaagaaagaaggaagagaagaccacaaaacaaccagaaaac

SEQ ID NO: 46112 - DNA, 201 bp, Homo sapiens
ttagttattcattcaattatttatttatatcactatgaactcatggatatttattgtagtctatggagtttaaccttatttcactgaccaaattgtccaayctttgatatagaaagttttttttgtgtttttttggtattgaaagtttttttctttttttaaattttacttttttcctatttcatgattattattacagat

SEQ ID NO: 46113 - DNA, 201 bp, Homo sapiens
gtagaagaaactataaataaagattagagcagaaataaatgaaattgaaatgaaaacaatataaaagatcaatgaaacaaaaagttggtgttttaaaaagytaaacaaaattgacaaacctttaggcagagtaagaaaaaggagagaagatccaaataaataaaatcacatatgaaaaagggggacatacaactgatacca

SEQ ID NO: 46114 - DNA, 201 bp, Homo sapiens
gcagtgcagattgagggcagagtccagtgcatatacagagtgttatgcagcaaaacatacaaattgttgaatgtaaccctgcaaaattaattacagtgttrgaactggaacattcaagggaaatgttcctctctgctctgaaatttagaaaaaaaaaaaagaatgaaaaacgaatgaagtcttcttgccttgactcttaag

SEQ ID NO: 46115 - DNA, 201 bp, Homo sapiens
ctgaaatttagaaaaaaaaaaaagaatgaaaaacgaatgaagtcttcttgccttgactcttaagaccaagaatttttttctctgaaatacaaatcagcttmcattatcttactttatctattctgcttacctttatctcagaaggaaaacaaggtaaacttgactaaataagtgctgacaagatccactttatagtgatta

SEQ ID NO: 46116 - DNA, 201 bp, Homo sapiens
aaaaagaatgaaaaacgaatgaagtcttcttgccttgactcttaagaccaagaatttttttctctgaaatacaaatcagcttacattatcttactttatcyattctgcttacctttatctcagaaggaaaacaaggtaaacttgactaaataagtgctgacaagatccactttatagtgattacataaatgtattctgcag

SEQ ID NO: 46117 - DNA, 201 bp, Homo sapiens
gtttttatgaaaaatgccaaaggattttttaaagaggagattcggccttatgtgaattttcttaacctctagtatattcaatctattgataaaaagaaagrcttactttggaacctaggtttggttgtcaggtctggcactgagtgaaatataatcttatttatgttatttggtgagctattagcactctataatgttgta

SEQ ID NO: 46118 - DNA, 201 bp, Homo sapiens
  misc_feature (1)...(201): n = A,T,C or G, or insertion/deletion polymorphism (see Tables 1-2)
tagaagtagttattgtctaatgagttcagttttacaggctcatttactaccacatagcatgtgccaccctgtagaaaactatctagagtgaaaatttatanttttgagaaataattatttgaatacagtatacattttatatattgggaattctcatggctgcctttgccatactgcacactcttcataattctcaagagt

SEQ ID NO: 46119 - DNA, 201 bp, Homo sapiens
tttcctactctctgtaggagggtagaagcctattcagtaagtaccatttagcaaacacagatggtctaatgacattgaccatctccactaatgtcctccartacttttctactagctcaccccagtgcttaaaaactctccttcacttcgcttcagcagagttgagttccatctctgcctccattgcagcagtattgaata

SEQ ID NO: 46120 - DNA, 201 bp, Homo sapiens
ctctccttcacttcgcttcagcagagttgagttccatctctgcctccattgcagcagtattgaataaaattttccttggctgtttaactcagtcagtgaarttattatttgacaactatgattggctttaggaaaagtcatggacttgcagagttttggctttggttgttgatgtaaatgtggaagcgatacttttttacc

SEQ ID NO: 46121 - DNA, 201 bp, Homo sapiens
aataaatcacatgcccttcacttaccttggtatgtgtaatttttgtcttctttgttgttttttaccacatcttcaacccagataccaggagcatctttgtkgtccacaatcagaattattctagatatttcagataacatttctgtatggtggtaatggtgccacaatgagaagacacaatgatattagatccagtgtgct

SEQ ID NO: 46122 - DNA, 201 bp, Homo sapiens
cgcttcagcagagttgagttccatctctgcctccattgcagcagtattgaataaaattttccttggctgtttaactcagtcagtgaaattattatttgacmactatgattggctttaggaaaagtcatggacttgcagagttttggctttggttgttgatgtaaatgtggaagcgatacttttttacccatattctacatc

SEQ ID NO: 46123 - DNA, 201 bp, Homo sapiens
ccttaggaataatttcgattctgctacactagtagtgtcttgacatcaatgatatttgccctagcagtaattttccagtgatgtgccaagtctcatatcastgtctcgtatcaacatcaatgctatgtacctttcacataaaaagtacaaagttagatggttaaaaataactaattactaatggtctttttcccattcata

SEQ ID NO: 46124 - DNA, 201 bp, Homo sapiens
ctcagtcagtgaaattattatttgacaactatgattggctttaggaaaagtcatggacttgcagagttttggctttggttgttgatgtaaatgtggaagcratacttttttacccatattctacatctttaagtaaaaatcagagatattgcaatgttaagtcattttactttgtaaaattctcatgttgtccctaaacat

SEQ ID NO: 46125 - DNA, 201 bp, Homo sapiens
tttgccctagcagtaattttccagtgatgtgccaagtctcatatcactgtctcgtatcaacatcaatgctatgtacctttcacataaaaagtacaaagttrgatggttaaaaataactaattactaatggtctttttcccattcatatgtaatatttgagtttgtgattataaaggataagaatagttttttaaagtttct

SEQ ID NO: 46126 - DNA, 201 bp, Homo sapiens
gtgtctttatagcagcatgatttatagtcctttgggtatatacccagtaatgggatggctgggtcaaatggtatttgtagttctagatccctgaggaatcrccacactgacttccacaatggttgaactagtttacagtcccaccaacagtgtaaaattgttcctatttctccacatcctctccagcacctgttgtttcct

SEQ ID NO: 46127 - DNA, 201 bp, Homo sapiens
actatttacaatagcaaagatatgcaatcaacctcagtgtccatcaatagatgaatggataaagaaaatgtagtatatatacacacacacacacacacacmtatgtgtgtatatatatacacatacacacacacacatatgtgtgtatatatatacacatacatatatatacaaaacctaggcattaccattcaggacata

SEQ ID NO: 46128 - DNA, 201 bp, Homo sapiens
gagagaaaaaaactcaaagcaggttatcagattccgcaaatattccatgtagatctgattgctatactttgactttttttaaagtggatatggaaaagacytacgtaaagttaaggaatataatgagttggaagaattcacacatgaagaccatcccttttaaaagataaagcctgagagggaataacatctaatttcata

SEQ ID NO: 46129 - DNA, 201 bp, Homo sapiens
cactatttacaatagcaaagatatgcaatcaacctcagtgtccatcaatagatgaatggataaagaaaatgtagtatatatacacacacacacacacacacatatgtgtgtatatatatacacatacacacacacacatatgtgtgtatatatatacacatacatatatatacaaaacctaggcattaccattcaggacat

SEQ ID NO: 46130 - DNA, 201 bp, Homo sapiens
cttgtatgtttattgcagcactatttacaatagcaaagatatgcaatcaacctcagtgtccatcaatagatgaatggataaagaaaatgtagtatatatayacacacacacacacacacatatgtgtgtatatatatacacatacacacacacacatatgtgtgtatatatatacacatacatatatatacaaaacctagg

SEQ ID NO: 46131 - DNA, 201 bp, Homo sapiens
acctacagccaatatcatactgaatgggcgaaaaccggaagcattccctttgaaaacgagcacaagacagggataccctctctcaccactcctattcaacrtagtgttggaagttctggccagggcaatcaggcaagagaaggaaataaagggtattcaattaggaaaagaggaagtcaaattgtctctgtttgcagatga

SEQ ID NO: 46132 - DNA, 201 bp, Homo sapiens
tggtaccattccttctgaaactattccaatcaatagaaaaagagggaatcctccctaactcattttatgaggccagcatcatcctgataccaaagcctggmagagacacaacaaacaaagagaattttaggccaatatccctgatgaacatcaatgcaaagatcctcaataaaataagggtgaaacaaatccagcagcaca

SEQ ID NO: 46133 - DNA, 201 bp, Homo sapiens
gataggaatttttgttccgctgatatatcctaagaataatgcttgacacatagtaggtactcagtacatttttgctgagtgaatgattatacctcaatgamctttttcagattatattcattggcaggtaaatgctggaagccattactattccccttccttctttgttttctgggagtgtagaaactcccaatttctaat

SEQ ID NO: 46134 - DNA, 201 bp, Homo sapiens
tggtgccatctcagctcactgcaacctccaccgcccaggtttaagtgattctcatgcctcagcctcccaaatagctgggattacagacgtgcaccaccacmcccggttaatttttgtgttattagtagagacgggttttgccatgttggccaggctggtctcaaacttctggcctcaagtgatccgcccacctcggcctcc

SEQ ID NO: 46135 - DNA, 201 bp, Homo sapiens
caggtattaagcctagtacccattagttattttccctaatcctcttcctcctcccatcctctactcttcagcaggcaccagtgtctattgtttccctctawgtgtccatctgtgttcctcatttagcttccacttataagtaagaacatgaagtatttggctttctgttccatgttagtttgctaagaataatggcctcca

SEQ ID NO: 46136 - DNA, 201 bp, Homo sapiens
gagatactatctcacatcagtcagaatagctattattaaaaagttaagggccgggcgcggtggctcacgcctgtaatcccagcactttgggaggccgaggygggtggatcatgaggtcaggagatcgagaccatcctggctaacaaggtgaaaccccgtctctactaaaaaaaatacaaaaaattagccgggcgcggtggt

SEQ ID NO: 46137 - DNA, 201 bp, Homo sapiens
atttcatcagtgttttacagttttctttgcaaagaccttttacttcttcattaaatttattcttacgtgtgatatatatttttagctattgtaaatgttaytgctttcttgttttttattttcagattgatcactgttagtttgcagacacactattaatttttgtgtcttggttttgtatcctgaagctttgctaaattt

SEQ ID NO: 46138 - DNA, 201 bp, Homo sapiens
tatgtctatatggtgatttaacgaacaaaaatctttaacaaagagataagcatgatggaatacataaacaaaggtggtatgcaatctgactaaagtggtgytaaatggtgataaattctgttttcaaatatttttcatgctatttgttatcagctgtggacatttaatgcctcattagcaatagattgaatcagtacttta

SEQ ID NO: 46139 - DNA, 201 bp, Homo sapiens
tttgtgtataaaaccttacaccataatctactaaattttattaaaaatattccctattacttgatgtgcatttgttcctagacaactgggctattggtttsacaaattattttctaacgtactgtaaatttttctgatatacagtggatgagttcacaacattagttaaagctactgctgaattcaacattccactcatta

SEQ ID NO: 46140 - DNA, 201 bp, Homo sapiens
aggcagagagagggtacctttggctttcctgtcatgcgtgattgatgctttccctttatcactctagctcatgtatcctagaatttttttctctcttgctrccacagtcataattaatgattaaggtacagtaactagcataacacctggctattaatttcaggaagtagattggggtgcatagcatttgacctcacagac

SEQ ID NO: 46141 - DNA, 201 bp, Homo sapiens
aatcctttggctcatccctgtcaagaaattaaaaatcttgaccatagcaatataattttgatgaaataaagaggagaaatataaattttatggaacacatrtgtgtttatgaattaagctggtttcattttattacttacctaaacattgctatctcatcaagagaatgcccaggtatgctatcaaatattgcactgaata

SEQ ID NO: 46142 - DNA, 201 bp, Homo sapiens
tccttctaattcgttcattctttcctcaattttctggcaggggattttatgcacagttgtgcaatctaagtatcttagggtaataataaaatatgattcarttatgaaagaaaacctgaaaataattctgtggaactctaacagcactgttgtcattatagttacatttggtggttttccagaattaatattgcagcatag

SEQ ID NO: 46143 - DNA, 201 bp, Homo sapiens
taacagctcaagtagaatctcctcagtgatgaggtcactgaagtcctggggttggtcctcactgttgggaatagaaactctttagtgttgatgcccctaawcaaatcaaccaggcttttaaagattgactcttgctaaacaaatttaccaacccttcaatatataattatatatacatataattttagaggaaagagtata

SEQ ID NO: 46144 - DNA, 201 bp, Homo sapiens
cctggggttggtcctcactgttgggaatagaaactctttagtgttgatgcccctaaacaaatcaaccaggcttttaaagattgactcttgctaaacaaatytaccaacccttcaatatataattatatatacatataattttagaggaaagagtataaaggcttggatcttcaccttctggataaaatatatattgcaata

SEQ ID NO: 46145 - DNA, 201 bp, Homo sapiens
aaattggcatccttaaatatattatttacatatattccttaaatatatacatgtatatatttatgcatgtatgtttgtgtatgtatcacactgtctttaarttctcaatttacttaaagaaatgttttaatttctaaaaaatacacttgatgatgactttattctttttcattttgatgcctctactatctgtttcattta

SEQ ID NO: 46146 - DNA, 201 bp, Homo sapiens
gttatttgtgtttcattttttattgtgaaaaattaaatgcacagaaatgtttaatcactagtacaatacagactcatattcccattacctagaaataacartttaaccatagttccagagccatatttgggtttttcttaaactacatcaaagtaatttgaaacatcatagcattttatatctaaatatttcagcaggaat

SEQ ID NO: 46147 - DNA, 201 bp, Homo sapiens
ctgaattttggtagctttatgggtgtcttgcaaatttgtctttcagtaatgcccctagtccatctaagtaacagggagagtcttatgtaatgcaggcaccktttatctttgcaataaaaaatcttaactatttaaatgatgtggccacttttgaatatattttgtgttttatgaagcattttgtttcagttttgcaagaaa

SEQ ID NO: 46148 - DNA, 201 bp, Homo sapiens
agtacaatacagactcatattcccattacctagaaataacagtttaaccatagttccagagccatatttgggtttttcttaaactacatcaaagtaatttraaacatcatagcattttatatctaaatatttcagcaggaatatcccaaaataatgaacattctcttatataaccacaatatgatcacaacactgaacaaa

SEQ ID NO: 46149 - DNA, 201 bp, Homo sapiens
aatagagttctgagattcactgcagagagtaaagaactgaatctatttgtgtaagtaatggttgacagttaacatcactttactcaaaaagtgtgttcttrcatatcatttgatgtccaaaacagcctgtcaggtaaagatcatggtatataatttaaagatttggaaacttaggttctaaacaatgtgactattctttgg

SEQ ID NO: 46150 - DNA, 201 bp, Homo sapiens
gcatctgccaggttgcataaaaatcttgcacctgttttagttcaagtaacgttttttaaagaaaatccttcagatgagtttcattttatagggatgaggtmttgctatgaatttcttcaaaatttatatttatatccacataagtatgaaaaaaaatatactgtttcttccaccccttcatccatttatctatccatctat

SEQ ID NO: 46151 - DNA, 201 bp, Homo sapiens
ttgggtgaatgaaaccaattccctgattttacaagcaagccattttaaacaccatgttcctagggtggaattatgtgtaggatatgatgagagtggagggmaagatcttctgctgttgctatgaggctttatatagataacgtcatgtttaagctggccaggttggtcttatttatatattgctgttatttcattgatatt

SEQ ID NO: 46152 - DNA, 201 bp, Homo sapiens
tgattacttacattttaataaaatatgtgtagcttttgcaagtaaatcagactcttaaaaagtatgtaatgggaaccatcccaatgtctatggggagaackaatgtattttgaatgccttggctgtttattttagtgatttcttaattatttattaagggacatgaaactgagacatatatgtattattgatagggtagag

SEQ ID NO: 46153 - DNA, 201 bp, Homo sapiens
aaaaaaggatgtatctttaggagaaagggcccttcttggaaataacatattcctatctaattcctgcacggtttccttttttctcctgcgggccagctgakttattcaaagaccttagtgctttcctaggaggcttgtgaagtaattgagaatttggtaggaaagaaagtgattctcaacttcttactatagtaaatgcat

SEQ ID NO: 46154 - DNA, 201 bp, Homo sapiens
tttatctttggtttgaatgtaatatgacagtgaaacctgttatttgtattcaatttttaaagaaacgcttttagattttaaaagtcaggcttctctatgtkctcaaatgaatctgacttactttataagaagaagggcttggcattctgatggagtcctggaaatagattcttggagacacagctatgtattggtcttcct

SEQ ID NO: 46155 - DNA, 201 bp, Homo sapiens
aatagatgaaaaaaagcaatatggttgaaggtaaaatactgttccaggtttcaaaatttagccaattaatggaaaatatgggagagtcaattttgtgtcartagagttttaaaaactaatcagagctattaaaatgtaatagctttgattttcaagtaggtcataggaccagtttttctgtacaaaccaaataaattagat

SEQ ID NO: 46156 - DNA, 201 bp, Homo sapiens
ctcaacatcactaattgtcaaggaaatgcaaattaaaaccacaatgtataccaccttacccgagccagaataaccattattaaaaagtcaaaaaaaaaaaatccccaaaagatgctcgggtggacgtggtgaaagaggaacacttatatgctgctggtggaaatacacattagtacaacctctatggaaaagagtatggag

SEQ ID NO: 46157 - DNA, 201 bp, Homo sapiens
ggttttggcaggaggagttgaggcagaatggacatagggatatctgttttttacatagaaagttttaagattatagctggaagggaccttagactagttgtactcaaagtttgacctatggtccagttctggtcagtccattacaatgacccaagttgataggaagattttaaaatcttttgtattagtctattctcacac

SEQ ID NO: 46158 - DNA, 201 bp, Homo sapiens
tttcacagaattagaaaaagttattctaaaattcatatggaatcaaagaaaagactgaatcaccaaagcaagcctaagcaaaaagaacaaagccagaggcrttacactacctgacttaaaactatactacaaggctgcagtaaccaaaacagcatgattcaggtacaaaaacaggcagactgatagaacaggttagagaac

SEQ ID NO: 46159 - DNA, 201 bp, Homo sapiens
atcacgaggtcaggagattgagaccatcctggctaacacagtgaaaccccatctctactaaaacaaacaaacaaacaaaaaaacaaaaaacaaaaaaaaaacattagtcgggcatggtggcatgtgcttgtagtcccagctactcaggaggctaggctaaggcaggacaatcgcttgaacccgggaggtggaggttgcagt

SEQ ID NO: 46160 - DNA, 201 bp, Homo sapiens
tatgaacacagtgtcacttacaaaagctacaaaaagaataaaatacctaggaatacagcttactaaggaccttaaagaaccttgcaaagagaattacaaarcaatgctgagagaaatcagagacaatgcaaacacatggaaaaatattcttcctattccatggataggaagaatcagaattgttaaagtgaccatactgcc

SEQ ID NO: 46161 - DNA, 201 bp, Homo sapiens
gccctggcagacttcgcttcccaggttggtttcctttgtcattctgccccatgtatgtaaattgtcctgttatcagtttctctttgtttactattcctagkattccatgcgtttctgctaacatctgatttggtacaagcagaagaatgcaaagaagataccagagttgcagccagcattgctggatttgaactttggttc

SEQ ID NO: 46162 - DNA, 201 bp, Homo sapiens
aagacaacatgactctgcttagaaaaccccatagattctgccagaaggcttctagaactgataaatgaccttagtaaagtttcagagtataaaatctatgwgtaaaaatcagtagcatttctatacaccaataatgtccaagctcagaacgaaattatgaacacagtgtcacttacaaaagctacaaaaagaataaaatac

SEQ ID NO: 46163 - DNA, 201 bp, Homo sapiens
attgtcctgttatcagtttctctttgtttactattcctagtattccatgcgtttctgctaacatctgatttggtacaagcagaagaatgcaaagaagataycagagttgcagccagcattgctggatttgaactttggttctattgctccctagctttgtgacagcaggcaaaccccttacccttcttggactgcagtctc

SEQ ID NO: 46164 - DNA, 201 bp, Homo sapiens
actgcactccagcctgggcgaaagagcaagactccatctcaaaaaaaaaaaaaaaaaaaaaaaaaaatatatatatatatatatatatatacacacacacmtatatatacacacgtatatatatatacatatatatacgtatatatacacacatatatacgtatatatacacacatatatacgtatatatatacacatata

SEQ ID NO: 46165 - DNA, 201 bp, Homo sapiens
gatagcgccactgcactccagcctgggcgaaagagcaagactccatctcaaaaaaaaaaaaaaaaaaaaaaaaaaatatatatatatatatatatatatayacacacacatatatatacacacgtatatatatatacatatatatacgtatatatacacacatatatacgtatatatacacacatatatacgtatatatat

SEQ ID NO: 46166 - DNA, 201 bp, Homo sapiens
agatagcgccactgcactccagcctgggcgaaagagcaagactccatctcaaaaaaaaaaaaaaaaaaaaaaaaaaatatatatatatatatatatatatwcacacacacatatatatacacacgtatatatatatacatatatatacgtatatatacacacatatatacgtatatatacacacatatatacgtatatata

SEQ ID NO: 46167 - DNA, 201 bp, Homo sapiens
ggtggagcttacagtgaaccgagatagcgccactgcactccagcctgggcgaaagagcaagactccatctcaaaaaaaaaaaaaaaaaaaaaaaaaaatatatatatatatatatatatatacacacacacatatatatacacacgtatatatatatacatatatatacgtatatatacacacatatatacgtatatatac

SEQ ID NO: 46168 - DNA, 201 bp, Homo sapiens
gtcttgaacttctggccccaagtcatcctccttcctaggtctcccaaagtactaggattatagatgtgagccaccacacccagactgattttattttttgkacgataagagggaagtgtgactctgaaagaaaactgaagaataattgtcttttgtagcaaacacacacatagtcagcacatatacacaagcagattggga

SEQ ID NO: 46169 - DNA, 201 bp, Homo sapiens
gaggtggagcttacagtgaaccgagatagcgccactgcactccagcctgggcgaaagagcaagactccatctcaaaaaaaaaaaaaaaaaaaaaaaaaaatatatatatatatatatatatatacacacacacatatatatacacacgtatatatatatacatatatatacgtatatatacacacatatatacgtatatat

SEQ ID NO: 46170 - DNA, 201 bp, Homo sapiens
gaacttctggccccaagtcatcctccttcctaggtctcccaaagtactaggattatagatgtgagccaccacacccagactgattttattttttgtacgayaagagggaagtgtgactctgaaagaaaactgaagaataattgtcttttgtagcaaacacacacatagtcagcacatatacacaagcagattgggaaagag

SEQ ID NO: 46171 - DNA, 201 bp, Homo sapiens
gaagtcaatctgctttatgcaatctaccaattcaaatattaatctcggccagtaacccaccttcacagaaatgctcagaatgatatttgatcaaacagctkggaaccattgttctaatcacattaacacgtaaaattaaccatgtcagctccaaacttctcgaatttcatcttttactactgtcctccactccttttctgc

SEQ ID NO: 46172 - DNA, 201 bp, Homo sapiens
actaggattatagatgtgagccaccacacccagactgattttattttttgtacgataagagggaagtgtgactctgaaagaaaactgaagaataattgtcytttgtagcaaacacacacatagtcagcacatatacacaagcagattgggaaagagaaagacagagagacacagacagagagagtgagagagacaaaaaaa

SEQ ID NO: 46173 - DNA, 201 bp, Homo sapiens
cacagagttttatcacttctcctgagaagtttaaggagacagcttgtttttttggccttcattataagaaagcagttaaatgttaattaattgaagaaaawgactgctgaaaaagaaagcactaagcctattatagaaatgaatcttatttttctgccaagtgctttataattaaaaggaaactcagtagaaaagaagctt

SEQ ID NO: 46174 - DNA, 201 bp, Homo sapiens
tatacatttgaagcagatacatagatgatccagatattacaggtaactggcaaggacttaaaaggtggactaaaaaaagtgaaggaaaagaaaattcgatwagagaagtgggacacatagaaaataatcaaacaggttgggcatggtggcttatgcctataatcccagcactttgggaggctaaggtggaaggatcacttg

SEQ ID NO: 46175 - DNA, 201 bp, Homo sapiens
tagcaaaaagccatctctactaaaaatacaaaaaattagctgggcttggtggtgcatgtctgtaatcccagctactcaagaggctgaagcatgagaatcamgtgaacctgggaggcagagattgcagtgcgctgagatcgtgcacagcactccaacctgagcaacagaatgagactgtgtctcaaaaaaataattaataaa

SEQ ID NO: 46176 - DNA, 201 bp, Homo sapiens
atagggacaaagtaattatctttgcagcattagataagggaaaaagtgaatacgagcaaatcatttttggtgggggagggttagtaactttttgcttagtrtatggtttattgctcaataaatattaaacatgcagtattaaattaaagtggttactgaattattccatttgtcataaaatgattctaatacgaacagaca

SEQ ID NO: 46177 - DNA, 201 bp, Homo sapiens
tgcttagtgtatggtttattgctcaataaatattaaacatgcagtattaaattaaagtggttactgaattattccatttgtcataaaatgattctaatacraacagacaaatatataaatatacacacatacttaaaaattgtttcacttctgtggtatatttctccatatagtttgctaagatttattatatgacatgct

SEQ ID NO: 46178 - DNA, 201 bp, Homo sapiens
gagtcttgcactgtcacccaggctggagtacagtggagtgatctcagctcactacaacctccacctcctgggttcaaataattctcctgcctcagcctccygagtagctgggattataggtgcctaccaccacgtccagctaatcttttgtatttttagtaaagacggggtttcactatgttggccaggctggtcttgaac

SEQ ID NO: 46179 - DNA, 201 bp, Homo sapiens
aatgatgaaacagagactcaaaggagttgcccaaggccatacagcatgtgtatggtcaacgtgggatttgaaactgtgtctcccgatatgtgtcaaatacsctttttttctaggaaaaaataaatacatacagtttatcaggtgtcagagggaaccatggtgccttgaatttcttacctcatgtcataggatcatgggcat

SEQ ID NO: 46180 - DNA, 201 bp, Homo sapiens
aaacctgggaactatggagatctttttttttctgctttgaggagaatattaacccatttttgctgattttagtaacttcacagagaagttttttaaaaaawttcatatggatgggggtctcactatattgcccaggctggtctcaaatcctggtctcaagtgatcctccagccttggcttcccaaagtattaaggctgtag

SEQ ID NO: 46181 - DNA, 201 bp, Homo sapiens
cctcatgtcataggatcatgggcattgctctgttttcgggatgtcacatgtctactgaggctttatgggacttgctatgtaggaccataagtgttggtggyatatggaagctgtggaaattatatggctcttttataactccaaggagggtctgggcagttacatgcattttctttattgaaagttcttcttgcctcatat

SEQ ID NO: 46182 - DNA, 201 bp, Homo sapiens
ggagggtctgggcagttacatgcattttctttattgaaagttcttcttgcctcatataacttttttctcctcagaactagcttaaaggtacctgcaaataygtacatataaatttcctagagaattcatctgtccctctgactgaaaagaagttaccacatctaatgtatgtgaagtaaaagtgagattgaaattactgtc

SEQ ID NO: 46183 - DNA, 201 bp, Homo sapiens
gagggtctgggcagttacatgcattttctttattgaaagttcttcttgcctcatataacttttttctcctcagaactagcttaaaggtacctgcaaatatktacatataaatttcctagagaattcatctgtccctctgactgaaaagaagttaccacatctaatgtatgtgaagtaaaagtgagattgaaattactgtca

SEQ ID NO: 46184 - DNA, 201 bp, Homo sapiens
ggaggtggagcttacagtgaaccgagatagcgccactgcactccagcctgggcgaaagagcaagactccatctcaaaaaaaaaaaaaaaaaaaaaaaaaaatatatatatatatatatatatatacacacacacatatatatacacacgtatatatatatacatatatatacgtatatatacacacatatatacgtatata

SEQ ID NO: 46185 - DNA, 201 bp, Homo sapiens
gggaggtggagcttacagtgaaccgagatagcgccactgcactccagcctgggcgaaagagcaagactccatctcaaaaaaaaaaaaaaaaaaaaaaaaaaatatatatatatatatatatatatacacacacacatatatatacacacgtatatatatatacatatatatacgtatatatacacacatatatacgtatat

SEQ ID NO: 46186 - DNA, 201 bp, Homo sapiens
tagtcccagctacttgggaggctgaggcaggagaatggcgagaacccgggaggtggagcttacagtgaaccgagatagcgccactgcactccagcctgggsgaaagagcaagactccatctcaaaaaaaaaaaaaaaaaaaaaaaaaaatatatatatatatatatatatatacacacacacatatatatacacacgtata

SEQ ID NO: 46187 - DNA, 201 bp, Homo sapiens
agcctcaacctgcaagactcaattgatcctcctacctcagcctcccaaggagctgggctgacaggtgtgtcattaggctcagctagttttcatatttttttgtagagatggggtttcgccatgttgcccaggctgctgaagagtattcttggagcaatagggaattactacatatacctcaagaattaaataaacatagca

SEQ ID NO: 46188 - DNA, 201 bp, Homo sapiens
aattctcaaagtcttccatttccaatgtgcactctatctgaagtcagaagttaacataattataatatgctagatttgtatgattttaaacacagacacaygcaaaaactaatttgattcatttacttacagaaagccatatcttggaagatgtcaacaagtgtatcatagccttaagagaccaggatgctgataatttag

SEQ ID NO: 46189 - DNA, 201 bp, Homo sapiens
aacagcacatcaaaaagttaatttacggtgatcaagtagggtttattcctgggatgcaatgttggtttaacataggcaaatcaatacatgtgattcaccayataaatagaattaccaacaaaaaccacatcattatctcaataggcaaagaaatagcctttgatacagttgaacattccttcgtgctgaaaaccctcaaga

SEQ ID NO: 46190 - DNA, 201 bp, Homo sapiens
ttctcctgcctcagcctcctcagtagctgggattacaggcgcccgccaccacgcccggctaatttttttttgtattttttagtagagacgggtttcaccaygttagccaggatggtctcgatctcctgacctcgtgatccacctgcctcaacctcccaaagtgctgggattacaggcgtgagccaccgcgcccggccggtc

SEQ ID NO: 46191 - DNA, 201 bp, Homo sapiens
ctgcaagctccacctcccaggttcacgccattctcctgcctcagcctcctcagtagctgggattacaggcgcccgccaccacgcccggctaatttttttttgtattttttagtagagacgggtttcaccatgttagccaggatggtctcgatctcctgacctcgtgatccacctgcctcaacctcccaaagtgctgggatt

SEQ ID NO: 46192 - DNA, 201 bp, Homo sapiens
cctggagaatcatttttcatgttatgcatatggaatatgaaatttgatatgcacattgtttagccaaaagagtagaagggacaaagatgagtcattttttwaatttttcttttatatttgaagccactccttgaaatgaattaagagaaacaaaccaacagttgaataatattcactagagactaggtctgaagtgctatg

SEQ ID NO: 46193 - DNA, 201 bp, Homo sapiens
ctctgccctaagtgtctcaggcttgccccaagttctcctaattttggatgattaatggattcattgattcattgattcatggatacacacacgtgcacacwtacacacacaggagatttcaataataattgattcactgctgtatgtcaagtattcttctaggtatttgggggtattaaaataggcatttggtccctgctc

SEQ ID NO: 46194 - DNA, 201 bp, Homo sapiens
agataaattatgtcctatatcccaaatataatgaatataaaataatcctgggttattatgtataaacagcatcttattattagcgtaacggtatagtttaygatgtcccaattttgttattttagttactcagaaaaattttggtgtatctttgaaaaagctttccatttttgtttatgtctaattccaaactattctcca

SEQ ID NO: 46195 - DNA, 201 bp, Homo sapiens
cttgctagattggggaagttcttctggataatatcctgcagagtgttttccaacttggttccattctccccgtcactttcaggtacaccaatcagatgtasatttggtcttttcacatagtcccatatttcttggaggctttgttcgtttctttttgttcttttttctctaaacttcccttcttgcttcatttcattcatt

SEQ ID NO: 46196 - DNA, 201 bp, Homo sapiens
ctgccttgctagattggggaagttcttctggataatatcctgcagagtgttttccaacttggttccattctccccgtcactttcaggtacaccaatcagabgtagatttggtcttttcacatagtcccatatttcttggaggctttgttcgtttctttttgttcttttttctctaaacttcccttcttgcttcatttcatt

SEQ ID NO: 46197 - DNA, 201 bp, Homo sapiens
aaataaatccacatttatagattactaattatgacactaaacgtaatgtatgcttttcccaatttattgatttctatcagtggtgttatctttctcccagwgtaacgggcacataatttttaggtcaactttgattcatcttctcttatttcttaaatacaaaaaagtacctaatttggcagtttcttcttattctgtatg

SEQ ID NO: 46198 - DNA, 201 bp, Homo sapiens
gggctgaatttggatgttgaatttagccataagacaatttatactttgaagattagatttaagctttatttttcattatttaatatgctgaagataagagsagccaaaatgggaaatatgagaaatttagcttaaatgtataaactctcacaaacccagttcttacagctatgatagaagtcctattgtggatttactgca

SEQ ID NO: 46199 - DNA, 201 bp, Homo sapiens
aattcagaacatttgcaaagaagaatgttaggtaaatattgaggtcatccagatgtttccccacccaatttttatattttgtgttctaagtttgcctgccktaatgccccatatctacacgcagacacacagacacacacacactttcaaccaaaaagaatggctagagaaatattgaaatacaatgaatgtacttaattt

SEQ ID NO: 46200 - DNA, 201 bp, Homo sapiens
ttgcaccaattctataaaactctgcatgaatctagaacataacttgattctttatcagtaatgttaaatattctccctctcatctgcttatctgccaatgrggaatttgttttgtaatgaagctgtcctttcttattaaggattaagctagaatgcatcaactatttagaaacaaagatacatattagaatatgcacacaa

SEQ ID NO: 46201 - DNA, 201 bp, Homo sapiens
aggaatcacttctgtggaacatcctttctcttctgctaaaacattgctacaattcacaggtagccttcctattggcccttatattcattttttgatatgcmtgttaagggacaagggaagtgcagcctccactccagctaaagatgcagaacagagataagaagagccaaatggtatggagagaagcaggagagagaaaaa

SEQ ID NO: 46202 - DNA, 201 bp, Homo sapiens
cagaacagagataagaagagccaaatggtatggagagaagcaggagagagaaaaataaaaacccaggacagggggagttaacaataaaggaactctgataycacatctaaaaattactttgctgatgaaccaaacgtttctattttgtaaatagtgctgtcatcatgtagttcacatattggtgtagcaatatgcacctga

SEQ ID NO: 46203 - DNA, 201 bp, Homo sapiens
aaaatttttagtcatgataaaaataatttcttgcctttttttggtgatttatggcttacaatgtccttgacgcctgcctagaagataggcaggtgtagtcrtactaagtatcttcattttatgatcttagaaattgatatgtgtctaagaatcattagaaaacagcctagaactcagattttctggtttgtagatgctctg

SEQ ID NO: 46204 - DNA, 201 bp, Homo sapiens
ggcctgccttgctagattggggaagttcttctggataatatcctgcagagtgttttccaacttggttccattctccccgtcactttcaggtacaccaatcrgatgtagatttggtcttttcacatagtcccatatttcttggaggctttgttcgtttctttttgttcttttttctctaaacttcccttcttgcttcatttc

SEQ ID NO: 46205 - DNA, 201 bp, Homo sapiens
cgaggagtgtctttgtggtgtcctctgtatttcctgaatctgaatgttggcctgccttgctagattggggaagttcttctggataatatcctgcagagtgktttccaacttggttccattctccccgtcactttcaggtacaccaatcagatgtagatttggtcttttcacatagtcccatatttcttggaggctttgttc

SEQ ID NO: 46206 - DNA, 201 bp, Homo sapiens
ttggaaaagagttatcttacagctgggctggaactctccatgattacctggaggtctgacactgacttttggccacaataagaaggcttgaactagtttakatttataatacattgtttaagtttgaaatcaccttgttggtaccaagagtcagcttgtttacaatgtttaggggtgtgtagattgatggcttacgcatgg

SEQ ID NO: 46207 - DNA, 201 bp, Homo sapiens
ttgaaaatccttttctttaagaatgttgaatattggcccccactctcttctggcttgtagagtttctgccaagagatctgctgttagtctgatggtcttcyctttgtgggtaacccgacctttctctctggctgcccttaacattttttccttcatttcaactttggtgaatctgacaattatgtgtcttggagttgctct

SEQ ID NO: 46208 - DNA, 201 bp, Homo sapiens
gcacattctttcttctgctatgttgcatttcttacattgaataggtcttccttgagtagtttccatagaattttgcaaaccctttcaattatccaacaccrtctgtaactgttgtagttataactcatttattttattttaaaaacccactgaagatactagaacacacacacacaaagacacacacatacacatctacct

SEQ ID NO: 46209 - DNA, 201 bp, Homo sapiens
tgttagctggttattttgctcgttagttgatgcagtttcttcctagcctcgatggtgtttaaaatttggcatgcttttgcagtggctggtaccggttgttkctttccacgtttagtgcttccttcaggagctcttttagggcaggcctggtggtgacaaaatctctcagcatttgcttgtctgtaaagtattttatttctc

SEQ ID NO: 46210 - DNA, 201 bp, Homo sapiens
ctgcgtgtgagatgggtttcctgaatacagcacattgatgggtcttgactttatccagtttgccagtctgtgtcttttaattggagcatctagtccatttwcatttaaagttaatagtgttatgtgtgaatttgatcctatcattgtgatgttagctggttattttgctcgttagttgatgcagtttcttcctagcctcga

SEQ ID NO: 46211 - DNA, 201 bp, Homo sapiens
gctcagtaagcttttataattagaccatctcagttcatccaggctgctataacaaaatatcttagtctgggcaagttataaacaacagaaatttattgctsacagttctggagctggagaaattcaagatcaaggcaccagcagattcaatgtctggggaggatgcatccctcatagatgatgtgttctaagtggtggaaa

SEQ ID NO: 46212 - DNA, 201 bp, Homo sapiens
tgttgacagtggggtgttaaagtctctcattattattgtgtgggagtctaagtctcgttgtaggtcactcaggacttgctttatgaatctgggtgctcctrtattgggtgcatatatatttaggatagttagctcttcttgttgaattgatccctttaccattatgtaatggccttctttgtctcttttgatctttgttgg

SEQ ID NO: 46213 - DNA, 201 bp, Homo sapiens
aacctcctgggatcatgtgatcctcttgcctcagcctcctgagtagctgggactacaggcgcacaccaccatgcttggataattctttaatttttttttttaatagagacagagtttcactttattgcccaggctgatcttgaactcctgacctcaaatgatcctcctgcctgggcctcccaaagtgttgggattacaggc

SEQ ID NO: 46214 - DNA, 201 bp, Homo sapiens
atctatatatccatatatatatagatatatctgatatatatacacacataaatacacatatgtatatatacatatatatttctataataaaagtaataaargtggtaaaagattaaatttcttctaagaggaagattttcttgtttccttttttaaaagcagtgaatgaaatctgagattctccaggtatattttgtggat

SEQ ID NO: 46215 - DNA, 201 bp, Homo sapiens
ttttcctaggatttattcttctagactccaatacaatttccccaaatctccatttgtctaaggaaggtaagttttgctttctgatagatatctatatatcyatatatatatagatatatctgatatatatacacacataaatacacatatgtatatatacatatatatttctataataaaagtaataaaggtggtaaaaga

SEQ ID NO: 46216 - DNA, 201 bp, Homo sapiens
tacatacatatataatccatatattttgtgtatcagtgtttgtgtatataaatttttttcccaaagtttattggaggtttgtatgtgtgcgtgtgtatacygtgtgtttgcttttcctaggatttattcttctagactccaatacaatttccccaaatctccatttgtctaaggaaggtaagttttgctttctgatagata

SEQ ID NO: 46217 - DNA, 201 bp, Homo sapiens
ccatctatcctatctcctgacccttgcctcctgggtcctaatgcctgtcagacaaacttcctctcgcctctcttctctgaggctagtccacttctaaaaascactccctgtctctggtgcttttctagtttctcctataagaatgatttctagtataaacttcaggactcttttaccttctttaggcacccgggctcacca

SEQ ID NO: 46218 - DNA, 201 bp, Homo sapiens
ttcttttcttccttcctgtcttccttttagtgaaggcaattttcattagtggtgtgatgaatttattgctttttatgttttgtgtatctgttgtatatttygatttgaggttactatgaagcttgcaaatactatcttataatctattattttaaactaatgacaacttaaagttgatggcataaacaaacaaatgagaaa

SEQ ID NO: 46219 - DNA, 201 bp, Homo sapiens
ttagatacatgttctcaagataaatgataactattcctcaagtaagaggacttgacagtaccatttacatacatagttcatcctaaactcacctggtaatwtgaataactgtctctgttcactaattgcctttatccaaaggaactttttatatctttttgacagaagacaagtttgtaacttggagccaggcacccacca

SEQ ID NO: 46220 - DNA, 201 bp, Homo sapiens
aagcagaaccaaccaaatcatagggagaaatagataagttcaaactcatgatggaaaaatgagttttaatttttaattttttatagagatgggtcttgctwtgttgcacaggctggtcttgaactcctggatttaagtgatcctcctgcctcagcctcatgatagaatatttgagtacaatgctatcagaaattgaaagct

SEQ ID NO: 46221 - DNA, 201 bp, Homo sapiens
gtgagccccaaaattggggcttagtccagaagggttcttgactttgctcagaagataattcaagagtgagctagtggtgaaagaaagcctatttattgaaktgtcagtgtaccgcagaatgacagctccttgtggagcagcactaacccagagcctgagcatccacagtagcagcatgtggactattggctagcagtattt

SEQ ID NO: 46222 - DNA, 201 bp, Homo sapiens
tattgaagtgtcagtgtaccgcagaatgacagctccttgtggagcagcactaacccagagcctgagcatccacagtagcagcatgtggactattggctagyagtatttatacccacttttaattacatgcatgttaaggagtgggttactcagaactctctagaaaacggccagtaacttctgggtgttgctgggcatttg

SEQ ID NO: 46223 - DNA, 201 bp, Homo sapiens
ttgcatgatttaataaggcaatataaaaatccttttgacctagattatatatggttttggtggcaaatgaggctctttcctctcccaccagaagttagtargattctagaagaaaatttacatgtgggaatgggtagggggaaacaagcaaaacatcagattagtaaaaaatgaagtcaaagaaagagaagaaccgacaac

SEQ ID NO: 46224 - DNA, 201 bp, Homo sapiens
atggtaaccttctttcaaagcaataccccatccagcgacagtcctgtctttcttcttttcctcatgctaagtttctgaaagattttaggtgcgctgacctscttactaactacatccatttttggacagaagcgagggagtcgaatgtttcctggagctagttttgttaactggtgttctatttccattaagtatcagatg

SEQ ID NO: 46225 - DNA, 201 bp, Homo sapiens
agggttgacagagaggaaagccattcagctccggggtcccaacaacaagttggttgaccctgcggccatgagtggaactctcaaaatcatgtcacccaagygagacttgcccatctatcctatctcctgacccttgcctcctgggtcctaatgcctgtcagacaaacttcctctcgcctctcttctctgaggctagtccac

SEQ ID NO: 46226 - DNA, 201 bp, Homo sapiens
atagttcatcctaaactcacctggtaatttgaataactgtctctgttcactaattgcctttatccaaaggaactttttatatctttttgacagaagacaartttgtaacttggagccaggcacccaccaaagttaggctcctgccttcccacagaaactgggagatagggacactacgttctttgatgattatatttaaaa

SEQ ID NO: 46227 - DNA, 201 bp, Homo sapiens
gatctgatataaccaacccccatcttgcctttaacctccaaactgcccttaattattctgggccagggccaagctaactttgggagaaatttagtttatartttaaatgttaataacccttcccccaaactaaactgcctttgtaaagctaataaaagaccaccaggttacgaagagatgaggatcctgaattctgctaag

SEQ ID NO: 46228 - DNA, 201 bp, Homo sapiens
cttaagttacactgtataaacatttatctcctcttgagaggtgaagctggctaggcttcagggtcaggtggggacttggagaacttttctgaatagctaarggattgtaaatgcaccaatcagtgctctgtgtctagtctagctaaaggtttgtaaacgcaccaatcagcactctgcaaaaatgcaccaatcagcgctctg

SEQ ID NO: 46229 - DNA, 201 bp, Homo sapiens
gtaattgcacagaatgatcactctgcacctttcaccaatgtaaaagatgaagctcatttcccacagtgctaaaggtttacgtgccaagatctttattacckaatgtaaaatctgatgtgttttaaatttcattttgtaattcactgaactcaaaattttctgcttaattagacactaacaagtgatacgaaatgtgggatt

SEQ ID NO: 46230 - DNA, 201 bp, Homo sapiens
caaagagctataagcatagatttttgatagatagatttcctaaaaggacaatccaatcgctagtggacttttattatctatgtcttcttctggcttatgaytggtacaattctaattttctccctattttatttcttctgaaaaatgtccataaatacaaatgatatgttggaagatggtggagaattattttatttgtct

SEQ ID NO: 46231 - DNA, 201 bp, Homo sapiens
aagctaactttgggagaaatttagtttatagtttaaatgttaataacccttcccccaaactaaactgcctttgtaaagctaataaaagaccaccaggttasgaagagatgaggatcctgaattctgctaaggtgtagacataaacaattaccagccattattctggaggtcacaagatttgcaactcccgcaattactcct

SEQ ID NO: 46232 - DNA, 201 bp, Homo sapiens
ctttggcaattatcagaatattttaacctttattagtattatatatgttaaggtgttctgtgaccagtgatctctgatgttattattgtaattattttggsgcaccatggaacatgcccatgggggacagtaaacttaattgataaatgttgtgtgtgttctgactgctccagagaacagccattcctccagctttctcct

SEQ ID NO: 46233 - DNA, 201 bp, Homo sapiens
tgcccatgggggacagtaaacttaattgataaatgttgtgtgtgttctgactgctccagagaacagccattcctccagctttctccttctccttgggcctscttattccctgtgaaacaacaatattgaaattaggccaagtaataaccctacagtgccctctaagtgttcaatgaaaggaagagccgcacgtctctttaa

SEQ ID NO: 46234 - DNA, 201 bp, Homo sapiens
ggcgttataagtgcttcttattatttatttttcagctttattaaggtataattggcaaatattttttatatttacagtatataacatgatgtttgatataygtatacattgtaaaatacttactacaatcaagctaataaacatatacattacttcacatagttattattttcatgtgtgtgctgagaagttatgatttct

SEQ ID NO: 46235 - DNA, 201 bp, Homo sapiens
gagacgttggttaatggatacaaaattacagctagatgcaataaaggaggaataggttatagggttctatagcattgtggggtgactatagttaagaatawgtcaatgtatattttcaaatagctagaagaaaggattttaaatgttcctagcgcaaagaaatgataaatttttgaggtcataaatataattattctgatt

SEQ ID NO: 46236 - DNA, 201 bp, Homo sapiens
atgttctgaatcctgcaactttactgaatttgcctattagttctaacagtttttggtggagtttttctggttttctatatataagaccatgttgtctacaracaagaacaatttgacttcctcatttccaatttggatgccaattatttctttcctttgtctaattgctctgggtaagacttccagtacaatgttggatag

SEQ ID NO: 46237 - DNA, 201 bp, Homo sapiens
agaatgaagaagtaacctgtagaatgggagaaaatatttgcatactactcatttgacaagggattaatattaagaactcaaagaagtcaacagcaaaatayccaaataacctcatttttaaaatgagcaaaatatctgaatagacatttctcaaaataagacatacgagtggctaataagtatatttaaaaatgttcaata

SEQ ID NO: 46238 - DNA, 201 bp, Homo sapiens
agttctttgtagctttctcaagcttttataacaaatgtgtatatgcaagggtttatttctggggtctctaatctattccattggtctatgtgtctgtttttatgccagtaccatattgttttgattactatacctttgtgatataatttcaaaatcagggagtgtgatgcctctagatttgttcttcttgctgaaaattgc

SEQ ID NO: 46239 - DNA, 201 bp, Homo sapiens
aacaaaagaacaggagtaaattctcaacattcaataaaatctttggtaaatggtttaaattatcaaattaaaagttttgctgactgggctatatagatttwaaaaattgacctaactatatgctgcatacaagaagctcactttacctggaaatacacatgcagactgaaagtcaaagaatggaaaaagttattccttgtg

SEQ ID NO: 46240 - DNA, 201 bp, Homo sapiens
tttcttgattttactgataatccatttttgatctacttcataaaagtttgagtactcttaaaggcattggttgaagatccattgatacccaatgtttgacrgatgaggtacctgcagtcttgcaagatatagtgacacagctggtttgtaacaaaaagactgcaattcatgcctcctgtctcacacaataaagtgtgagaa

SEQ ID NO: 46241 - DNA, 201 bp, Homo sapiens
cattgaaattactgtcaaccacataagtagaactcactaaacctaaacttaatgcattcccaaatttacttcctctaagccagattctgtcaaaaacaacmccttctgtccaatttttgcatgatagatacatcaacattttaaaagctctgaaatattatataaaagattcaaaagataaacccaaatacaaacaagatt

SEQ ID NO: 46242 - DNA, 201 bp, Homo sapiens
ctggtacagcagatgcacaagtaagaaagagaaagaagtaaaatgatctcactacagaatacctccatactgcaatgttaaacaataagaggcagagaagraaacaaagggtttacaacacaaccagtaaacaattaacaaaagaacaggagtaaattctcaacattcaataaaatctttggtaaatggtttaaattatca

SEQ ID NO: 46243 - DNA, 201 bp, Homo sapiens
aaaactcactggtacagcagatgcacaagtaagaaagagaaagaagtaaaatgatctcactacagaatacctccatactgcaatgttaaacaataagaggmagagaagaaaacaaagggtttacaacacaaccagtaaacaattaacaaaagaacaggagtaaattctcaacattcaataaaatctttggtaaatggttta

SEQ ID NO: 46244 - DNA, 201 bp, Homo sapiens
gcattgtttatggcaactattttattttattttattttatatttttttgagatgaagtttaactcttgttgcccaggctggagtgcaatggcgcaatctcrgctcaccacaacctccacctcctgggttcaagcaattctcctgccttagcctcccaagtagcttggattacaggcatgtgccaccatgcccagctaattc

SEQ ID NO: 46245 - DNA, 201 bp, Homo sapiens
tctcttatcagatatgtgatttgtaaatattttctctcattccatagattaccttttcattctgtttattgttttctttgcagtgcagaagcttttaagcytgatgtagtcccagtcatctaattttgcttttgttgcatgagcttctggtatcatatccaagagatcattgccccattgccaagctcagtgtcatgaaac

SEQ ID NO: 46246 - DNA, 201 bp, Homo sapiens
aaaaaaaaaactggatcctacaatttcttcttatcgaaaaacatgatgtattcttccaggcaatttggggctacctgagctgccacatctgtattccatascccagcagttcccgtgatgagcacccagttcagccacagagctgcgttggagcccagaaggcaggagagccccgtaccgcgcacacgctcagctcacttc

SEQ ID NO: 46247 - DNA, 201 bp, Homo sapiens
agtgaggtctaaagccttactatattatacaagggaaacagaacaacaaactgatatttatatagattagatttgctttcagtttacaggttatttctccmagctatatttatgttagtactccaaacaaagtgtttttattttctggaaaaaataccaaaactcttctagcatgtgacttaaacataactgcaaaatatc

SEQ ID NO: 46248 - DNA, 201 bp, Homo sapiens
atctgaaagagacatttagcaaagagatagatattgtttaaaaagatccaacctgaaatcttgaaattgaaaaattcaataagtgaaataaaaaatacaayagaaaaacttcaatagtagaactgaattaagcagaaaaaaaatttctgaaggtgaatagagaaattacccaatgagacaaaaaagaggagaaaagaaaag

SEQ ID NO: 46249 - DNA, 201 bp, Homo sapiens
aattctgtttttattttttgaggaaactccatactgttttccacaaaagctgtgtcattttacattctcattaacagtggacaaaggttccaggttctccrtatctttgctgacatttgagttgttgttgtatttttctataatagccatcctagcaggtgtgtggcgataactcataattttgatttgcatttcccttat

SEQ ID NO: 46250 - DNA, 201 bp, Homo sapiens
gaagggactgtcctacaagatcttaaatatcaatttaagaacaggaaaaacatgaaagagcaaagaaacatggcattttcaaagcaacatcataattctcyagtaacagacccaaatttaaaataatgatcttaagtaaactcagtgagacatgagaacacaaatagacaatccaagaaaaaataatagcttatgatctga

SEQ ID NO: 46251 - DNA, 201 bp, Homo sapiens
ccatgtagctgtgtggttttgagtgagtttcttaaccctgagttctaatttgattgcactgtggtctgagagacagtttgttgtgatttctgttcttttayatttgctgaggagtgttttacttccaatcatgtggtcagttttataataagtgcaatgtggtgctgagaagaatgtatattgtgttgatttggggtggag

SEQ ID NO: 46252 - DNA, 201 bp, Homo sapiens
gctatagatgatatctactattgttaagttccatttatattggaggcaactgagatatggaaagaacaaatacctggcccatgatcacaattttggcaacygctaaaaccggaaaaatgtttgtagtcttatgttactttatcttcaaaaaagttagacttgtgtcttgaagagtgagttggggttaaagtaattgggtta

SEQ ID NO: 46253 - DNA, 201 bp, Homo sapiens
cctctgtgggctctcctggagaccaaggaccaaccaacctggcatccctgtccccagtaaagctctgccacagatttcacaaataattgcagcctagaccrctgatgcactctcagacactgatgacattgattacagctttagaaatcatatggataatatacaacagtgcccacctagaaccttaaccaaagcactcta

SEQ ID NO: 46254 - DNA, 201 bp, Homo sapiens
aaactaagaaaattcatcaccacgagaccagccccacgtgaattgcataagagagcctgacacgtggatgtgaaaggatgatatctgccattatgaaaaamcacaaaagtataaaactcactggtacagcagatgcacaagtaagaaagagaaagaagtaaaatgatctcactacagaatacctccatactgcaatgttaa

SEQ ID NO: 46255 - DNA, 201 bp, Homo sapiens
ttctatatgaactttacagtagttttttccaattctgtgaagaaagtcattggtagcttggtgaggacgactttgaatctataaattaccttgggcagtayggccattttcatgatgtaaattcttcctatccatgagcatggaatgttcttccatttgtttgtgtcctgttttatttaattgagcagtggtttgtagttc

SEQ ID NO: 46256 - DNA, 201 bp, Homo sapiens
acttacgtgatcatcttgtcttaactcacacaactaaaactaccactattaatcattattgcaatcaagcattggttagatttacttaaagactatcacaygaaggcaattgccttcactatgtgaaggcatagtctttaagtgtatgtgagtgtatgtgtgtgtatgtgtgtgtacacgtgctattgaatccactcaaaa

SEQ ID NO: 46257 - DNA, 201 bp, Homo sapiens
catcaccatcagggaccctgcttcatccaaaatggggccatcacaagactgtgcacgctctccataaacttgaggactgtcccatgaggagcctgtcaccrccacaggcaatcttgacccctccacaggcaacgtgactgtgcacctctgtgggctctcctggagaccaaggaccaaccaacctggcatccctgtccccag

SEQ ID NO: 46258 - DNA, 201 bp, Homo sapiens
ttgatagttttctgtttaaaattctagagaataaaattctgattttttttccatgccatcttataggttgctatctggcttatgagttggctattctaggwaaaggtgatcaccctaagtttccagcagaagtgatggttaagggtagtgataaagttggtagagtcatattgtataagacttggcagatgctttaagcga

SEQ ID NO: 46259 - DNA, 201 bp, Homo sapiens
acacgtgtcaagcataaaaagtgtcttgcacatagtaactgttcactaaatatttgttatagctacttacgtgatcatcttgtcttaactcacacaactamaactaccactattaatcattattgcaatcaagcattggttagatttacttaaagactatcacacgaaggcaattgccttcactatgtgaaggcatagtct

SEQ ID NO: 46260 - DNA, 201 bp, Homo sapiens
cccgggaggcagaggttgcagtgagctgagattgcaccactgcactccagcctgggcgacagagcgagactctgtcaaaacaaaacaaaacaaaacaaaamaaaacaaatcatatttttgaaaggtataaggaaaactagcatctattgcctttaagattttctgtgggatttaggtctcaggggtaatgtggagagacac

SEQ ID NO: 46261 - DNA, 201 bp, Homo sapiens
cttaaataagactcccaaaacatagccataaagtaaaaaactgaaattattacattaatgcaaaaattaattaattaaaagactgaaaaaacaataaaaakaaacaaaaactaccagttgacagggtatgtttacattcatccatataaagtggattgcattgttgtttcccaatcctcttgctccctatatccatcccct

SEQ ID NO: 46262 - DNA, 201 bp, Homo sapiens
gaaatttaatttctgtaaaatctctaggatatcccacagaggaaaatgcatggatgctggtggacactaagatatacatacaaaacaataacaataaggcmactattttttttcaaaaaacccagaaagttgggttgggtgctcatttatgggcaaatcatctgagaagctggcagctgccatttgaaccctctggttgaa

SEQ ID NO: 46263 - DNA, 201 bp, Homo sapiens
agtggtgcaatcatagttcactgcaaccttgaattcctgggctcaagtaatcctcctgcctcagcctcctgagtagctgggactacaggcatgtaccaccrtacccctttaattattttattttattttaattttttagtagagatgaggtctcactgttttgcccaggctggccttgaaacaatcctttcaaccttggtc

SEQ ID NO: 46264 - DNA, 201 bp, Homo sapiens
gtcaacctgggaggcagagtttgcagtgagccgagatcgtgccactgcactccagcctgggggacagagtgagactctgtctcaaaaaaaaaaaaaaaaaagaaggcaccctgccagtgggcaaggttttggtggtggattttgtgttagcaagattagacagagagcttgcttcaggtacatgtatttagactccactcc

SEQ ID NO: 46265 - DNA, 201 bp, Homo sapiens
aagccaagaggagctttccactgcagaaaaaagaaaagcaagagatcctcagtagtccacattcccacgatgaatactcacactcctactaacaggagagmttcacagccattgcaggagctgagtcaagtatagagagctgcctggagtccatgcaactgcattgtcccagaaagaaaattcacattgggtcctcttcac

SEQ ID NO: 46266 - DNA, 201 bp, Homo sapiens
catgaggtcaggagatcgagaccatcctgggtaacatggtgaaaccctgtctctactaaaaatacaaaaaattctccggccgtggtagcaggtgcctgtartcccagctactggggaggctgaggcaggagaatggcgtcaacctgggaggcagagtttgcagtgagccgagatcgtgccactgcactccagcctggggga

SEQ ID NO: 46267 - DNA, 201 bp, Homo sapiens
ctgctcaaagtcgaactagactgaaatcaaggcattggacagtgtctgattttgggggaagttattactctctttaggattaactctgaaaacctcaactstatgtaattagaacacactgtgggttgtatttcattagatattcttggatctgtatcttctgtttagactgggaaattaaatttctgtttagatggtgaa

SEQ ID NO: 46268 - DNA, 201 bp, Homo sapiens
cttaaattttaaaattatttttaaaatttgcacagaaaggtcctgggatttttatgtacattgcattgactctgttgattaacttaagagaactgaaatcyttacaatattgaactaaactgtattagttttctatagatgtatagcaagttaccacaaatttatcagcttaaaacaacataaatttattatctcatagat

SEQ ID NO: 46269 - DNA, 201 bp, Homo sapiens
tatatatatatatgtcaaatgccgaagctttccaaacactcaggcatttcagataatcctatttgcctgcagcactccatttcttggctccaatatccaaytctagctatgtacctagtacttcaccattttccagaacaggatccctatttcctggattccatgtatttattttcttagtttaccactcattttgttgaa

SEQ ID NO: 46270 - DNA, 201 bp, Homo sapiens
cttattaacccatcgagacttcctttccttttggctcttttattactgataatagtttgcccactttcttctagacatcaggattagtcaataccttagtmatcttggaattcttcctttgcattacctccctgcatctaatcagcaataaaatcgtgaagtttctatctcagtaccaaatgtcccaacctgttcatttcc

SEQ ID NO: 46271 - DNA, 201 bp, Homo sapiens
aagtaggagaatcgcttgaacccgggaggcagaggttgcagtgagctgagattgcaccactgcactccagcctgggcgacagagcgagactctgtcaaaamaaaacaaaacaaaacaaaacaaaacaaatcatatttttgaaaggtataaggaaaactagcatctattgcctttaagattttctgtgggatttaggtctca

SEQ ID NO: 46272 - DNA, 201 bp, Homo sapiens
agttcttagatcatcatcaagtataacatatttagctttagaagatacggcaagttccaaagttttatatatatgtttaatccaccagaagtgaaatagtrttgctttttaagttggtccacattttggccaacactcaatgatatcagtccttttaattttaactattctagtctatatgcagtgctggagcactgtaat

SEQ ID NO: 46273 - DNA, 201 bp, Homo sapiens
agcaaatgccacagatccttaataaaaataaaattaacttgtttattcaatgagtatttattaaactcttacactgttcttcgtgctggggatacagtagwgaataagacaaagtgccttccactggaggacttcttgcattcttgttgatgagatggtaaaaaataaaaatagctacacactgcaatgtcaactagtaat

SEQ ID NO: 46274 - DNA, 201 bp, Homo sapiens
catgtgctttaacacacatttaagtacattttcaattccacctgggagaagagttcttagatcatcatcaagtataacatatttagctttagaagatacgkcaagttccaaagttttatatatatgtttaatccaccagaagtgaaatagtattgctttttaagttggtccacattttggccaacactcaatgatatcagt

SEQ ID NO: 46275 - DNA, 201 bp, Homo sapiens
gttataatcaatttgagtaacagctgagaaagtacaatagaaatcatatagttttacttttatcccatcaaagtcatgaaatattctgacagggcaatttyatctacttgcctcttcctataaatctttaaaaatctgttttaataataggctaatttccctaccacataaaccaaatatactctcagtggatttggaatt

SEQ ID NO: 46276 - DNA, 201 bp, Homo sapiens
tggtagctgtagctgtggccattcccagttgaacagttcccttaagaatgttggggaatgcttaggatactcttgcaactaacagcagagcccccatgtgscaatattgtaactcgagcaaaaatttacttagtcccgggtagcaaatgccacagatccttaataaaaataaaattaacttgtttattcaatgagtattta

SEQ ID NO: 46277 - DNA, 201 bp, Homo sapiens
caggagtcctgctgtttagtagggggagacagattcttgttgaagaaccatacctgatttatgaccaaatatatatatttttggattatttatttggtaawcatgttgttgaagtgtaacatatgtaaaaagaagtgtaaaataaaaaatataaatgactttatataaagtgaaaacacccatgaaagcattcatggatta

SEQ ID NO: 46278 - DNA, 201 bp, Homo sapiens
aggtagtttttgaacagaaagttatgaaatgatttgcaaaattagcccccaaacaatagcaaatggatttccattcaaatgaactagacagaggcaacatytttgcatatggccttggagggcagtagagccaaaagatttgatgaaaatctaaatgcgagattgcataaagactaggtaaggaaacatttggactcaaca

SEQ ID NO: 46279 - DNA, 201 bp, Homo sapiens
aagttaatagttcaagcctatactcaagagaagggagttttgcatagttgtaaataataagaggaagggatctgtgggggccattttaaaattgagttacwacaccttgcaaaataacagttgattctcatgatacttttcacctgccttagggatgtaggtcaccatttaaggatttcctacttcatgttgtcagtctca

SEQ ID NO: 46280 - DNA, 201 bp, Homo sapiens
ctattgtaaatgttactgctttcttgttttttattttcagattgatcactgttagtttgcagacacactattaatttttgtgtcttggttttgtatcctgmagctttgctaaatttattgatctattccaagaattttttggtataataggcctttctaaatataaaatcacgctatatacaaacgaggataattagactt

SEQ ID NO: 46281 - DNA, 201 bp, Homo sapiens
tcgtgcttttgtttagaagacttcatagtcattttaatatggtgatgaatcagaaaatgaaattcctttatagttataatcaatttgagtaacagctgagraagtacaatagaaatcatatagttttacttttatcccatcaaagtcatgaaatattctgacagggcaatttcatctacttgcctcttcctataaatcttt

SEQ ID NO: 46282 - DNA, 201 bp, Homo sapiens
agaatcctgattgggagaagtgagagcccttaaaaataaaaagaaaacatggagaattgttaataaagttattaattatcattacaacatttgctggaaakgataagatagaagctgtttttcttttttttcaataaaatggattattattgcttatagaagttctgttgttagaaagtataattgtaaaatacattgtac

SEQ ID NO: 46283 - DNA, 201 bp, Homo sapiens
tactccaatcatgtttaatcctatactcactgcagactggatgttttcaacctaacaggtcctaattttcatattggccatagtgacttttttttttttttattttgagatggagttttgctcttgttgcccaggatggagtccaatggcgcgatcttggctcactgcaacctccgcctcctgggttcaagcaattctcct

SEQ ID NO: 46284 - DNA, 201 bp, Homo sapiens
ccagcatttttaggtttgtgaactcagaaaatctgagacaggtctcagttaatttagaaagtttattttgccaaggtcgaggacccacgcctgtgacacarcctcaggaggtcctaatgacatgcatctaagatggtgagaacacagtttggttttatatattttagtgagatacgagacatcaatcagcatgtgtaagat

SEQ ID NO: 46285 - DNA, 201 bp, Homo sapiens
ttaaattctgcatgctgtaggaagactttggagaaaacaaaacaaaaccaaaaccttgtacaaccaccctcctctaactacagcaattttttattttactyctctcttgacacttcttacatgctgctgtgtgttagtgactatctttgtgtgtgtgtgtgtgtgtgtgtgtgtgtgtgtgtgtgtgtgtgtgtgtgtttt

SEQ ID NO: 46286 - DNA, 201 bp, Homo sapiens
accctcccatctttctacatatacttaaaggcagttaaattgctgctaaaaatgtgaaatggaggtgtgaacatttctagaggcaattaagtagttctgcmttttactggtaaattctatcattcttaaaaaaagagagaggtttatataaaaatggagaaaaaggaaattgcatgtgcagatgtaaaataccatctgtgc

SEQ ID NO: 46287 - DNA, 201 bp, Homo sapiens
acaaaacaaccaaatttgtatccctcttctctgagccttagtaactacaaatgtatctgaattgttcaggtaccaaacagctctaggaaacaaacttactrttagaagctgaagatagctttctcaagtgccaaatgcatctttaagtaccaaaagagagagaatcaattacacagatattgcttaatatgcaaaagggag

SEQ ID NO: 46288 - DNA, 201 bp, Homo sapiens
aacaaccaaatttgtatccctcttctctgagccttagtaactacaaatgtatctgaattgttcaggtaccaaacagctctaggaaacaaacttactgttaraagctgaagatagctttctcaagtgccaaatgcatctttaagtaccaaaagagagagaatcaattacacagatattgcttaatatgcaaaagggaggtag

SEQ ID NO: 46289 - DNA, 201 bp, Homo sapiens
caagaaactcaggtttgaagtttgttaaagaggaaactggcagggagttttgaaggatgtccaatacactgaacttaagtttccatcacatccaaaggcgraaaaatgttgacatcacaaggatctcagtcttttctccagataatatgcaagttcagagatgttcagtgtctttccctagacctctctggtgtaagtgta

SEQ ID NO: 46290 - DNA, 201 bp, Homo sapiens
tctattcttagaaggacattttctctagataaatttgtatgaaaagagttaaagtgggttgggcgcggtggctcacgcctgtaatcccagcactttgggarcccgaggtgggtggattacaaggtcaggagatcgagaccatcctggctaacatggtgaaaccccatctctactaaaaatacagaaaattagccgggcgtg

SEQ ID NO: 46291 - DNA, 201 bp, Homo sapiens
ctgtatagttttgtggttttccaaaacattcaggagggactagaaatagagacttgacaaaaatgagttgatcagtaaaatatattatttgcaagttagcrtatgttttaggttctatacatcaatttggataaattatattttatttttcttataaggaaaatggagaaaattgttctctattattacaagtaaaaaaaa

SEQ ID NO: 46292 - DNA, 201 bp, Homo sapiens
tgtctttgattttttttgatcttttgttcatgtgcttttaaaaacacctcactagataacttcttttgtatctctattattttttgtgtgtgattctctcrtttttttcctctttattttgtatctctgtttttttaatatgactctctcattttttctctttattgggcttaatcatagcatctaggatttttgttgata

SEQ ID NO: 46293 - DNA, 201 bp, Homo sapiens
tagggccctaagataaagaaatgagctgaaaacttctgaaagagaactttttcagggcccagaagataaagatataccaggctttcaatcaaaatccaggragtgtcatggcttacaagtatagataaacaaggggaagactacattccactaaaactgcaatctagccccaacccagctgagtccttggttggcttgaga

SEQ ID NO: 46294 - DNA, 201 bp, Homo sapiens
atacatttgaagcagatacatagatgatccagatattacaggtaactggcaaggacttaaaaggtggactaaaaaaagtgaaggaaaagaaaattcgattrgagaagtgggacacatagaaaataatcaaacaggttgggcatggtggcttatgcctataatcccagcactttgggaggctaaggtggaaggatcacttga

SEQ ID NO: 46295 - DNA, 201 bp, Homo sapiens
cctatattatcccgctaatgccccctattcctatatggtgagatcagtgcaacagttttaaatcctgggatgaaactgcttaattctttactagaagattyggataagtagtagcctacatggttctgaaaatgataaaagatttattggaacagtcagaaaattgctttcgctaactgggaaaataattgtgtttttaga

SEQ ID NO: 46296 - DNA, 201 bp, Homo sapiens
atccacacaccacacttcgataaccattgcagaagagaattatctagacaagccattctggctattcttacccatgacttcttaatatttattttatcatraagattccttaaaatattaatgtctgtagtttggtccatatatctaaaatttagatgagcatagagcattcccaggaaaaatctatggttcctatgaaag

SEQ ID NO: 46297 - DNA, 201 bp, Homo sapiens
aaggtctgcttcgaagcttacgtggtcattgacagaattcagttcttctcaggctgttagactgattgttggacagagactactttcacttccttgtcatrtgtgctgatccaaagaacaggacacagcatagcagatggcttcaattgcaggaatcaaatgagaaagtgagaaagagcctgtgaaggagattaaagtcac

SEQ ID NO: 46298 - DNA, 201 bp, Homo sapiens
ttaggcccgtgattctgaaccactcagaaatctagagcttttccatttcatagttacagtatccattcctctctgcacacattgttagaatcacaaaacatgtgagaaagctatccttttaggtgtgcattgggaacacaagccctgtgaaattggaggctgctgcctgtgtctagcaagtctgctggtatttgccaagca

SEQ ID NO: 46299 - DNA, 201 bp, Homo sapiens
aatctggccctacatttgtcagattaatagctttgttcatttttatcataactatctgggtatttgcctttcacactccaatatcggatatgttcatggcrgatctattttcttatttacttgcttccaatttaactaaatatgtgaccaaactacttagaactatccacgaaaattctacaaatatacttaaaattagtt

SEQ ID NO: 46300 - DNA, 201 bp, Homo sapiens
ccaaaacactcttagatttgaaaaattaaggaaagttgcagagtactaaatcaacatacaaaaatcaatagcattttatacaccagtctgaaaaatgtgcmaaagaaatcaagaggcaatcccatttaaaatagctacaaaaaaaaagcctaggaataattttaaccaaacaagaaccaacctctacaaacaaaactataa

SEQ ID NO: 46301 - DNA, 201 bp, Homo sapiens
aaaacataatctgaaatcttgctaaatctggccctacatttgtcagattaatagctttgttcatttttatcataactatctgggtatttgcctttcacackccaatatcggatatgttcatggcggatctattttcttatttacttgcttccaatttaactaaatatgtgaccaaactacttagaactatccacgaaaatt

SEQ ID NO: 46302 - DNA, 201 bp, Homo sapiens
tttaggcccgtgattctgaaccactcagaaatctagagcttttccatttcatagttacagtatccattcctctctgcacacattgttagaatcacaaaacatgtgagaaagctatccttttaggtgtgcattgggaacacaagccctgtgaaattggaggctgctgcctgtgtctagcaagtctgctggtatttgccaagc

SEQ ID NO: 46303 - DNA, 201 bp, Homo sapiens
aactgatctaggaaacaagataaaagtaaataaagaagagatactttattcataagaaaacttgtgtttagttctgacttatctttctttgagcttttctrtatctcattgtctccgtttgttcctttgtttttccattcttacttttcctaatttacaggtattaagggaagataaagatacacatctttgtcttcttct

SEQ ID NO: 46304 - DNA, 201 bp, Homo sapiens
tgaaccaagatcacgccactccagcactccaggtgacagagcaagactctgtcttaaaaaaaaaaaaagacagttgtgtgtgtgtgtgtgtgtgtgtgtgtatttaatgttaaagaaaaagctggcaatagccttgtgataaatacagtgcagcaaggcaaaatgacttgtcttgtatttaaataagcataccatctattc

SEQ ID NO: 46305 - DNA, 201 bp, Homo sapiens
ttcccactcatggtgcagacttttcatcctctcttttatgcatggttcattggaattaacctgctactttaggcagagttctccagggcaaacaccactcyagcacttactttctcttctgggattatattttttgtaatttctgaggatttaaaaaaattattcttctacccccatggtacaattttttaactatattta

SEQ ID NO: 46306 - DNA, 201 bp, Homo sapiens
gtgaaccaagatcacgccactccagcactccaggtgacagagcaagactctgtcttaaaaaaaaaaaaagacagttgtgtgtgtgtgtgtgtgtgtgtgtgtatttaatgttaaagaaaaagctggcaatagccttgtgataaatacagtgcagcaaggcaaaatgacttgtcttgtatttaaataagcataccatctatt

SEQ ID NO: 46307 - DNA, 201 bp, Homo sapiens
aatataaaattgctactgatttgatgattttacattttccttaaaaattatggatagttctgactttagatttcccaaatgcaatatattttataaaaacygacaggtgacattccctctaaaaagaagaaattgtgcttcctcaaggaaacctaccaaaatatcttacagattaaatattactaaatatttagataattg

SEQ ID NO: 46308 - DNA, 201 bp, Homo sapiens
ctcttagggaggctgaggcaggtgaatcacgaggtcaggagttcaagaccagcctggccaacatggtgaaaacccgtctctactaaaaatataaaaaattagccaggcatggtggcaggcacctgtagtcccagctactcgggaggctgaggcaggagaattgcttatacctgggaggcagaggttgcagtgaaccgagat

SEQ ID NO: 46309 - DNA, 201 bp, Homo sapiens
agtgaaccaagatcacgccactccagcactccaggtgacagagcaagactctgtcttaaaaaaaaaaaaagacagttgtgtgtgtgtgtgtgtgtgtgtgtgtatttaatgttaaagaaaaagctggcaatagccttgtgataaatacagtgcagcaaggcaaaatgacttgtcttgtatttaaataagcataccatctat

SEQ ID NO: 46310 - DNA, 201 bp, Homo sapiens
caatttcagaaacaaaatataaaattgctactgatttgatgattttacattttccttaaaaattatggatagttctgactttagatttcccaaatgcaatrtattttataaaaactgacaggtgacattccctctaaaaagaagaaattgtgcttcctcaaggaaacctaccaaaatatcttacagattaaatattactaa

SEQ ID NO: 46311 - DNA, 201 bp, Homo sapiens
cagtgaaccaagatcacgccactccagcactccaggtgacagagcaagactctgtcttaaaaaaaaaaaaagacagttgtgtgtgtgtgtgtgtgtgtgtgtgtatttaatgttaaagaaaaagctggcaatagccttgtgataaatacagtgcagcaaggcaaaatgacttgtcttgtatttaaataagcataccatcta

SEQ ID NO: 46312 - DNA, 201 bp, Homo sapiens
ttagttaatacaagacttgactaatgtgctgtgcaattttgtaaattactgatactttgaaaaaaatggttataagacacttttaaatgattggtttattygctgccatttttatggttggaactcagtcttacgtagccctaaaaggcaacttctgaatcaccactattgtaggtcattattgcaattgtaatactacat

SEQ ID NO: 46313 - DNA, 201 bp, Homo sapiens
ttgaacccaggaggcagaggttgcagtgaaccaagatcacgccactccagcactccaggtgacagagcaagactctgtcttaaaaaaaaaaaaagacagttgtgtgtgtgtgtgtgtgtgtgtgtgtatttaatgttaaagaaaaagctggcaatagccttgtgataaatacagtgcagcaaggcaaaatgacttgtcttg

SEQ ID NO: 46314 - DNA, 201 bp, Homo sapiens
tgaaataagcatagtttctatgacaatttagaaaaaaaatttatcatttatagcaaatgatttgatttgaaaatgcatagaataaatttattttcttagamgaaaccacagatgcaagaatttgggaaaataactcattgtaataaatgataaacccactgtaccataatgtcaagtatcaaagcattgatatggactttg

SEQ ID NO: 46315 - DNA, 201 bp, Homo sapiens
gcttgaacccaggaggcagaggttgcagtgaaccaagatcacgccactccagcactccaggtgacagagcaagactctgtcttaaaaaaaaaaaaagacagttgtgtgtgtgtgtgtgtgtgtgtgtgtatttaatgttaaagaaaaagctggcaatagccttgtgataaatacagtgcagcaaggcaaaatgacttgtct

SEQ ID NO: 46316 - DNA, 201 bp, Homo sapiens
tagggtgaacctgctttatattttggatttgaaataaaatgtaattaattaatagataaatctatcttttaaatatggacttgtcttttccttcaagtagyatgaatttgattattttatatgttgaaataagcatagtttctatgacaatttagaaaaaaaatttatcatttatagcaaatgatttgatttgaaaatgca

SEQ ID NO: 46317 - DNA, 201 bp, Homo sapiens
cgcttgaacccaggaggcagaggttgcagtgaaccaagatcacgccactccagcactccaggtgacagagcaagactctgtcttaaaaaaaaaaaaagacagttgtgtgtgtgtgtgtgtgtgtgtgtgtatttaatgttaaagaaaaagctggcaatagccttgtgataaatacagtgcagcaaggcaaaatgacttgtc

SEQ ID NO: 46318 - DNA, 201 bp, Homo sapiens
ttcaatatattacttaaaatttctatgcccagtttccctatccggaatatgagtaaacagtacctatctcatagatttgtcgtaagaattaaatacgttargggacacattattgcaatgcctcaaacatagtaagccatttaaaagatatggtgttgggctgggcatggtggcttatgcctgtaatcccagcactctggg

SEQ ID NO: 46319 - DNA, 201 bp, Homo sapiens
atatttggttcctcctatctctaccaatttgtcatgcacatttgtctatgttttgatcacaatagttcattgtgtatgttccttccccactaaagaggctstgcctgaaaatcaatttatgaaatgagatacaaggagggagggtagccccaaagagcccatgtatgtttgagtcttcagtctgactgctggggccttgtt

SEQ ID NO: 46320 - DNA, 201 bp, Homo sapiens
cagataagaatatagtgcataatatctaatgtagctgtacatttttgagatttataaaatggaattatattgttaagtatctttacgtgatttgcttctckcttttcatttcatccctatgttcacagttaaaacaactcaatggcaccttaagaagtgagagtctctgtgccaattaggggaatttcatgataggattat

SEQ ID NO: 46321 - DNA, 201 bp, Homo sapiens
acctaaatattaagcccagcattcattagctattttttctgatgctctccctccccacatccccccttcctgctgataagactcatgtgtcattcccctcyctgtgtccatgtattctcattgttcagcttccacttgtgagtgagaacaagtggtgttcggttttctgttcctgccttggtttactaaggatgatggctt

SEQ ID NO: 46322 - DNA, 201 bp, Homo sapiens
tgaagacaaaagtagaaatcaatgaaatagaaaacagatgagaaagggaacagctcactttgaagagaccaacaaaactgacaaaattctaactattcagwtcaataataaaaacgataatcaatatcagaaatagaaaaggggttattacaaaaaatctcatagtggtgatgatttcactggttaattcaattagacatt

SEQ ID NO: 46323 - DNA, 201 bp, Homo sapiens
tagtgaactgaaaaaatactcaaagcatagaaagaaaaagggaaaaattagatattgtgtaaatggtatttgtgttatgctaatttttttaaacataagtraaaatgaagtcccaaaggagaggagagaatacacggggagatgcattttttgaggagttaaggccaagaattttctaaaattttggaaagaccgccacac

SEQ ID NO: 46324 - DNA, 201 bp, Homo sapiens
ttttgattttctttctagacgatctgtctagtgctgagaataaggtggtaaattcccccacagttattgcattggagtctttcttttcagatttagtaatmtttcctttatgaatccgggtgttccagttttgggtgcatatatatttagaattgttatttcctcttgctagattggtccttttatcactatttagttgtc

SEQ ID NO: 46325 - DNA, 201 bp, Homo sapiens
tggcgtgacctcagctccctgcaacctccgcctcccgggttcaagtgattcccctgcctcagcctcccaagcagctgggaagacaggcacacgccaccatrcccagctaattttctgtattttactagagatggggtttcaccatgttggccaagatggtctcgatctccggaccttgttatctgcctgccctggcctccc

SEQ ID NO: 46326 - DNA, 201 bp, Homo sapiens
ataccattttgcttgtttaaaatttgttgagacttcttttgtggctcaatagatggtctgttctagagaatattctgtatgattatgaaaataatgtgtawtctgcagttgttggataaaatgttctataaatatctgttaggtctgtttgttctaaattccactctaacttcaatgtttcttttttgattttctttctag

SEQ ID NO: 46327 - DNA, 201 bp, Homo sapiens
ttacacttgagtatttaatccatcttgagtttatttttgtgtacagtgagagataggggttcagtttcattcttttgcctgtgactgttcaatttccccarcactatttattgaagaaaacctcagttttccagtgcatgttcttggtgctttgtcaacaatcaattggctgtaaatatgtggatttatttttgagttttc

SEQ ID NO: 46328 - DNA, 201 bp, Homo sapiens
cttttgaggtcttagccataaaatcttttcctagacgactgttggaagtgcgtttcctatgtttccttctaggagttttatagtttgtagttttacacttragtatttaatccatcttgagtttatttttgtgtacagtgagagataggggttcagtttcattcttttgcctgtgactgttcaatttccccagcactattt

SEQ ID NO: 46329 - DNA, 201 bp, Homo sapiens
ttgattttaatatagtctcatttgtctatttttgttccatttgtctgtgcttttgaggtcttagccataaaatcttttcctagacgactgttggaagtgcrtttcctatgtttccttctaggagttttatagtttgtagttttacacttgagtatttaatccatcttgagtttatttttgtgtacagtgagagataggggt

SEQ ID NO: 46330 - DNA, 201 bp, Homo sapiens
ttctaatagcccacttgctttccaactggcattttcttccttactatattgatgtagtcttcacattctttataaaacagactacgtttttgacatgcctsatctaaaaatagtttgtcctgctttggcaggacttggatattgcagaggagcatttcaggatttgctgaacccaagcagctgacatccaaacaggctttc

SEQ ID NO: 46331 - DNA, 201 bp, Homo sapiens
cactgtttctaaaagttactgaatggaggagtagagtggtaagagtttagaaaggaagacagacaataagttattttgacattttcatacatgctaggctrtttgaattttgttccaaagcattgataactattgtaatagctttaacaggggaggggcatgatccaatttgcattttaagaagtttcctcttgattttgt

SEQ ID NO: 46332 - DNA, 201 bp, Homo sapiens
tatttaaatttcatcacttttgcttccccaattaaaagaataaaaagcaaaaactatagggtgaacctgctttatattttggatttgaaataaaatgtaaytaattaatagataaatctatcttttaaatatggacttgtcttttccttcaagtagcatgaatttgattattttatatgttgaaataagcatagtttctat

SEQ ID NO: 46333 - DNA, 201 bp, Homo sapiens
tagaaagctagtcttcagcctctgagattctttcctcaacttggtctattctacgattaatgcttgtgatggcattatgaaattcttgtagtgtgtttttyagctctatcatgttgcttacattcttttctatactggctattttgtctgtccgtttctgttgttttattctgattcttagcttccttggattaggcttca

SEQ ID NO: 46334 - DNA, 201 bp, Homo sapiens
attgaaacattagaaattatattttaaaaatgtaagaataaaatcatttgtagtcttatcacccagagataactatttcaagtgttttctgtgaagatatwtgaaaaaaattatatatatatatatatttggacatttattagtattccaaaatgggatcagattatacaaattattctccaatctgtttttactcccatt

SEQ ID NO: 46335 - DNA, 201 bp, Homo sapiens
gggcttccctttgtaggttacctggcctttctctctagcagctttaacattttttctttcattttgaccttgaggaatctgatgattgtatgtcttggagygatcttcttgtgaagtatcttactggggttcttcgcatttcctgaatttgaatgttggcctctctagctaggttggagaagttctcatggatgatatcct

SEQ ID NO: 46336 - DNA, 201 bp, Homo sapiens
gaatggcattagagtttctttgttgattctccattaactataacctcctcataaatacaaaccatattcatcttaccaaggtattactgacagtatttttyacattggaaaacaaaggatgcttacttcatggtcacataaaacaattatttttcttaaaaattatccagtaatgcatgtttataattgaaacattagaaa

SEQ ID NO: 46337 - DNA, 201 bp, Homo sapiens
agatctgtgaacataccaggcaaaaatctcagcctttatggggtgcattgttgggcaagacagataaacaaatgaataaaataagtactatattatatggygataattgctttggagaacagtaaaataaggagaaacaattctaaaagccattttaagtagggggtatcatgaaggccttattgaagggacatttgaata

SEQ ID NO: 46338 - DNA, 201 bp, Homo sapiens
tgcttgaaccagggagttggaggtttcagtgaaccgagattgcgccactgcactccagcctggcaacagagcaagactccatcttaaaaaaaaaaaaaaaattgatgtctatgcactgataaaacaacaaatccttgagaatggggcaacaccactttctagcccaaattctgcttggctttgtcaccttccatttcagat

SEQ ID NO: 46339 - DNA, 201 bp, Homo sapiens
taatataccccagactggggagcagaagattgggcataatcataccttagcttttttcaatctccaaagttaaaagaataaaagcagaagactagcatacwttatattttagaattaaaataaaatgtaattaaatttaattaattaattatattttagcattaaaataaaatgtaattatttgtaaaatcaattgactaa

SEQ ID NO: 46340 - DNA, 201 bp, Homo sapiens
catctctactaaatacacaaaaaattagccgggcatggtggcgggtgcctgtagtcccagctactcgggaggctgaggcaggagaatggcgtgaacccacraagcggagcttgcagtgagctgagatcgcgccactgcactccagcctgggcgacagggcgagactcagtctcaaaaaaaaaaaaaaaaaaaaaaaaaaaa

SEQ ID NO: 46341 - DNA, 201 bp, Homo sapiens
gtctggatctcttgacctcatgatccacctgccttagcctcccaaagtgttgagattacaggcatgagccaccatgccgagccaaaaaacaaacaaacaaaaaaaccccaaaaaaacccagctttttaaacacaacctggaggagactagtacctaaatccagggcattgtctgccttccaccgtggctcccagctgtctt

SEQ ID NO: 46342 - DNA, 201 bp, Homo sapiens
cgtctggatctcttgacctcatgatccacctgccttagcctcccaaagtgttgagattacaggcatgagccaccatgccgagccaaaaaacaaacaaacaaaaaaaccccaaaaaaacccagctttttaaacacaacctggaggagactagtacctaaatccagggcattgtctgccttccaccgtggctcccagctgtct

SEQ ID NO: 46343 - DNA, 201 bp, Homo sapiens
tgtcaaggaaaaatgcccaatttaacagttaagtagcctagtaacatatgccacagcaacatgtcttgtcccaaacaatgcgcatagttgaaagagaataygaaaaaaacaacaaaccagtatcaatgccacctgaaactcataagggaaatgcttaaaatgttccatgtaaaacatatatgaaatatgtccacctcaaag

SEQ ID NO: 46344 - DNA, 201 bp, Homo sapiens
tctcccctgtaaagttacactttttccttttataattagtaaatatcttgaaggagatattttgagactatgaaattattttgtttctcctcaaactttcrcatactaatttggacatccattggtagatttttttaaacttttaagttcagggatacatgtacagatttgttattatagataaacttgtgtcatggagat

SEQ ID NO: 46345 - DNA, 201 bp, Homo sapiens
tcgtctggatctcttgacctcatgatccacctgccttagcctcccaaagtgttgagattacaggcatgagccaccatgccgagccaaaaaacaaacaaacaaaaaaaccccaaaaaaacccagctttttaaacacaacctggaggagactagtacctaaatccagggcattgtctgccttccaccgtggctcccagctgtc

SEQ ID NO: 46346 - DNA, 201 bp, Homo sapiens
ccatagggctttacttttagaatcctggagtttcctaagaaaatagaaaggtagaaagtggcaattatagcccacattcctactaagcagctataaatgcwaaaatatgctgatatatcaattaccattataataaaaatacaaaaatataagttacacaatgtaggcaatgtatttgttaacacttatggatatctataa

SEQ ID NO: 46347 - DNA, 201 bp, Homo sapiens
tcagcctatatatcagggagtacatcatgtcagtatgtcttattactggtgataattaaccttgatcatttggttaaggtggtgtctgctggctttctccyctgtaaagttacactttttccttttataattagtaaatatcttgaaggagatattttgagactatgaaattattttgtttctcctcaaactttcgcatac

SEQ ID NO: 46348 - DNA, 201 bp, Homo sapiens
atcgtctggatctcttgacctcatgatccacctgccttagcctcccaaagtgttgagattacaggcatgagccaccatgccgagccaaaaaacaaacaaacaaaaaaaccccaaaaaaacccagctttttaaacacaacctggaggagactagtacctaaatccagggcattgtctgccttccaccgtggctcccagctgt

SEQ ID NO: 46349 - DNA, 201 bp, Homo sapiens
cagaaaaaaagtgtgataatttcaaatgagccgtttacataagttaatgttgatgttagagttgtgatttgcatttcccgattttggttcttcatttgaartgttattgatttatttccatagggctttacttttagaatcctggagtttcctaagaaaatagaaaggtagaaagtggcaattatagcccacattcctact

SEQ ID NO: 46350 - DNA, 201 bp, Homo sapiens
acaataagttttcagggtatgttatttgaacagaaagcaaaagagacacaatattttaaggtttaggtagataaaacctagcactgtggcaggagtgtctrttggaagcaaatgtcatttcctcccagtatagagtagtttggtttttgagttgtttctttaggttcagagtaaataggatgctctctaaaatctgctcta

SEQ ID NO: 46351 - DNA, 201 bp, Homo sapiens
gatctcggctcactgcaacctctgcctccccagttcaagcgattcccctgcctcagcctcctgagtagctgggactataggcacctgccaccacacccggstaatttttgtatttttagtagagacagggtttcaccatgttggccaagatcgtctggatctcttgacctcatgatccacctgccttagcctcccaaagtg

SEQ ID NO: 46352 - DNA, 201 bp, Homo sapiens
ggaacagctccggtcttcagctcccagggagatcaatgcagaaggtgggtgatttctgcatttccaactgaggtacctgactcatctcattgggactggtyacacagtgggtgcagcccatggagggtgacccgaagcagggtggggcatcacctcacccgggaagtgtaaggggtcaggtaactccctcccctagccaag

SEQ ID NO: 46353 - DNA, 201 bp, Homo sapiens
gactaaataggagcaggacattttatgagatgggtttgaggggtatatttggctttctctgattcttactgaattgaaagctttggcaaatataggtaagktggctgtcattgaccaaatcatgtccattctgggtctattgctacataagctgtggtttaatttccaggactggttgctgcagaggttatggtcaaagct

SEQ ID NO: 46354 - DNA, 201 bp, Homo sapiens
tacgtggaagttcgttagacattttgggaactgtcttgccctcctgggaaatatttagtttggtttaattacaaaaaaaaaaaaacagcttttttttttttcttttctttcttttttgagacggagtcttgctctgtcgccaggctggagtgcagtggtgcgatctcggctcactgcaacctctgcctccccagttcaagc

SEQ ID NO: 46355 - DNA, 201 bp, Homo sapiens
attacaaccattatattaaaaatgtgtatcatgaggaatagaagatggctgaataggaacagctccggtcttcagctcccagggagatcaatgcagaaggygggtgatttctgcatttccaactgaggtacctgactcatctcattgggactggttacacagtgggtgcagcccatggagggtgacccgaagcagggtggg

SEQ ID NO: 46356 - DNA, 201 bp, Homo sapiens
agaatgatggcttactttttttcctattggatagtgtgttagagtaattataagcaataatcattgcctttcccataaatattctccctgtaaataatccrtttattttactttatgtagtcttgaatcactagaaactatttagtaatgctgatgagaaatgctttaatataaaggagactgattttatctgtcagttac

SEQ ID NO: 46357 - DNA, 201 bp, Homo sapiens
tgacttttctcccttagaacacttaaagtgaaatattttctgagtttctcctgtcttatgctctctaacttagataaatggtagacacagagcaaaaatcmtttgacaattaagaaagttaaatttcttaatgttatgtgaactcttcttagtgctaaaaccaaagctgaatccaagtctacaaagaatatgtctaatccc

SEQ ID NO: 46358 - DNA, 201 bp, Homo sapiens
atacctgaccatatagacatattttcatcaccatagctactggtataagagttcgctgtagggatagacttgatcacttgggaaaagcctttaataaattwgtaggcttgcaaagtagaaggagccttagactggagccctggttacatgggaagagggattctatttggcactttccacgtaccctggggaaataacata

SEQ ID NO: 46359 - DNA, 201 bp, Homo sapiens
gtttatagtttaaatgttaataacccttcccccaaactaaactgcctttgtaaagctaataaaagaccaccaggttacgaagagatgaggatcctgaattmtgctaaggtgtagacataaacaattaccagccattattctggaggtcacaagatttgcaactcccgcaattactcctgcagataacatcactattacaga

SEQ ID NO: 46360 - DNA, 201 bp, Homo sapiens
tagtcattttgttgggatgctatttttcatagacagagaattagtttttctacatagatacctcatatttaagtactttctataaaatgtcctgccatccyaaatagattatatattctatttcagggatcatggcttgtacttatattcccaatgtttataacagtaaggatgtaatacctcttcttattattgttattt

SEQ ID NO: 46361 - DNA, 201 bp, Homo sapiens
ttgtaaagctaataaaagaccaccaggttacgaagagatgaggatcctgaattctgctaaggtgtagacataaacaattaccagccattattctggaggtyacaagatttgcaactcccgcaattactcctgcagataacatcactattacagagcgagcctaagattggccttttgagatatcttttcaggtttttacat

SEQ ID NO: 46362 - DNA, 201 bp, Homo sapiens
atgtaaagctgcccccagtggtgaagaacattatgggcatgtgcagaaatgtctctcttttatcttgcaaatgagcaggctctctgctggaaaatgaatgrttcttttgggtggctcagtaggaactgaatggtcaccgtgatcaataactagcaacattttctgtgatttccaagtcttgttttacaatttggcaacgtc

SEQ ID NO: 46363 - DNA, 201 bp, Homo sapiens
acataaacaattaccagccattattctggaggtcacaagatttgcaactcccgcaattactcctgcagataacatcactattacagagcgagcctaagatyggccttttgagatatcttttcaggtttttacatttctgaggacagtctacccctgcccatctgtcatgtggccccacccaaactgactccttgtcccacc

SEQ ID NO: 46364 - DNA, 201 bp, Homo sapiens
tgatccaacaatcccttttctgggtatatatccagaggaaatgaaatcagcaccttgaaaatatatctgcactcctacattcattgcaaccttagccacartatacaagatatggaatcaacctaaatgtctgttccagtgaatggagaaggttgaaatacagatatgaaatacagatgtgattgtttatgtgtatctgtg

SEQ ID NO: 46365 - DNA, 201 bp, Homo sapiens
gatttcagaacaaaaggaattttttaaatgatccggtagaataataatacttttgttagtgtcctcatatcttgatattctcagatattaggacattgctygaagcataaatcttgatgagtttcttggatgttttgtttcatctcttgtgctttttctttttagctaatgtaatcatagatttaatgtaatagccctatc

SEQ ID NO: 46366 - DNA, 201 bp, Homo sapiens
gtttcatctcttgtgctttttctttttagctaatgtaatcatagatttaatgtaatagccctatctctaagttgctgtcccccacgttttatctctcagtratataggctttagggcctgatatcagtacagagctatttattagttcaggatttcattttgtcataagattttgcatcttacgtgaactattttttgcat

SEQ ID NO: 46367 - DNA, 201 bp, Homo sapiens
ataaacagaaaaaaagtgtgataatttcaaatgagccgtttacataagttaatgttgatgttagagttgtgatttgcatttcccgattttggttcttcatytgaaatgttattgatttatttccatagggctttacttttagaatcctggagtttcctaagaaaatagaaaggtagaaagtggcaattatagcccacattc

SEQ ID NO: 46368 - DNA, 201 bp, Homo sapiens
tgcatcttacgtgaactattttttgcatttctggacgatttcttctattacttcaatattatcttgtgagtgtgatacacttgtgttactgatgaggattrtgaatcttaagcaggagtctgcccactccacaaccatatgaaataccacttaacatttttttgtaatcagtgccacaggccctttaaagctcatttctga

SEQ ID NO: 46369 - DNA, 201 bp, Homo sapiens
cagttatccctgtttttcaaactttccaatatttagagatgtgaggtttctgagtttgctcccaatctctatttttaaaactttatttattttttgttagmaaaaaggttaacaaagagcatctgttcctttaattttgtagtctgttcctttaattttgtagtactatagcgcatctggtaacccagtaggctatttgtt

SEQ ID NO: 46370 - DNA, 201 bp, Homo sapiens
cagtaaccgttttctctacgtggaagttcgttagacattttgggaactgtcttgccctcctgggaaatatttagtttggtttaattacaaaaaaaaaaaaacagcttttttttttttcttttctttcttttttgagacggagtcttgctctgtcgccaggctggagtgcagtggtgcgatctcggctcactgcaacctctg

SEQ ID NO: 46371 - DNA, 201 bp, Homo sapiens
aatatatttatttactcaaaattcatcctttggttcttgatgtctctcttctttgttatcaaagattttctcttcatttttagcttgatgtttttaagcarcattttcagttatccctgtttttcaaactttccaatatttagagatgtgaggtttctgagtttgctcccaatctctatttttaaaactttatttattttt

SEQ ID NO: 46372 - DNA, 201 bp, Homo sapiens
actgacctacagttggctatgttaaaaagcttctttgaatctgatagctcatttttagctatttctttgaataatctgaaaggtatatcctgaaaaaaaaatatattacatagccgagttaacccagctgcatattaattctttaaaatgataaatatatgacatttggttattttaaaaagtaatgacatcaaataaatt

SEQ ID NO: 46373 - DNA, 201 bp, Homo sapiens
tgtgagtgtgatacacttgtgttactgatgaggattatgaatcttaagcaggagtctgcccactccacaaccatatgaaataccacttaacatttttttgkaatcagtgccacaggccctttaaagctcatttctgataccacctgcaggtattttgggtaagtgatagatggaaggaataagcgcacacacattgtaaga

SEQ ID NO: 46374 - DNA, 201 bp, Homo sapiens
ctggaacctccgcttcctgggttcaagcaattctcctgcctcagcgcccccagcagctaggattacaggcacatgccaccacacccagctaatttttgtakttttggtagagacagggtttcaccatgttggccaggctcgtcttaaactcctgacctcaagtaatctgcccaccttggcctcccaaagtgctgggattac

SEQ ID NO: 46375 - DNA, 201 bp, Homo sapiens
ctaaaagaataaatggttcagggagatgaaaacattgttttgagaccaccattggcctgagtcagtgtagcaatgcttatgaggcgattggaaccaaagakaatatgctagcacagtttatacactatatctctcttatgcagctttagtttattgctcacgatactcattcacgaatccttgaaaattgcttcaaagagg

SEQ ID NO: 46376 - DNA, 201 bp, Homo sapiens
caatgagtatatttgcttttgcagtcagaaaataaagcaatggatgttattttaaaagaaatagctcataaagtaaatatatatatttacatataatattwgtttatttatttatttattttgagatggagtctcattctgttgcccaggctggagtgcagtggtgtgttctcagctcactggaacctccgcttcctgggt

SEQ ID NO: 46377 - DNA, 201 bp, Homo sapiens
tcaaccttgcatcccaggcatgaagcctccttgatcatcatgcatttgctttttgatgtgctgctggattcagtttgcaggtattttgttgaggatttctrcctcaaaattcatcaaagacattggcctgaagtttcttttctttcttgcttttttttttttttttttttttttggttgtctctgcctggttttggtttca

SEQ ID NO: 46378 - DNA, 201 bp, Homo sapiens
attgaatagcaactccccattctcttaattatctaggatcatattttcaggaacgtcatcgcatgtgtgtgtgtgtgtgtgtgtgtgtatatatatatagtgtgtgcaaatttatttcactcatgatgttatactaaagtatggatttctatatacaaccttgattattccacacttaggaataaaagtttgactaagtgt

SEQ ID NO: 46379 - DNA, 201 bp, Homo sapiens
ctattgaatagcaactccccattctcttaattatctaggatcatattttcaggaacgtcatcgcatgtgtgtgtgtgtgtgtgtgtgtgtatatatatatrgtgtgtgcaaatttatttcactcatgatgttatactaaagtatggatttctatatacaaccttgattattccacacttaggaataaaagtttgactaagt

SEQ ID NO: 46380 - DNA, 201 bp, Homo sapiens
ctcatcatcttaaggccccacctcttactgctgccacattggggattaaatttcaacttgagttttggaggagacaaatattcaaatcatagcagtcttgycctaaattaaaaataataataattaaaacagaaaaactggcagctccaaggttttgaaagtattctcctgtattttgttttaggagtggaatggtcttag

SEQ ID NO: 46381 - DNA, 201 bp, Homo sapiens
cctattgaatagcaactccccattctcttaattatctaggatcatattttcaggaacgtcatcgcatgtgtgtgtgtgtgtgtgtgtgtgtatatatataragtgtgtgcaaatttatttcactcatgatgttatactaaagtatggatttctatatacaaccttgattattccacacttaggaataaaagtttgactaag

SEQ ID NO: 46382 - DNA, 201 bp, Homo sapiens
aacccgggaggtggaggttggggtgagccgaaatcacaccatcgcactccagcctgggcaacaagagtgaaactctgtctcaaaaataaataaataaaaargaaagaaaaagaaaaactgtggatgcttgaagtgatcaatgtgtgagaagaaagttctggtgtacagggagtcatagcaattccagaccattacaaaatt

SEQ ID NO: 46383 - DNA, 201 bp, Homo sapiens
cattaattttgtatcctgagactttgctgaagtttttttattagcttaagtttttgagctgagactgtgggattttctagatataggatcatgtcatctgmaaacaggaataacttaactttccctcttcctgtttacatgccctttatttatttctcttccctgattgctctggccaggacttccaatactatgttaggt

SEQ ID NO: 46384 - DNA, 201 bp, Homo sapiens
cagaaaaccaccaaaccacaaaaataataaaagaagaaaggaactaaggctatacagagcaattacaaaacaactaacaaaatgacaagaataaatcctcrtcttatcaataacaaccttaaatgtaaaccgtttaaattccctaattgaaatatataaactggctgaattaaaaaactgagacccaactatttgctgctt

SEQ ID NO: 46385 - DNA, 201 bp, Homo sapiens
gaaaaatgctgaagaacaaatatatatatatatatatatatatatatatatatatatatacacacatctcaagaaggattagctaaattcagaaaaagcawaatttagcaattttaatacattcacctatttcaccatatacagtgggagaagaaactttaaaaaattaactcacaatggtgaattggatgttgttacaag

SEQ ID NO: 46386 - DNA, 201 bp, Homo sapiens
tgcaaacaaaaagtgtgcaaaagtagcaaacttatatcagacaaaatagacttttattaaaaataaaaagataaaaagacacagaggtcattatatagtgrttaaaaaatcaattcagcaagaggaaagaacaattgttaatatatatccaccgaacaccagagcactcagatatatagggcaaatattattatagttaaa

SEQ ID NO: 46387 - DNA, 201 bp, Homo sapiens
ataagtcactgcaatttaaaattctttgttattgcagtataatctactctgacagaaacaaagtgtaacatggaaggaattactccatgggacatatcaartctgataaaaataaagtaattaagaccatgactatggtttggctgtgtccccacccaaaatctcatgttgaattgtaatccccatgatccccataatttc

SEQ ID NO: 46388 - DNA, 201 bp, Homo sapiens
aacaaaaagtgtgcaaaagtagcaaacttatatcagacaaaatagacttttattaaaaataaaaagataaaaagacacagaggtcattatatagtgattaraaaatcaattcagcaagaggaaagaacaattgttaatatatatccaccgaacaccagagcactcagatatatagggcaaatattattatagttaaagaga

SEQ ID NO: 46389 - DNA, 201 bp, Homo sapiens
ttcagagaacttatagaaaattgatatgctagaaataatgatggatattgtttttccccattttgtagcatatgtgccttttcccaatatgcacacataawaagcacgttgttcaattcaacaaaaaatagagaatgtatgttctttcagatgcttagttctgaattgagcaagtcatgaaagcaatgcttaataagcacc

SEQ ID NO: 46390 - DNA, 201 bp, Homo sapiens
atcaagaccgagaatataatgaagtttttggaataatgaattcataaactaatatccatttagctttgcaaataggctaggacataaagctgtagattccmaaatgataaaagtacaaaaaagtcatgataaaacaatagcaatggtgtagctgtgaactcttgatacctgtgttgcaacaccttctgcaataaccataca

SEQ ID NO: 46391 - DNA, 201 bp, Homo sapiens
caggtcattgttcagaggtgcccatactttatgtaagtgagaatgccataccaactccttaatgacttgaacttctggcaaagatgctgttctattttggmatatggatacctgaaaactagttagaaaaatacatttttattgccccccccccttacgtctctttcacccaatttttagatgggctaagttgtctccatt

SEQ ID NO: 46392 - DNA, 201 bp, Homo sapiens
tttttacagttatggaggctaagtccaaggtcaaaggtccacatctggtaagggtcttcttgcagatgagggctttctgcagagttctgaagtggcacagkgaatcacatggcaggggggctgagcatactcatcatcttaaggccccacctcttactgctgccacattggggattaaatttcaacttgagttttggagga

SEQ ID NO: 46393 - DNA, 201 bp, Homo sapiens
tctctcctggatcaggaaaagacctggaaagggaagagaattctctacagaatgttgattttccccacaagaggcagctttacagggctgtttaaagatayatcgaagaaatatatttcagggtaaaatacttcaatttcttacagggcctggtatatgtcattttgtgatgtatctgattgccacaaagagtctgtttgg

SEQ ID NO: 46394 - DNA, 201 bp, Homo sapiens
ctgacaataaatgaaatcatattctgaaagaacgtcatcattcgttgaaatattttcatttctggtaaatacattgtcttgacttaaaaagtgttttttttggtagcggatgactcctagaatagtacctggcatgtgttaggtgctcaataactatttactgatggaatgaacacaggctctagtgtaaacagatgagac

SEQ ID NO: 46395 - DNA, 201 bp, Homo sapiens
gccagtggcaaaggcagccatgtttatgtccttcccttccgggtggaaagttctgcgcaggcccagatggagatgctgtctggaagccagggattgaagtmaaaaacgttagaaatctacctgatgttctattctactgtggctaagctggcactcaaaccacaagacaaagtccttcccattcttccctacctctttcca

SEQ ID NO: 46396 - DNA, 201 bp, Homo sapiens
tttaagtgtgactttagtcatcaagtacatacaagaaaaaaagcataaaggaatgaaaattaagagggtaaaacttctgcaggctatatttactatttacyctaataatattaaaaggaatcatgaacgcattgagaagtattttgaagatcaagtttatgtagcagtttattttttaatctatcctcatggctttgttgt

SEQ ID NO: 46397 - DNA, 201 bp, Homo sapiens
tctgctttaacggggaccctaagcccagttacactagggttattgcagcctcataaatgtgccgcctttgttgtcttggataagatccagaagaattctcygaattaccaggcagattgtttttctcttttcttactttctctcaaatgttgtttctctctgagctgagccacttggagctggaagtgggatgacacaggg

SEQ ID NO: 46398 - DNA, 201 bp, Homo sapiens
ggaaataaaaattaaatcaataataaaattgcatctcacagccattagatgataaaaattaaagcatgacaatacatatgtctgggaggtagagaaactgraactttcattcactgctggctggaatgtaaattgatattagttctttggagagcaatttggcaacatctgataaggctgaggaagtccatatcctaattg

SEQ ID NO: 46399 - DNA, 201 bp, Homo sapiens
tacttttcaatatcagcagttactgtcttgttattttattgaatccacttgttatttatgatttagaagattattggactcctcattaaggagtgaggcarcattcaatattattaatatgtcaaagagctttgagatatcaaaattgtctatttaaatgtctccaaggactcttgggctactagaaaactgaccataata

SEQ ID NO: 46400 - DNA, 201 bp, Homo sapiens
atcttgataaatcacttaatgtttcagagagactcgatttcctcacttacaaaattgggataataataattcctcatagggctgctatgaagtttaaatgtttcttgtgtttggtaacacattccaagatcaatagttacacaatataatcttattcagatggcagtgattgaaaaagcctttgacagttatttctatcag

SEQ ID NO: 46401 - DNA, 201 bp, Homo sapiens
gatgcttcagtgaaaaccctgctcaaatgagactttggtcttgcaaattagggtggcagtatggcaaccctgtcaacctctcttccaggtatgcctcaggmactactgcccactctggaaaatatttaaaccagcagagtggctgcttaatggagctgagcagcagcctgcatttcttggcacatttgacaagcaagttca

SEQ ID NO: 46402 - DNA, 201 bp, Homo sapiens
tgtataagtttcttatacatactagataatagacctttggctgggtgcgatggctgacaactgtaatcccagcactttgggaggctgaggagggcagattrcttgaggtcaggagttcaagatcagcctggccaaatggtgaaacttcatctctactaaaaatacaaaaaaaatttagcctggcatggtggcacatacctg

SEQ ID NO: 46403 - DNA, 201 bp, Homo sapiens
ttctttgattacctaattttggagagagctttatgggacaactgtccaggccaacaaactcattaaaaggacctaggccatttgttgaaagtcttgatacycagttctgcttcaattcagtatgtttcaaaaaaaatttttataccactgcttactctgcctatttcagaagcagctctaaccttcattccccctctgccc

SEQ ID NO: 46404 - DNA, 201 bp, Homo sapiens
ttgtataagtttcttatacatactagataatagacctttggctgggtgcgatggctgacaactgtaatcccagcactttgggaggctgaggagggcagatygcttgaggtcaggagttcaagatcagcctggccaaatggtgaaacttcatctctactaaaaatacaaaaaaaatttagcctggcatggtggcacatacct

SEQ ID NO: 46405 - DNA, 201 bp, Homo sapiens
cttgatactcagttctgcttcaattcagtatgtttcaaaaaaaatttttataccactgcttactctgcctatttcagaagcagctctaaccttcattcccyctctgccctaagtgtctcaggcttgccccaagttctcctaattttggatgattaatggattcattgattcattgattcatggatacacacacgtgcacac

SEQ ID NO: 46406 - DNA, 201 bp, Homo sapiens
tattatgtatttaagtgaatgtgtgttctctaattgtagggtccatggttttacatatagccattggaacaaacttcttagttgcgttatttgtatctccyacaatccactaatgccttctgctgcctgatgtatcagttataagaaaagtgcattgaaatctcccattattgttgatctgtgacaattgctctttctaat

SEQ ID NO: 46407 - DNA, 201 bp, Homo sapiens
ctttttggttttaggtaaatttccatgagtacctagcattctagaagtgaactcacagcccagattttatgattttattattagtttatttaatttttttytctttttttttcttttttttttttttagacagagtctcactctgtcgtcaggctggagtgcagtggctccatctcggctcactgcaacctccgagtccct

SEQ ID NO: 46408 - DNA, 201 bp, Homo sapiens
aagaacaattgttaatatatatccaccgaacaccagagcactcagatatatagggcaaatattattatagttaaagagagagatagagacaccaatgtaayaatagttgagaactttaacacctcaccctcctcaccctcagcattgcacagctaatctatacagaaagtcaacaaagaaacattgtacttaagcttcatt

SEQ ID NO: 46409 - DNA, 201 bp, Homo sapiens
aactgttattactaacattattggcaggccagtgttaaaatttaaaccagtatgagaaagataaatctctttaaggagcacttttgttcaacctgtcccartaatagactatatagttaaccaaaataactgaagaattatcttaagagctagggtgcatgactatcagatattaaaagtaaaaaaaatctgataatttca

SEQ ID NO: 46410 - DNA, 201 bp, Homo sapiens
aatagttactatctgacctttttaaaaaaacttttaagttcaggggtacatgtgcgggtttgttacatagggtaagctcatgtcacggggcctgaagcattgctccaggaacatagcccccccatgggtatttttacacaaaaactggaggctattcaaaagatacacatgaagtctattcctggagattattttgtcacc

SEQ ID NO: 46411 - DNA, 201 bp, Homo sapiens
caccaatgtaataatagttgagaactttaacacctcaccctcctcaccctcagcattgcacagctaatctatacagaaagtcaacaaagaaacattgtacytaagcttcattttataccaaatgaacctaatagacatttacagaacattttttccaatggctacaaaatgtacattcttctcatcagcagatggaacatt

SEQ ID NO: 46412 - DNA, 201 bp, Homo sapiens
tattagaacggatcaaggttacaggcaataatgatggtttccactgaaaaaaaaagccacaaatatcttgtgtttcaaaatttctgtgatcagcattttttgagggaagaagcattatgggaagaaaaagctaacagagatgaagtatcagacaccatgccatggggctgtccttacatgtgtcatcattttaacagggaa

SEQ ID NO: 46413 - DNA, 201 bp, Homo sapiens
catataaaacctatggcctatgtgatcacaggcacaatgaacaggtgaagaaagaaataattttgaattaggaaatacaatgaaggaaatgaactaggaaytgagatagagaatgtctgcttgggggaagtgatttagataaagtgtatttagatcaggtgttttctcccttcaattatgcctcttccacattgatgagga

SEQ ID NO: 46414 - DNA, 201 bp, Homo sapiens
ccctgagtcatctgtgattacattttcatgttacagtatattgttcagggatcattgtggagactgaagagaaatgtacacatggctttatgtaggtcatrgtgaaagacagagagaaagtgtgtattcagaaatgattgaataggcttccccaaagtaatccattattgctttattggtaattatgttttgaattactgc

SEQ ID NO: 46415 - DNA, 201 bp, Homo sapiens
gatcccttatctttgatctccccctcacaaaccatcgtcacgatgtatattgccaacctgactaaaggttattgacaatatagagcaattcaaatcatgtmggataatgtgaaatttaagatcatgcaaacaacaaaaaaatgggtgtaaaaatccctattctcataaatcctatggtcactctcatgctaaagatttctc

SEQ ID NO: 46416 - DNA, 201 bp, Homo sapiens
aggagattcacattgtactgcatatacttggttctgttattatttttcttaccatgtgtcaactagtcaaaaacattttcattcaactcaaaaataaataygcccactcaattcatgaaaattgcttttgcgtttgattttgaattgtttgaatacttcagacgtgattatttcaattatgtaagctaagctgcatttcaa

SEQ ID NO: 46417 - DNA, 201 bp, Homo sapiens
cttggcttccaatctagagtttcttctataattttgggcaagttatttcatctctttgtgcctccattgtcttgtcagcacattggagatactgataagakctttctcaggggatgaaaaacaatacaaatcaagtaattagaaacatgcccggcacattgcaggtcctcagtaatgttatttttataactcctacactat

SEQ ID NO: 46418 - DNA, 201 bp, Homo sapiens
catgaaaagacctcagtgtatttcacggagagctttgccagctgcctctgtcaaagctgggacttcatccaatcgttggatattacatttacccacccgcyttagccacaacctgtgtttatctgtgggcacctcctactggcctgaagcctgaactactcaacccgttgaataaaatgctggaagaaaaacttttaaagg

SEQ ID NO: 46419 - DNA, 201 bp, Homo sapiens
cctttcttcttccaagctcagcaaatctaaaaacttcaacacaattaagtaagttatcctacaaactctatagtataattgacctcaatatcatttttttyctcaataaattatggaatatatgaaatgcctcccaaaagaaaatattatctttcattagaatatagagtctagaagataatcaccgtcttccatatgttc

SEQ ID NO: 46420 - DNA, 201 bp, Homo sapiens
ctaaagcaaatcacagagatttattggtttgttcttcatgaaatttcagtcttcatacaggtattttttcagggattcaaatgatattgaccttatttggkttctctctctcagctctgctttttactatattggtttaatactcaaaatatttattgtattttcctgttgcttcaagaacattctttccatttacctcat

SEQ ID NO: 46421 - DNA, 201 bp, Homo sapiens
acagcacgtgaatggactttgaaatagcattgcatgtctgagaattctgtctctttaaattgtctgctttgcttattggaaatgataacaatgattgtttgaagttattattaatttttttagttttaacaaatcctaataaaggaaaacatatctattaaaaactgaaataactactcactgaaataaacagcaaacatt

SEQ ID NO: 46422 - DNA, 201 bp, Homo sapiens
cagtagtgcaatcacagctcactgcagcctcaacctgcaagactcaattgatcctcctacctcagcctcccaaggagctgggctgacaggtgtgtcattakgctcagctagttttcatatttttttgtagagatggggtttcgccatgttgcccaggctgctgaagagtattcttggagcaatagggaattactacatata

SEQ ID NO: 46423 - DNA, 201 bp, Homo sapiens
cacagcacgtgaatggactttgaaatagcattgcatgtctgagaattctgtctctttaaattgtctgctttgcttattggaaatgataacaatgattgtttgaagttattattaatttttttagttttaacaaatcctaataaaggaaaacatatctattaaaaactgaaataactactcactgaaataaacagcaaacat

SEQ ID NO: 46424 - DNA, 201 bp, Homo sapiens
gcacagcacgtgaatggactttgaaatagcattgcatgtctgagaattctgtctctttaaattgtctgctttgcttattggaaatgataacaatgattgtttgaagttattattaatttttttagttttaacaaatcctaataaaggaaaacatatctattaaaaactgaaataactactcactgaaataaacagcaaaca

SEQ ID NO: 46425 - DNA, 201 bp, Homo sapiens
atatagaaaaaacaaatactgaggatgccatttgagtccctggagcaggatccgcatgctgactgaatttgtgtggaagacaagccaatcaattcctgtaytggtgtaagctagtttgagttggttcttgtcataacataaactgtgcatatggaaataaagatacaaaaattatgagtgttatataagtagatcaaatga

SEQ ID NO: 46426 - DNA, 201 bp, Homo sapiens
gacttctgacttctgaccaagaaagccttaaatttctccttgtcttgatgggattccttctgagtacaggcccctggcctcccttttcttaaagcatctaytttagagaacttcccattgtaaattctttctctgtccctttgtgatgtacatcttgtcccagtttcttgccaatttaacaaaatataatatctttcttaa

SEQ ID NO: 46427 - DNA, 201 bp, Homo sapiens
tgcacagcacgtgaatggactttgaaatagcattgcatgtctgagaattctgtctctttaaattgtctgctttgcttattggaaatgataacaatgattgtttgaagttattattaatttttttagttttaacaaatcctaataaaggaaaacatatctattaaaaactgaaataactactcactgaaataaacagcaaac

SEQ ID NO: 46428 - DNA, 201 bp, Homo sapiens
agaaaaaacaaatactgaggatgccatttgagtccctggagcaggatccgcatgctgactgaatttgtgtggaagacaagccaatcaattcctgtactggygtaagctagtttgagttggttcttgtcataacataaactgtgcatatggaaataaagatacaaaaattatgagtgttatataagtagatcaaatgatttt

SEQ ID NO: 46429 - DNA, 201 bp, Homo sapiens
ctttcagaaggcgcttattgccctagatctcaggttcattggttgacttctgacttctgaccaagaaagccttaaatttctccttgtcttgatgggattcyttctgagtacaggcccctggcctcccttttcttaaagcatctactttagagaacttcccattgtaaattctttctctgtccctttgtgatgtacatcttg

SEQ ID NO: 46430 - DNA, 201 bp, Homo sapiens
tattacttgaagtttttatataggacatatatcatctcaatgaaagaatagtcattcttttaaaaaattacagccttaccaccatctcttctttagaattwttttccattagctactaaagaaagtctttggcaaatacattataaattttggaattgaagtacaaaataaaagagatcataggaacagtatcttctccaa

SEQ ID NO: 46431 - DNA, 201 bp, Homo sapiens
acttgccagtgtcaggtggcatctacccaaggcaagcaaacacttacatcatatctctttcagaaggcgcttattgccctagatctcaggttcattggttkacttctgacttctgaccaagaaagccttaaatttctccttgtcttgatgggattccttctgagtacaggcccctggcctcccttttcttaaagcatctac

SEQ ID NO: 46432 - DNA, 201 bp, Homo sapiens
ggtcaggagtttgagaccagccttgccaacatggtgaaaccccatctcaacttaaaaaatacaaaaattagctgggcgtggtggcacacccctgtagtccyggctacttgggaggctgaggcaggagaatcgcttgaaccctggaggcggaggttgcagtgagccgagattgggccactatattccagcctgggtgacaga

SEQ ID NO: 46433 - DNA, 201 bp, Homo sapiens
tgatttgcggggcacccatttttcattgtatttgatgtccttgtccacaaggcggaatggcaagaggcttagaaatctaaccatgtaccggttatgttgtrtttgctttgagcctatatcctcattgaaaacagctgctgaactcagagttattatgaagactcctggagagaaagcagaatggaataaatgggaagagca

SEQ ID NO: 46434 - DNA, 201 bp, Homo sapiens
ccgccacccgggttcaagctattctcctgcctcagcctcctgagtagctgggattataggcgtgcaccaccacgcccggctaatttttttgtatttttagyagagacagggtttcactgtgttagtcaggatggtctcgatctcctgacctcatgatctgcccgcctcggcctcccaaaatgctgggattaaaggcatgag

SEQ ID NO: 46435 - DNA, 201 bp, Homo sapiens
tttacaggcgtgagtcaccccacccggcctcttgtggtttcttttaaaattcattaatattggttataaataacttttgagcaagttaaaatatttaaagsaacatcaatgacatgccaaagaatgtttagtaggctctgaaggtccttccaaataaataatttaccaatatctgagcattaacaagatcaatgaaccaat

SEQ ID NO: 46436 - DNA, 201 bp, Homo sapiens
cgatagtttactgagaatgatgatttccaatttcatccatgtccctacaaaggacatgaactcatcattttttatggctgcatagtattccatggtgtattatgtgccacattttcttaatccagtctatcattgttggacatttgggttggttccaagtctttgctattgtgaatagtgccgcaataatcatacgtgtgc

SEQ ID NO: 46437 - DNA, 201 bp, Homo sapiens
cttgaacccaggaagcagaggttgcagtgagccgagatcacaccactgcactccagcctgggtgacagagcgagactgtgtatcaaaaaaaaaaaaaaaaagtcatgaaagaaaaaaaaggcaagtcattatcattgacagaaatataggtatttaatattttctgagtcattaaagtaatccaggaataccaattttaga

SEQ ID NO: 46438 - DNA, 201 bp, Homo sapiens
acaggtccttcttttttgagcaattacttactttttgccaccataggatgattcatactcaactaatttgtcaactcttctagctgaattctacttgccartgtcaggtggcatctacccaaggcaagcaaacacttacatcatatctctttcagaaggcgcttattgccctagatctcaggttcattggttgacttctga

SEQ ID NO: 46439 - DNA, 201 bp, Homo sapiens
gcatttagccatcctttataagaattttgtcattgagaacatgtgttataaattatacataacagatatgacagcagtttaaaacacaatttgattataasttggggcctgacagtatttttagtcaattaaggaattagactacatagcaattgttgactacactgctcatgttcatacagagaaagaatattaccattt

SEQ ID NO: 46440 - DNA, 201 bp, Homo sapiens
tattacagatggggtcttgctatgttggccagtctggtcttgaactcctggcttcaagcagtccccctgccttagcccctgaaagtattggaattacagcsatgagccaccaggcctggacatcctgtttctttttaacaggtccttcttttttgagcaattacttactttttgccaccataggatgattcatactcaact

SEQ ID NO: 46441 - DNA, 201 bp, Homo sapiens
atggggcaggtttttcccatgatgttctcatgatggtgaataagtctcacaggatctgatggttttataacagggcagttcctctgcacacactctcttgyctgccaccatgtaagacatgactttgttccttcttgccttgattgccatgtaagacatgattgtgaggcctccctagccctgtgaaactgtgagtcaatt

SEQ ID NO: 46442 - DNA, 201 bp, Homo sapiens
tttaaaaatttaaatctaaataacacttaacatcacatattatctctttgtaattaaagagaattgtctttagtgttttgtttttttaaatagttaaacamggaaacatgccactaagcaaataaattcatagtcttagagcagagcaaggtaatctctaaaataattaaggcagaattattacacacactagaggttttt

SEQ ID NO: 46443 - DNA, 201 bp, Homo sapiens
ttccactgattctgaggtacccgtcgaatttcagtgctttaagatgcatactgacataaaacctatgatgatgctttcactgcaagatttatttttaattrgctctgaaaacatggatttaaactccttgctattcatttgaaactgacctgtattcttatatgttggagaaaagttaaggagtgttgagcgtctaaaatt

SEQ ID NO: 46444 - DNA, 201 bp, Homo sapiens
ctgccttggcctcccaaagtgctaggattacctaaagtttattttttaggaagtacagacttcaataatttataatggccacagttattagtagtttagcmgtggtaatttactatcaataacagcttataatagatgtgcatttattggtgaattggctaaaattccttactttaccactcagtaaagtaaggaatgaac

SEQ ID NO: 46445 - DNA, 201 bp, Homo sapiens
ctcagatgattttagtttagcacgtgtattctcaagcttggtattattgaatctcagctagataattctctattgtggagggctaccctgtgcattatagkatatgtagcagtatccttggactccactttctagatgccagtagcaccacacttcccctgtggtgacaagccagataaccccaatatccctgacaaaatt

SEQ ID NO: 46446 - DNA, 201 bp, Homo sapiens
ggtgaatattagattgggctatgcggagctatcagtattcataaaatacagtgagcacttctaactggtgacctcaataagggcttcttgaaataagtgayttctgaacggggccttccaagagttcctagtatagacataggtgggcatatttcaggcagtaagaaggccagaagaaatagcattgccaagagatatgtc

SEQ ID NO: 46447 - DNA, 201 bp, Homo sapiens
ttaggagccatgtctcacacctccagcccctgaaataaactttaccattgaccaaaatcccatcttttttgtatacatcaggtcattgtgtaggttcaatygcaaagcattgatgccttttcttgtctatcctacctttgcaattttgctgggggttttgtctgattattgtggccttttggggtatcctacatccccctg

SEQ ID NO: 46448 - DNA, 201 bp, Homo sapiens
gctcttaagactttggaaacaaacagtcgcgtcataatgtaaaaaagacttaaatgaggtgattttatttttaaaaagcttataataattgagtggtgtaycctcaagactgactagggtgatttcaaatgtaagtttagtaccagtttctttctagtgatggtgtggtatctatgtggggagagagtgcgtgggtgcagc

SEQ ID NO: 46449 - DNA, 201 bp, Homo sapiens
aattcttatacaacaagatttctttattttcttttaatttttacctttaattcttattattgtgcattgtataacccccagatgaaaagattaattggttyggggaaagctcaagaaatactagtcttgacagagtctgaggtcattccaaagctctcccaacacagaaaatgagacagaccctcttagattttacacatt

SEQ ID NO: 46450 - DNA, 201 bp, Homo sapiens
ctttaaattgaaaccccattaactatgttataattctacattctaatatgaaatggataatagaggtagttatgtggataaccgagtccagactgccttttctgggattagccctgtgaatatttaagcttagctattgtatttcataaggcagtctgaaatttgttgtatttctttttcacttttattttatgtaatgat

SEQ ID NO: 46451 - DNA, 201 bp, Homo sapiens
atcagtcttagaggaataggaaaagaggaaatttttaaagaaacccctgaggttcctcttccaaatattggcaaacattcaatcttatttagaatgttgcrttgcctagcaaaatgaaggatatagtacatcgtatccttattaaatcttgtagcagctaatatggtaaaagtccttttgctacaagagcctaaggtgatt

SEQ ID NO: 46452 - DNA, 201 bp, Homo sapiens
ggtattttgatatttttcccattagtaacttgcagtatattagtgagctgtgcaatatttcctgtattcctattttgcatatattattgcttttgtacctsacagtgaatgaaaatcatcattctttatgttaggtctgagaacagtaagaggtttccttggtgttgatcatcatgtaaggaatttatctatgtactggct

SEQ ID NO: 46453 - DNA, 201 bp, Homo sapiens
ttttaaagaaacccctgaggttcctcttccaaatattggcaaacattcaatcttatttagaatgttgcattgcctagcaaaatgaaggatatagtacatcrtatccttattaaatcttgtagcagctaatatggtaaaagtccttttgctacaagagcctaaggtgattgaagagggaggtagtaaccaaccactttattt

SEQ ID NO: 46454 - DNA, 201 bp, Homo sapiens
aatcacttgaacccctgaggcagaggttgcagtgagccgagatggtgccactgcactccagcctgggagagagagtgagactccatctcaaaaaaaaaaaaattgtaggatagactacaatgtgtataacttcactcctcttgtataaagatgtgtgggccgagtgcagtggctcacgcctgtaatcccaacactttggga

SEQ ID NO: 46455 - DNA, 201 bp, Homo sapiens
aattttgagctgccaaacttaggaccaagtgagttgaagcagttgttgaatggtgactccagcacattgatggcagaatgagtcagggtaatatgcagtcrctccccaaagtcctattctagaggaccagaaacaatttctctcttacataatgaacaaatggctaattcttctagaaagcactcttatgacatatttcaa

SEQ ID NO: 46456 - DNA, 201 bp, Homo sapiens
ttgtgaagcccatttcgttctaggcctaagaagggacagcctagtgaagcccatggaatagacagtaaggcattggccgcttagtgcttttaatgagagaragagagagagagagagagagagagagagagagagtgatgagtgggtgtgaagattcttctgtgttatcccaccttgatcatctgtactgagtaggaagag

SEQ ID NO: 46457 - DNA, 201 bp, Homo sapiens
tgtttcttcctgatgttctggggtaaatttttatatctccacattgttgacaaatttatattattggggtacagcctttttatttataaagttttttttttaataaccaggaggcactgactgatcttgaagtacctcctgaattatcattgccttcttacgtgaatatgtggaattataaaggagcgatggatactaagc

SEQ ID NO: 46458 - DNA, 201 bp, Homo sapiens
actaaggaaggttcccatgactctttgaggttattttgacaggtcacttctggatgcctttttcttcattcacacagctttagtttgttctaccagtcaasataggctagtctatgctgcactgtcaaaaacaatttaaaaaaactagttaaagtcatagcttaaaacaaaaatgtatttctttttcatgtcatatatgta

SEQ ID NO: 46459 - DNA, 201 bp, Homo sapiens
ccttataggagcttatatgctataagttacaataaagaatatgggcttttgatcacactgagtaaggtttagtacttgagtgactttaaacaatttactcygtgggttttaacgttcttatctataaaatggggatacaaatatcatccacctgcctcaaactttgttatatgatcctaagagataatgtatatatatata

SEQ ID NO: 46460 - DNA, 201 bp, Homo sapiens
gaatacgagcaaatcatttttggtgggggagggttagtaactttttgcttagtgtatggtttattgctcaataaatattaaacatgcagtattaaattaaagtggttactgaattattccatttgtcataaaatgattctaatacgaacagacaaatatataaatatacacacatacttaaaaattgtttcacttctgtgg

SEQ ID NO: 46461 - DNA, 201 bp, Homo sapiens
gagtggtgtgataaggaaatggagcttaaaactgtggctggaacaaagactaaaatgagtaagattattacagcagaatgaactgtaggtaaggaccaacstggggacggttttagactatgaattactgaaaagaaatatggtgtttgtttttagtcaactaggattttatcaaaggttatcagcaagtggggggcatga

SEQ ID NO: 46462 - DNA, 201 bp, Homo sapiens
tttgatcttgactgctaactaatgatttctccataaattctagttcaaattttcaagattgattaacacaacacaactttttatgtcaaacctcataaccatcaccagccagccaacagattaactcttcttgaattgggtacctgcctatgacctaaatagtgttgaagtgggagaaaataataccaaacctgccctcct

SEQ ID NO: 46463 - DNA, 201 bp, Homo sapiens
gccataacaactttatttattatagcaaatgaaataaacaaaccaaatgccagtcacaaagataatgaattaacaaattgcagtatatgtataaaatgtartacttctcagcaataaataaaataaactactggtacatgcagcaacatacgtgaagcttacacatgtaatgccatgtgaaacatcacacaaaaaattaca

SEQ ID NO: 46464 - DNA, 201 bp, Homo sapiens
aaaagaaaaagaaaacaaaacatacgttgtcaagctaaaaggctgtatctgatactttgtttaaccatcatagaaatatttgggcaatgtaaataatatayatatcattgtcttttttactctcatcaacactgccttcttttcaaagttgcccttaatatatattaaaacttgacatatgtctcaaagaagtgactctgt

SEQ ID NO: 46465 - DNA, 201 bp, Homo sapiens
tcttaacattttaatccttgaaaattgtactaagttatttcaatactttttaaaattaagtttagtaaactacatcattaattattttgcctgattacatwccatgtattaggataaaactggttcaatataactaaaagggaattttagtatccctcttttaatatctaaataagtatagtttattcagttcaataagat

SEQ ID NO: 46466 - DNA, 201 bp, Homo sapiens
taaggcctgaaattcttgaattaacttagagtgctcctggctaaatgaacgcaactgggatggaatttgcaaaagatccaatattggaaatgtgcatgaaytcgaatttttcccaaatcttcatttgccaccttatggacaaggaaaacattttggaggttttctgaggactctgtactagtggcttatgtaactcctgtg

SEQ ID NO: 46467 - DNA, 201 bp, Homo sapiens
tgcacatgaaccccctgaatctgaaacaatataaataaataaataaaaattacagagagtatcaagaaatagagaactcttaagagaacaattactgatgytggtgaaattgggatcttgttcagaggttacagaatggctatgattaggatctgttagagaatcttctagaaagctttgtggcaggttcatggagaaact

SEQ ID NO: 46468 - DNA, 201 bp, Homo sapiens
tgcaaagatgtagccatttgttgacattccagttgggctttgatgaatgagtcaagagttggatagttggaattatggctcagcacatttgcaaggatacrgaggtcaagacaggagaaagaactacaattaggtgaagggtacctggacgccagtgtacaggtggaggaggagtagaaacataagcagagttaaaatttt

SEQ ID NO: 46469 - DNA, 201 bp, Homo sapiens
aaagtataggctgcaaaagagttcagaactggttctgaatttggctgtgtaaaatagacaagatactttgaagtcgccggggtgttgaccaaaaggccgcytttgtttgataaatctacactccaaagttcagaacagcttatcctacctggcatttccattgattagaatggatgtgtttaaggtatccctctctttgat

SEQ ID NO: 46470 - DNA, 201 bp, Homo sapiens
cttaatgatttatacaattataaaaatagtgtcatgtatctaaagactttttattttattgtgcttataggacttcaaatagctaaacatattttgtttarattgggtaaataaatcaaatctcagtttggcaatactgccaaattttagtccaatatgaaactgagttgccagatataaacttagaaattcataactgaa

SEQ ID NO: 46471 - DNA, 201 bp, Homo sapiens
acattgatggcagaatgagtcagggtaatatgcagtcgctccccaaagtcctattctagaggaccagaaacaatttctctcttacataatgaacaaatggstaattcttctagaaagcactcttatgacatatttcaaacatcacatcacatccgatacatcagtcaataaatatgcatccaaatgcttttctccagccat

SEQ ID NO: 46472 - DNA, 201 bp, Homo sapiens
ccatttattaaataaggaatcctttcctcatttcttgtttttgtcaggtttgtcaaagatcagatagttgtagatgtgtggtattatttctgagggctctrttctgttccattggtctgtatatctgttttggtaccagtatcatgctgttttggttactgtagccttggagtatagtctgaagtcaggtagcaagatgcc

SEQ ID NO: 46473 - DNA, 201 bp, Homo sapiens
tggcacaaactgtttcatcagtgaaattccacaaagtttatgtagacactggagatcacctctgtgccatatacacagcttatgcaacatttaaggctacrtatgatctcagtccccaagagttgtatttgccaagagtagagataagaaaaaattccttcaatgctctcctgtctacctttttagcttcctctctcatca

SEQ ID NO: 46474 - DNA, 201 bp, Homo sapiens
cttatgcaacatttaaggctacgtatgatctcagtccccaagagttgtatttgccaagagtagagataagaaaaaattccttcaatgctctcctgtctacstttttagcttcctctctcatcattctctctgccttattattatcattgttgccatgctaaattgcttatatttctttgcataccaagctcattcttacct

SEQ ID NO: 46475 - DNA, 201 bp, Homo sapiens
tgatgtctgtaatcccagcaccttgggaggctgaggcaggaggatcacgaggtcaggagattgagaccatcctggctaacacagtgaaaccccatctctastaaaacaaacaaacaaacaaaaaaacaaaaaacaaaaaaaaaacattagtcgggcatggtggcatgtgcttgtagtcccagctactcaggaggctaggct

SEQ ID NO: 46476 - DNA, 201 bp, Homo sapiens
tgaatacgagcaaatcatttttggtgggggagggttagtaactttttgcttagtgtatggtttattgctcaataaatattaaacatgcagtattaaattaaagtggttactgaattattccatttgtcataaaatgattctaatacgaacagacaaatatataaatatacacacatacttaaaaattgtttcacttctgtg

SEQ ID NO: 46477 - DNA, 201 bp, Homo sapiens
gtgaatacgagcaaatcatttttggtgggggagggttagtaactttttgcttagtgtatggtttattgctcaataaatattaaacatgcagtattaaattaaagtggttactgaattattccatttgtcataaaatgattctaatacgaacagacaaatatataaatatacacacatacttaaaaattgtttcacttctgt

SEQ ID NO: 46478 - DNA, 201 bp, Homo sapiens
gtggcatgtgcttgtagtcccagctactcaggaggctaggctaaggcaggacaatcgcttgaacccgggaggtggaggttgcagtgagccgagatcaagcyactgcactccagcctggtgacagagaatccgtgtcaaaaaaaagatactgctcaccattaatatggtgaatgcttttcttatgaggaccttcaggagaaa

SEQ ID NO: 46479 - DNA, 201 bp, Homo sapiens
aggtaccttctctgttctgtgtttcagaaacctgaatttgctaaacagcagctgtcataggcatagcaaagaaaaaaatacttaaaatatattgaggtttytaggtgtagaataagcacaaactaatggctgaccagatttaagagatggaaaagaggaacaaggcattcttcattgagatagttaatacaaagagaaaaa

SEQ ID NO: 46480 - DNA, 201 bp, Homo sapiens
agtgaatacgagcaaatcatttttggtgggggagggttagtaactttttgcttagtgtatggtttattgctcaataaatattaaacatgcagtattaaattaaagtggttactgaattattccatttgtcataaaatgattctaatacgaacagacaaatatataaatatacacacatacttaaaaattgtttcacttctg

SEQ ID NO: 46481 - DNA, 201 bp, Homo sapiens
aggttgcagtgagccgagatcaagccactgcactccagcctggtgacagagaatccgtgtcaaaaaaaagatactgctcaccattaatatggtgaatgctyttcttatgaggaccttcaggagaaatttttctcagctcacagtaacataaataattctgttttggagaaattggtttacttttattgtatgagtattaaa

SEQ ID NO: 46482 - DNA, 201 bp, Homo sapiens
aagtgaatacgagcaaatcatttttggtgggggagggttagtaactttttgcttagtgtatggtttattgctcaataaatattaaacatgcagtattaaattaaagtggttactgaattattccatttgtcataaaatgattctaatacgaacagacaaatatataaatatacacacatacttaaaaattgtttcacttct

SEQ ID NO: 46483 - DNA, 201 bp, Homo sapiens
ggagaaatttttctcagctcacagtaacataaataattctgttttggagaaattggtttacttttattgtatgagtattaaatatgtaacttgcgatttcrtcaccctttgcattgctgcttgaaagtgtagtgtcagagtgtgatccagagatcagtaaatggtatcaagtagtttgcatgttgtgtgtaagtcacagtc

SEQ ID NO: 46484 - DNA, 201 bp, Homo sapiens
aaaaactaaattggagtttttattaaaagtacatgtatttaaactagcaagaaatcttaaactagcagatttcttaaagaaaggttaaaaatgttgttttwatttacttcagagattaaagagtaaatcaagttttataagccaattggataagaaatgcatgttaatttagagcatgacttcagaatgtgtacagatgga

SEQ ID NO: 46485 - DNA, 201 bp, Homo sapiens
ttctttcttttttttttgagatggggtcttgctctgttgccaggctggagtgcagtggcgtgacctcagctccctgcaacctccgcctcccgggttcaagygattcccctgcctcagcctcccaagcagctgggaagacaggcacacgccaccatacccagctaattttctgtattttactagagatggggtttcaccatg

SEQ ID NO: 46486 - DNA, 201 bp, Homo sapiens
gctcacagtaacataaataattctgttttggagaaattggtttacttttattgtatgagtattaaatatgtaacttgcgatttcatcaccctttgcattgytgcttgaaagtgtagtgtcagagtgtgatccagagatcagtaaatggtatcaagtagtttgcatgttgtgtgtaagtcacagtccaactttatcttcatt

SEQ ID NO: 46487 - DNA, 201 bp, Homo sapiens
tgagagaagataactgcaaacctacaattctgtaactaatacaaatatatctattgaaaatatcgaaacaaagacattttctgaccaaaaaaaaaaaaaaacccaaaatacaaaaacaaaacaaaaacagagaattaatcagtatgaggcctgcactaaaaggaataccaaagggaattgttgtaagtagaagaatgaccc

SEQ ID NO: 46488 - DNA, 201 bp, Homo sapiens
ttgagagaagataactgcaaacctacaattctgtaactaatacaaatatatctattgaaaatatcgaaacaaagacattttctgaccaaaaaaaaaaaaaaacccaaaatacaaaaacaaaacaaaaacagagaattaatcagtatgaggcctgcactaaaaggaataccaaagggaattgttgtaagtagaagaatgacc

SEQ ID NO: 46489 - DNA, 201 bp, Homo sapiens
cccgggaggcggagcttgcagtgagccgagatcgtgccactgcacttcagcctgggcgacagagcgagactccgtctcaaaaaaaaaaaaaaaaaaaaaaagagttaaagtggcagctgggcacggtggctcatgcctgtaatctcagcactttggggggccaaggcgggcagatcatgaggtcgagagatcaagaccatc

SEQ ID NO: 46490 - DNA, 201 bp, Homo sapiens
tctactaaaaatacagaaaattagccgggcgtggtggtgggcgcctgtagtcccagctactcgggaggctgaggcaggagaatggcgtgaacccgggaggyggagcttgcagtgagccgagatcgtgccactgcacttcagcctgggcgacagagcgagactccgtctcaaaaaaaaaaaaaaaaaaaaaaagagttaaag

SEQ ID NO: 46491 - DNA, 201 bp, Homo sapiens
gtcctttctaacacgaattttctactgtttggattccaattcttgattatgcctgaaaaattaatatctatcatgaatcttctcaaaagactattttttayatatgctacaagttatctggattttatagttaatttgttcctttctactaaatttgtatgtattattataacataatatataaagacatattgatgtttt

SEQ ID NO: 46492 - DNA, 201 bp, Homo sapiens
cctgagactttgctgaagttgcttatcagcttaaggagattttgggctgagacagtggggttttctagatatacaatcatgtcatctgcaaacagggacartttgacttcctcttttcctaactgaataccctttatttctttctcctgcctaattgccttggccagaacttccaacactatgttgaataggagtggtgag

SEQ ID NO: 46493 - DNA, 201 bp, Homo sapiens
ataatgttttcttgtttacttaagccctcacttctttttactcctcactaagaagatctctagcaaagagaaaaaaaaatagttttagactttcctttagsgaagggactctttttcttcaggaaaatatgctgcaccgtgttgggagatgagactctgatggatgaatatatatatgacaatacttaaaaagtgtgctta

SEQ ID NO: 46494 - DNA, 201 bp, Homo sapiens
cttagcctggggggaaaatgcagactctggctttattttctgcatgggaatcacgtgggtagcttaaatattccaggcatcttgacttggcatattgaacrcattttcttattccataagctgttctacatgtcgttagagtgacagcagtgagtagtaaaataagcactggctttggagtcaggtagacctggattctta

SEQ ID NO: 46495 - DNA, 201 bp, Homo sapiens
tgaccataatagctctaagtagtaaatattcatcaacagttgaattaataaataaactgccttgcatttacacagtggaatactacaaaacaatgaaaatraatgaaacagtcatatgatacaaattattctcacaaacataatgggttgaataaaaaatacaaaaaatacattgtagatgattaagtgatataaagtaca

SEQ ID NO: 46496 - DNA, 201 bp, Homo sapiens
acaaaaaacaaaacaaaacaaaacccaaattagctgggcattggtggctcatgcccatagtcccagctacttgggaggctgaggctagagaatcgcttgascctgggaagcagaagttgcagtgagctgagatctctagcctgggagacagaatgagaccctgtctcaaaaaaaaaaaaaaattctaggattacttattat

SEQ ID NO: 46497 - DNA, 201 bp, Homo sapiens
atatgatacaaattattctcacaaacataatgggttgaataaaaaatacaaaaaatacattgtagatgattaagtgatataaagtacaaaatgacaaaaarcaattttatgctggtagaagtcagaatgtggtcatccttggaaaaagagcagtgggtctggatggggaacgaaggagcttctggggagctggtaatgttg

SEQ ID NO: 46498 - DNA, 201 bp, Homo sapiens
tttaacattatttttcttacctttgacttttattttggaatattctggtaatattatttaaacataattttaaatgaaatttgacttttaaaaatacaatmagcaaacttataaatccctcctccttcctcctgcccttgttaggtattatattttatttgtacaaagccatagcaaacattccaagcattcttttctata

SEQ ID NO: 46499 - DNA, 201 bp, Homo sapiens
cataatgggttgaataaaaaatacaaaaaatacattgtagatgattaagtgatataaagtacaaaatgacaaaaagcaattttatgctggtagaagtcagmatgtggtcatccttggaaaaagagcagtgggtctggatggggaacgaaggagcttctggggagctggtaatgttgtgtattcttaatctcagtcctggtt

SEQ ID NO: 46500 - DNA, 201 bp, Homo sapiens
aatgattccatgaaagaggggagcaaacttcaagtcttatgactcttatctcatgctgtattcattggttgaagaataggttgcttgttacatggaaacaratgtttacagatatcatcaaagaaatgttgacatcgaaaagactgttacatattttttgctttttggtggctacagcaagattggcagaaatgtctttta

SEQ ID NO: 46501 - DNA, 201 bp, Homo sapiens
gtagatgattaagtgatataaagtacaaaatgacaaaaagcaattttatgctggtagaagtcagaatgtggtcatccttggaaaaagagcagtgggtctgkatggggaacgaaggagcttctggggagctggtaatgttgtgtattcttaatctcagtcctggttccatatgtgtggttggtttgtgaaagtttatagagc

SEQ ID NO: 46502 - DNA, 201 bp, Homo sapiens
agccattcatagaggatagctttttgctgatgcagccagatgcagtggggccctttgacaaaacaagtgaggttccttttgagatggatgtgctgtccaakgccaaaattcttagaccttttctcaaacaggggattcaccaccttgttggccttctgcttctttatgataagggactagagccaccttctctgccttggc

SEQ ID NO: 46503 - DNA, 201 bp, Homo sapiens
agatggatgtgctgtccaatgccaaaattcttagaccttttctcaaacaggggattcaccaccttgttggccttctgcttctttatgataagggactagarccaccttctctgccttggccttctttcctttcagcagcttgggtggctggaggaagcaacaagaccaaacattttgtataaaggatcttatgatatttta

SEQ ID NO: 46504 - DNA, 201 bp, Homo sapiens
aatgcacttttcttccttttatttttctagacttaatcacacagattcctataagtaattaggtttttcattctttctaaactctttatcttagcacttcrttcattcagtcatgacatagtaatgtttgtggaatcccagttgcttttattgagaatggctatatattctctcattaagtaattatttttctttatgttt

SEQ ID NO: 46505 - DNA, 201 bp, Homo sapiens
caggtgataaaaatgaagaatacttctggggtaaaatcaaatttattggagtggaatgaagttcctcaggcaaggcatgctgaagtaatcacacccatctsaagccttcagttactgttgatcaacttattttctctagtccagacccaacttctaactacagactcctgtttctacctcccaacagacttctccatataa

SEQ ID NO: 46506 - DNA, 201 bp, Homo sapiens
attcatagccagtaattctgccttcttggtgtgcttcaaatctgtctcagattgaaatggcttcgcattcctgtctgctactgacttagtctaggatttcrtgatttctcatttgaattattagatgaacaccttggcactaccagatccaccctgctcaccacctagatatcctacatcatgctgctagagtgatctttt

SEQ ID NO: 46507 - DNA, 201 bp, Homo sapiens
gatttcgtgatttctcatttgaattattagatgaacaccttggcactaccagatccaccctgctcaccacctagatatcctacatcatgctgctagagtgwtcttttaaaaacaaaacattgaccgtattacacccttacttaaaaccttttaatgagtcaccagtgtgctcaggatgaatccagaatccttagggaaata

SEQ ID NO: 46508 - DNA, 201 bp, Homo sapiens
atcttgaaaagactgcaggtagggaataggggaaaggctagtaaaggctttctgagtcaggataattatgagagcacaaaagcatagatgagggaactagyaggtcagggagcagatggcctaggttctagtggtaagtagtcctacaggctttccctcgtttttatccttgttgttcagggaacataaataatcaccagt

SEQ ID NO: 46509 - DNA, 201 bp, Homo sapiens
aagtgagattgtatggttttggcaggaggagttgaggcagaatggacatagggatatctgttttttacatagaaagttttaagattatagctggaagggaycttagactagttgtactcaaagtttgacctatggtccagttctggtcagtccattacaatgacccaagttgataggaagattttaaaatcttttgtatta

SEQ ID NO: 46510 - DNA, 201 bp, Homo sapiens
ttaaagattttaagtatcagacaatataaagagagacatttaaaaaatatctcatattgaactcctggttctgccaatgacctgactaatgattttggacwgttaaccctgttaattgtttcaccttaggaattgataggaaaattttgtaagcaattcttggttgacaagtacttggttgaaagaccagataacaaaaat

SEQ ID NO: 46511 - DNA, 201 bp, Homo sapiens
ccaatccagcagaaaatggctctagcctgcaaaacaatccagtagctcacgtaaaaggaataattttctttcttgagaagagggaattttttaacgaaatrcaagcacttggggctgtcaccccttctggttcttcttgccatgccctccctgcctctttggatcccagcaagaggcaggttaaattctgcatgctgtagg

SEQ ID NO: 46512 - DNA, 201 bp, Homo sapiens
gtccattacaatgacccaagttgataggaagattttaaaatcttttgtattagtctattctcacactgctaataaagacataccagagaccgggtaatttrtaaaggaaagaagtttaatggaccttataaaggaaagaggttccacatggctggggaggcttataatcatggcagaagggaaatgagaagcaaaagcaca

SEQ ID NO: 46513 - DNA, 201 bp, Homo sapiens
tattctctttgaagcaattgtgaatgggagttcactcatgatttggctctctgtttgtctgttattggtgtataagaatgcttgtgatttttgtacattgrttttatatcctgagactttgctgaagttgcttatcagcttaaggagattttgggctgagacagtggggttttctagatatacaatcatgtcatctgcaaa

SEQ ID NO: 46514 - DNA, 201 bp, Homo sapiens
atttcaagtattgaaatgccaaaaatcaaacaattggaaaacaaaatgacaatttgtttcatgtaattttgaccacattataatgtctgtaaaggatccarcaccgtgcctgtggtatttgacgtgttcgttcccttactcttctcccatcttgtttctttgttggttggcatctacatacattacagatttccagtcagc

SEQ ID NO: 46515 - DNA, 201 bp, Homo sapiens
gataatgatttagaattctaattgatgtcctcattgatatttgggaggttttttttttcttcactctgtaaaagagcaaacacactgctatgcaaaggagyaatagggtaatattactgaagattattgcacattatctctatgtggtgagaaaactgaggcatagttaatataccttgcccaaggtaaaatagctaggaa

SEQ ID NO: 46516 - DNA, 201 bp, Homo sapiens
ttcctagttattttattctctttgaagcaattgtgaatgggagttcactcatgatttggctctctgtttgtctgttattggtgtataagaatgcttgtgakttttgtacattgattttatatcctgagactttgctgaagttgcttatcagcttaaggagattttgggctgagacagtggggttttctagatatacaatca

SEQ ID NO: 46517 - DNA, 201 bp, Homo sapiens
tcactctgtaaaagagcaaacacactgctatgcaaaggagtaatagggtaatattactgaagattattgcacattatctctatgtggtgagaaaactgagrcatagttaatataccttgcccaaggtaaaatagctaggaaagtgctaacccaaggctctagaaagacctacattcagtgcccataaccttaattacacta

SEQ ID NO: 46518 - DNA, 201 bp, Homo sapiens
tacttcaccttttctatgcacatctataagatgatgaagatgatgcctattgaataaatccaataagcaagcttaagcataggaatgataaataataaaayataaatttcctctctgaggagaaaaaaaaatctcatgtcagtagatgtattgcgatgctgggacctaacattctaagtgggaattatatgcagaattcag

SEQ ID NO: 46519 - DNA, 201 bp, Homo sapiens
cgtaaaaaagtcttaaggaaattttgatacataacccccaaagcattgatagcacctcaactttgacatctcatggtaccattttcatcttttttccctamtttttattactttcaataggaaagtggctttcttgttcaatttaaatcagtgagtcaaaaggaaggatggcttggggttgctagtgtttgtttgcaagac

SEQ ID NO: 46520 - DNA, 201 bp, Homo sapiens
ctatctggagctattgtaatttgaacatttaaacaccttttatgagaatggagagaatgataatgaccggtagtcaagatggagaaaacccatttctattygtgagtcagtttaatgggttggtggcttataatttacttaacgtgcttgcatattacttttcatttcagaagtagtgagctgtgtcttcatttacgtgct

SEQ ID NO: 46521 - DNA, 201 bp, Homo sapiens
ggcattgaatctataaattaccttgggcagtatgccattttcacaatattgattcttcctatccatgagcatggaatgttcttccatttgtttgtatcctyttttatttccttgagcagtggtttgtagttctccttgaagaggtccttcacgtcccttgtaagttggattcctagttattttattctctttgaagcaatt

SEQ ID NO: 46522 - DNA, 201 bp, Homo sapiens
ggagtaacctaatgcactccaattcaaatattaaaaaaatgatttcaatagatggttttcagcaattgtacaaaattaatatggatcaaatagcttttgtratattgttattgcgtcatattttaactataaaaatgcaattaatgctcttatagcatattttatggggttaatttccagaagaattacagttaaactaat

SEQ ID NO: 46523 - DNA, 201 bp, Homo sapiens
actaaatgaagtgatattctgtcccaactaaatgaagtgatattctgtatgcatctgccaggttgcataaaaatcttgcacctgttttagttcaagtaacrttttttaaagaaaatccttcagatgagtttcattttatagggatgaggtcttgctatgaatttcttcaaaatttatatttatatccacataagtatgaaa

SEQ ID NO: 46524 - DNA, 201 bp, Homo sapiens
taactctgctgttcaaactgccagaatgcaaatgtatttattttaagatcttggtctatgctagcatattggatggcttatcctttttcgtggaattctcrtctatctaatgttatgtgtatggagccccttgcctcatcattaaaggtgagggaagtgttctcatattgtcaaaagtcaccaagagcaatctcataacct

SEQ ID NO: 46525 - DNA, 201 bp, Homo sapiens
ccattccaatacatgcctagcaagcagaagacagaggattccatgtaggaaaagcatttcttatctccccatttggcatctctcaatttttcactcattcwctcactcacttactctctcactcttgttcttgctttctttctctttaaattatcatggtatttccacatgatattattatatgtctgtttttagattatg

SEQ ID NO: 46526 - DNA, 201 bp, Homo sapiens
cataactcacttggggatttattaaatgaatctttagctgaaggaggcttagagaaaatagaaaaattcagtgtgtatacagataaaacattttcaactartcaagatgagtcctttttctaagaattttttttctaattccaaaaattctctttagaaaaaacattatttagtaaacatctattttaggtactgcctaca

SEQ ID NO: 46527 - DNA, 201 bp, Homo sapiens
ttgcaagaatctcattaactgtagggccatctgccacgttgctactcatttggctcatttaatcacaggtgggtaggaaggtctcaatagttttggttccyattcaattctgatttttgcttgggaaacagaaggaaggtctcaatagttttggttcctgttcaattctgatttttgcttgggaaacagaaaaggccagtg

SEQ ID NO: 46528 - DNA, 201 bp, Homo sapiens
attctttgtctttggaaagaagtgggatttaaagtatactttattctgggaaattggcatccttaaatatattatttacatatattccttaaatatatacrtgtatatatttatgcatgtatgtttgtgtatgtatcacactgtctttaaattctcaatttacttaaagaaatgttttaatttctaaaaaatacacttgat

SEQ ID NO: 46529 - DNA, 201 bp, Homo sapiens
attattagtgttaattatcctattatttggttaggatacaatagaacaagagtgattctcaaactttagcattcacaaaaatcaccacccacttctttaastagtcaaccccctgccacccaagtttttcatccagtaggtctggtataggtcctggaatccacatgtcttacaagttcctatatgatgctggactattaa

SEQ ID NO: 46530 - DNA, 201 bp, Homo sapiens
gaacattctttttgcaaatatttattgactatttggctttctaattcggtgacttgcttatatcgttttccaattttccgatttttgttaggttgtattttgtaattaatttgcttaggtttgttaaaaatatctctgttgcccatgtcttttgaaatattttttaaataatttttcagtcacagaagatttgaagaactt

SEQ ID NO: 46531 - DNA, 201 bp, Homo sapiens
tcataactcacttggggatttattaaatgaatctttagctgaaggaggcttagagaaaatagaaaaattcagtgtgtatacagataaaacattttcaactmatcaagatgagtcctttttctaagaattttttttctaattccaaaaattctctttagaaaaaacattatttagtaaacatctattttaggtactgcctac

SEQ ID NO: 46532 - DNA, 201 bp, Homo sapiens
ataaaaagcatgtgtgtgaatatatatgtgtgtgtatatatgtgtgtgtgtgtatatatatatattctttatatgaagaatgtagcacattaaaactacamatgtgtatataggtaaaactaaaattctaggaaaaagaacttgggagaaggaagaggaaggttccattagtactttaaatatgctaagattcttgtctta

SEQ ID NO: 46533 - DNA, 201 bp, Homo sapiens
gtgaatatatatgtgtgtgtatatatgtgtgtgtgtgtatatatatatattctttatatgaagaatgtagcacattaaaactacaaatgtgtatataggtwaaactaaaattctaggaaaaagaacttgggagaaggaagaggaaggttccattagtactttaaatatgctaagattcttgtcttatttagttggtaggca

SEQ ID NO: 46534 - DNA, 201 bp, Homo sapiens
aagaggaaggttccattagtactttaaatatgctaagattcttgtcttatttagttggtaggcaggacatactaaaatttaatctctgtcagaaattatgygtatctgagtgtgtgtacagttacacaattaataaaaggaaaaaagagagcacatgaaaatcaaaaaagcaagaaataagatcctcccctaaaaacaata

SEQ ID NO: 46535 - DNA, 201 bp, Homo sapiens
atgctaagattcttgtcttatttagttggtaggcaggacatactaaaatttaatctctgtcagaaattatgcgtatctgagtgtgtgtacagttacacaaytaataaaaggaaaaaagagagcacatgaaaatcaaaaaagcaagaaataagatcctcccctaaaaacaataaagaaggaattctaaacagaacactaaaa

SEQ ID NO: 46536 - DNA, 201 bp, Homo sapiens
aatattgatgagaatggaaaggagtgtatctatacaaggaacaattctgaggaaaatatgtttagaagcaattatccattgggtgttaagggtgaaaaagragaaagaattaagaatttcctaaaggttttgaggttaaatagtttacttagtcaacaatggcatcgttaactaaacagtgtatatagaaggaagaccatg

SEQ ID NO: 46537 - DNA, 201 bp, Homo sapiens
aatacccagaaaatttccccctaaacctgatttttattgcttgatttgtggtttaaagtattttcataatatttataagtaaaggtggtttcagcaagtaygaattccaccattttgtccacaggattagtggggagggattttgaattcagatcttagctttggtgctggatgcctttaacaaattgctgtaattgcttt

SEQ ID NO: 46538 - DNA, 201 bp, Homo sapiens
aatgaaaaattagaaatatattgcaagacaatgagaattcatttcacaacctgtggaatgcaactgaatgcgtctaaatctgcaatgactgtggaaattayagtattaaactttttaatttaaaactaagaaaaagggacacagttatttaggcatttatctctgaaaactgtggaaagaacaacagagttaatccagaaa

SEQ ID NO: 46539 - DNA, 201 bp, Homo sapiens
tcatgtcagctgtgagtactgcctagcacttacatgatcacaggtggaagatgcttgaaacagagtaactacacccttgtttacatgaccaaatcttttargtaaaattagtttagaaaaactaaattggagtttttattaaaagtacatgtatttaaactagcaagaaatcttaaactagcagatttcttaaagaaaggt

SEQ ID NO: 46540 - DNA, 201 bp, Homo sapiens
ttcagcaagtacgaattccaccattttgtccacaggattagtggggagggattttgaattcagatcttagctttggtgctggatgcctttaacaaattgcygtaattgcttttcctttatccgtattttacttctctttggcagggtgaaataccagtttatcccaggtatcgtctgaggaaggtttggggagtgatctgt

SEQ ID NO: 46541 - DNA, 201 bp, Homo sapiens
ttaagttctactcccaccaactgaaaatctgcagtcaagttaaagctgagatccagaacctgggaggagagctcatcatgtcagctgtgagtactgcctakcacttacatgatcacaggtggaagatgcttgaaacagagtaactacacccttgtttacatgaccaaatcttttaggtaaaattagtttagaaaaactaaa

SEQ ID NO: 46542 - DNA, 201 bp, Homo sapiens
aatttgggtgacagctacagaagggaatttaataatgccttttactattttgaaagccagaataaaaagtaaaagaaaccctttagaataaattttgaaargttaagttcagagctacttaattattatatggatttggaagtataggcatttaaaaaatactttatattttcaagggggaaaatcattaatcacctcctc

SEQ ID NO: 46543 - DNA, 201 bp, Homo sapiens
aaattattttaagactaaatacgatataaagaacatgattaaatttgttagtataattttaacatccacagcagtcaggagaagaaaaaaattataggccrgcttcacatataaacatatatgtaatgggaaatcatgaaaaacaaagcaaatcttatctgacagcgtattttaaagtttttaaaacttttaaacatcatg

SEQ ID NO: 46544 - DNA, 201 bp, Homo sapiens
tctttgcctcagcctcccgagtagctgggactacaggcgtgcaccaccaagcccaactaatttttgtattttttttagtagagacagggtttcactatttkggccaggatggtctcgatctcttgacctcattatctgcctcccaaagtgctgggaatacaggtgtgagctactgcatccagcctaaaatttcacttttta

SEQ ID NO: 46545 - DNA, 201 bp, Homo sapiens
ctggaatactcttcccaggaaagccagatatgtgaagggttttaccttggatggatgggatctagaagtcaggtaaaatccttaatccttgtatttttttwtaaaaaaatccaccagcagagggctctagagaggctcagagccaaagctatcaagaaaatggtccaatgcagtgtgatgatctggggttgtgggagactg

SEQ ID NO: 46546 - DNA, 201 bp, Homo sapiens
tggaatactcttcccaggaaagccagatatgtgaagggttttaccttggatggatgggatctagaagtcaggtaaaatccttaatccttgtattttttttwaaaaaaatccaccagcagagggctctagagaggctcagagccaaagctatcaagaaaatggtccaatgcagtgtgatgatctggggttgtgggagactga

SEQ ID NO: 46547 - DNA, 201 bp, Homo sapiens
aagaaggggtaattagtgatagaagccaatgctaaataaatacagaaattccattctactgaagtccacttcatgggggcaggatgtgtttttagtattarcatctttggggtgaattatgatgttgttgaaggcatttaattcaacgagtactcatttttattgtgtcactttttaccaatactgctaaagtaacagaac

SEQ ID NO: 46548 - DNA, 201 bp, Homo sapiens
gcactccaattcaaatattaaaaaaatgatttcaatagatggttttcagcaattgtacaaaattaatatggatcaaatagcttttgtgatattgttattgygtcatattttaactataaaaatgcaattaatgctcttatagcatattttatggggttaatttccagaagaattacagttaaactaatgtttctctagtaa

SEQ ID NO: 46549 - DNA, 201 bp, Homo sapiens
gttttcagcaattgtacaaaattaatatggatcaaatagcttttgtgatattgttattgcgtcatattttaactataaaaatgcaattaatgctcttatarcatattttatggggttaatttccagaagaattacagttaaactaatgtttctctagtaaatacttaggaataattgaatttgcagtttggttcttaattt

SEQ ID NO: 46550 - DNA, 201 bp, Homo sapiens
agagtgaggggaaatcccagcatagagaaagtctgataagaagattccctaatcccggccaagagtggtggctcatgcctataatcccagcaccttgggargccaaggcgggtggatcaagaggtcaggagatggagaccgtcgtggctaacacgatgaaaccccgtctctcctaaaaatacaaaaaattagccgggcgtg

SEQ ID NO: 46551 - DNA, 201 bp, Homo sapiens
attaatgctcttatagcatattttatggggttaatttccagaagaattacagttaaactaatgtttctctagtaaatacttaggaataattgaatttgcartttggttcttaatttatactgataattgcttcctacaaaaagacatctctaattgtaatcaaataatatcctctctcctttgtttaaacagcttctccca

SEQ ID NO: 46552 - DNA, 201 bp, Homo sapiens
ttctctagtaaatacttaggaataattgaatttgcagtttggttcttaatttatactgataattgcttcctacaaaaagacatctctaattgtaatcaaakaatatcctctctcctttgtttaaacagcttctcccaagaaatccaagtcctgttttaaaacacaaaacaactcaaacaaaagcattcttaatggaaactt

SEQ ID NO: 46553 - DNA, 201 bp, Homo sapiens
taaaacacaaaacaactcaaacaaaagcattcttaatggaaacttctaatagaaaagctttatcattagccatgaagttatccacttgagtaatcaaatamtatttaagaatgcttcatttagagaaatgttatgtttcatagactgagaaatataaatcaaactgccaatttctggttggcaggtctgtttgaatctggt

SEQ ID NO: 46554 - DNA, 201 bp, Homo sapiens
ttttcctcttgttcctatttctgttcccttgctcctgcttgcttgcccatctttgcatttctttacacctggcagcaaccatactctttcttgatcctgcwaaggttaaacattgttagggccgaatttagaatttctctaatttaaaaaaaaattctaataaggcccagatttcaatcatggctgcaggtgagttgaaga

SEQ ID NO: 46555 - DNA, 201 bp, Homo sapiens
ggtaatgttttgaaggaattttgaatatgaaactaatattactaatcattgacgtttaaagaaaaaggagattagcctagattatccaggtgagatcaatrtaatcacatgaaccctttaagggcagaatcggagaacagaaaaatcagtcggtgaggggagcctagaagagaagaggtagaaggggaggttagaaggatt

SEQ ID NO: 46556 - DNA, 201 bp, Homo sapiens
ggagcctagaagagaagaggtagaaggggaggttagaaggatttaaaatgtgagaaggacacagcctattgttgctgcctttaagatggaggaaggggacsctgagccaaggaaagtgattgatctctggaagttaagaaccatccctggagaagagccccaaggaaattgagatgtcagttctatggtagcatggaattg

SEQ ID NO: 46557 - DNA, 201 bp, Homo sapiens
ggggcagcctaggagaaatgggccaaaaattgaagggaatagtacagccatgactgcaaaactgtctgtcagcattccagaaataattcatggtttttctyttaagcgaatacttaagtttatggcctgtgcctatgaaccaagctttgtggatgttaataaagagttgacagctatctttccattgaagtctttgcctct

SEQ ID NO: 46558 - DNA, 201 bp, Homo sapiens
ttttttctgcttcccctctcctctatttatccccatcttctccttgatccccctctctctggatgtgatgtgaccaatgacccttataaacctaagaatcrctggaagccctcttataactataaaggaaaccaacttcaggacaaagtgaaactcagaaagcacaatgtaaatcaagggaaaagaaaaacaagatacatt

SEQ ID NO: 46559 - DNA, 201 bp, Homo sapiens
tgcaagaatctcattaactgtagggccatctgccacgttgctactcatttggctcatttaatcacaggtgggtaggaaggtctcaatagttttggttcccrttcaattctgatttttgcttgggaaacagaaggaaggtctcaatagttttggttcctgttcaattctgatttttgcttgggaaacagaaaaggccagtga

SEQ ID NO: 46560 - DNA, 201 bp, Homo sapiens
cttgtggtatacttggcttaggagaagagacaaggaacacagtggtctctaaattagtaattgacttcatcaggggaggaaagactggttattgactgccstaggtcagttaaagcacctgacatttacctataacttgtgtctgccttcctggctcagaaatgaaatagaaacaaatttgattagtaaccaggaaataca

SEQ ID NO: 46561 - DNA, 201 bp, Homo sapiens
  misc_feature (1)...(201): n = A,T,C or G, or insertion/deletion polymorphism (see Tables 1-2)
taaaactggaatatatcttcctgaaagattcctccaaacaccctagagttttacctttgaaagcttaactaattgaagccttacttttaatttccttttgngctcatttatagacatggcttcatctatatcctgtctcagtactaagataggctcatgtgtcagctgctgcctcttgagcagagggtcttatttctagtg

SEQ ID NO: 46562 - DNA, 201 bp, Homo sapiens
tcattttcacactttctactcatttgactcattctttccttaatggaattataggcttttctactgtggccttggaagagtctcttgatagagacagcatrttttgcttaaacttgagtgattgcaattggttattggtcaagaatctgattactagtttgacagtttgattttatcagagttgtatagtggtgctggtct

SEQ ID NO: 46563 - DNA, 201 bp, Homo sapiens
cactgtctttagacaaaaacaagagcaaaaacaaaaacgtgggtatctcctaagaggcctgtgacttgttatacattttaccaataaaataatcatttacrtgaaatttaaagacttactctagatgaaatgaataatgagaaaacagcactaagttcagagaataaaattgtattgacgaagaaagtaaatagatcagtg

SEQ ID NO: 46564 - DNA, 201 bp, Homo sapiens
aaattaattttgactgtgactagactaaaagtcagttgaaaaaccaagcaaagatgtcagctagactggaaattatcttatatgcatagctttatattatwattttgcaaccttctaaacttacagtgaagttttatgtattacttggtgaccatttttttttcctcaaggaattggctttaggtctgttttccttcaaat

SEQ ID NO: 46565 - DNA, 201 bp, Homo sapiens
taatttgcctgagcaatatatcgtagtcattagcaagaattagaactgtacctaccaattactgaacaaaaattagggctgtaaataatcacaacacctcrgtctaggcagatgacctcatctgcttattttcctgccacgtataacaaaataatggttggtaaaggatattaacagctgttttaatttgaaattaaactt

SEQ ID NO: 46566 - DNA, 201 bp, Homo sapiens
ttgtatgccgtttctgtaattaatttgccttttgtgagttgatttttccatgaacctttagaggctgaaggagttttcccttggtctctacaacttttatytttcatttttcatagaaagctgtgttaacactagtaaatcatgtgaagaggttacagtaatatgcaaagctttctttttgtgtgtgagtggcggtgtggc

SEQ ID NO: 46567 - DNA, 201 bp, Homo sapiens
tttttctgatccatgaacatgggatgtctttacatttgtatgtgttctcttcaatttctttcatcagattcttatagttttccttgtagagatatttcacytcattggtttattcctatgtaatttttttggtagctagtggaaatgggattgctgttctgttcttctgtttttgtttttgttttgcttttcttttttttg

SEQ ID NO: 46568 - DNA, 201 bp, Homo sapiens
cctcctgccctggcctttcatgtagctaggactacactactaaacttacctatcatttagtacctgaatgaagctttatgggtgacagacagaggattttrgaaaaactttctgaaaactttctttgggtccagaatttgagcaggtcacaaggaggtaatcttattacaggtgccagagtacaatgtgactcagtgttag

SEQ ID NO: 46569 - DNA, 201 bp, Homo sapiens
tgcctttgatcataatcagccatttacatacaagtttctcccactagattgtaatgtccttaaagacagacaccacactttctttatttttattttccccrgtagcatctacacatagcagaggggcccaatgatcaatgatcaccaagtccttctccaaaatttaaatttaaaatgtactgcaagattacactgtgatac

SEQ ID NO: 46570 - DNA, 201 bp, Homo sapiens
gtgatttttttgggtaccaattttaagtttggtaagaatggaaagatgcttaaataatagataactttaagtaagtaattgcagagggggcagataaaagrcaccattcatcaagtgtcaactctgtgccagctatttagctaagtgctttacatgagctatataatgtaatcttcacattaaccctgtgaggtaggtaat

SEQ ID NO: 46571 - DNA, 201 bp, Homo sapiens
aaggttctttagcaagcttttgaacaattgatcatgaatattgtgtattcaattacttacaagaaccatcattgaactacgtctgttgaaagatccgactsaacctaattttggtaatgcttccagcaaatccctgtaaggggtagtaactgtgctttcacatttgggagccattgttggcgaatttcctcccctttaagc

SEQ ID NO: 46572 - DNA, 201 bp, Homo sapiens
ctgttgtgatgaaatctgaagtatacacaaaaatcaaacacatttcctgcctgtaggaacctttgtaaaaaacaaacattaattatataaaaacatattcytaggccacacaatattaattttaaataattgagtcagtacaaacatatttttctattttatatagaatggattttctcttttcctttctatgtactttcc

SEQ ID NO: 46573 - DNA, 201 bp, Homo sapiens
tgttaagccaaatatgtccactgggaatgctataagcttattccaatgttttctccattggttataacattttaaggaaagttactcttttggaatgaggkttttgtagttaggttatgatccaagtgcaaatattaccctgattactttatagccatcaattggcttagataaaaaaatgatgatacattcagcctgatc

SEQ ID NO: 46574 - DNA, 201 bp, Homo sapiens
tagaaatatgattgttcaaaaggatattgttagtggtggcgagtccaaacaggtccgcagcaaccttcaattcttgcctcctctgaagaaagaatttgacygaggggcataaggcagagtgagagacccagacaagttttggaggaggagtgaaagtttattaaaaagttttagagcaggaatgacaggaagtaaagtaca

SEQ ID NO: 46575 - DNA, 201 bp, Homo sapiens
tgaaacccacagctgagcagccactgaaaaaagaagaatggatttggagctgcctcaaaagctccatacccctgagacaatttcataaattgtaaaactgygtttattgctttataatgtttaaagatgtaatttgtatcaaataatgtaagagcaaaacataaaatgtgagaaaagaaaacataaaagtagacttaggtt

SEQ ID NO: 46576 - DNA, 201 bp, Homo sapiens
attgcatattgtgtaggcagatgcattttaaaatgaaatagtgacttttagaagtatctggtgactcttcaacaatacctggttttccaaacaaaattaawacaaaggctttctttcaaatgttctttatctcaatttcatttaatttcctaggagagttagtgatttgcctagcactttctgtttcgttgtttatcctaa

SEQ ID NO: 46577 - DNA, 201 bp, Homo sapiens
taaaaaaaactattatccctttaaggagtccctaaaaatgtttttttctgatcacttccccaatgaaatttgaataccacagatatttaagtacataacayatctgttaatgtactttatgtacattatatgtgctttatacattaaaaaagtaagttttttttccccaagaaccagttttcagcctcttgggggtgatat

SEQ ID NO: 46578 - DNA, 201 bp, Homo sapiens
gcctagcactttctgtttcgttgtttatcctaatatatgctcagttttctgtttaactagtttgttgttgttgcttttcttttccgacaagttttcagagyggaattcttagaaatgcttagtgaagctaccctatggcccattttaccaactatcagatctttccctgaagaaataacagtaaggaaaataggaaaatat

SEQ ID NO: 46579 - DNA, 201 bp, Homo sapiens
ttatgtacattatatgtgctttatacattaaaaaagtaagttttttttccccaagaaccagttttcagcctcttgggggtgatatcactcctgttgagcayttatgggctttatttaatagagaatattctagaaagaagaaagaaaaattctgttcttagcagtccttacaataatgtgtttaattctgaataccacatt

SEQ ID NO: 46580 - DNA, 201 bp, Homo sapiens
cccatgggatttttcttcctagcaacatcagcttctgggctgaatgctatgttctgctccctaccaggaagagtaggagagacggaacatacctagatgaktccagtcagttaatagtcatgtttctagatttcaggcttgtcgtagtcatggcaccaaagataatgagcctgtatctgtcatttcccaaagggcctgaca

SEQ ID NO: 46581 - DNA, 201 bp, Homo sapiens
agatggtgaaagagcagaaattaattttgactgtgactagactaaaagtcagttgaaaaaccaagcaaagatgtcagctagactggaaattatcttatatrcatagctttatattattattttgcaaccttctaaacttacagtgaagttttatgtattacttggtgaccatttttttttcctcaaggaattggctttagg

SEQ ID NO: 46582 - DNA, 201 bp, Homo sapiens
ctagcaatagaaaacaagagataaaaatctcagtcttcttagaagttagtttccagtagagtgggagagaaaggcagcaaactggagagatacaaaataaytgcttttattcatttgtaatgtgtcaggtggtcttaagcctaggtgaaaagcaaagtgggaaaggcataattgggttactggtgaggatttttttttttt

SEQ ID NO: 46583 - DNA, 201 bp, Homo sapiens
ctatgacaatgtcaacttagaattaattgatttaccttctataatggcccattattgcttaagtagtacatcatcatgatgcacatgcatgtgtgcgtgcmtccacacacacacacataaatacacacacaattaatttttccattaggtatgatatcctaatgtcatcaaatgaaaaacaagacggcataccctgaatcg

SEQ ID NO: 46584 - DNA, 201 bp, Homo sapiens
gattatagtaagataagactggtactttattataatagctctaggaaactcatacagcaattaaggtgaggacgaagaatgtgccattggattcagctccyggaggtcagtggtaaattagacagaagcaatttcagtgaagaagggtcaaaatcttgactggagtgggttcaagggaggaaagaccatagaatgaattga

SEQ ID NO: 46585 - DNA, 201 bp, Homo sapiens
atatcctaatgtcatcaaatgaaaaacaagacggcataccctgaatcgtctccaaggcccttcgtagcttaaaaaatttactttctggctgctacagatgygttgcttatgtcttttgtctctgaagatttgattttacctcctgatgagctgttgaaaggtagtagctcttagattgagtataaaagtgacatctgtctc

SEQ ID NO: 46586 - DNA, 201 bp, Homo sapiens
atagtaagataagactggtactttattataatagctctaggaaactcatacagcaattaaggtgaggacgaagaatgtgccattggattcagctcctggargtcagtggtaaattagacagaagcaatttcagtgaagaagggtcaaaatcttgactggagtgggttcaagggaggaaagaccatagaatgaattgaaagt

SEQ ID NO: 46587 - DNA, 201 bp, Homo sapiens
cctgatgagctgttgaaaggtagtagctcttagattgagtataaaagtgacatctgtctcttttcaaagcctcagaacttttgtatgcatctgggaagctytgtcccctgcatagtttcaattacaatgagtattcttttcattttggatcttagcaaagacttttgccactgtgtggctgtgtgacagctgctgtacacc

SEQ ID NO: 46588 - DNA, 201 bp, Homo sapiens
ggatataatacggatacttcctaataaagaccacaaatgttataaggatgagaaatataacaaagattagggactttaagtctctggacgtctcctgagaktctcagtctacaaaaagtagggcatgtgttaaattattgatttgccttgctgacaatttcatctctaagaatattaaggaaactgtgaaggaaactgctt

SEQ ID NO: 46589 - DNA, 201 bp, Homo sapiens
caattgtagtagaaatacccctaagaggcaaaaggagatgggatctggtgcttaagaggaaggattggccttaggactgagacagaaaggacagaggaagraaggccatgggcatagactgagagagtgaatagatgttgagaaagtaagtagaagagctcttccagttgcttctatttgttaatgaaaggggaagaaagt

SEQ ID NO: 46590 - DNA, 201 bp, Homo sapiens
atcaaaattgaaaatttattatccagatagaaaggaagtggtgtttgggaggaatcggtggaaatggcatgagaattggattcatgtcaggggacacaggragagcccacagaaaaatgtcattttccatgggccttaaaggagaagcaagatttgcacatttgggaaaatacgaaaagggcattctaggcaacggagatg

SEQ ID NO: 46591 - DNA, 201 bp, Homo sapiens
tgacattagataatcaaactcaggtaactgtaactagaggcaactagtaaatgtaccatgtcaacccaaaataatgtctgtgtagaatctaaaggacagaracattggtggcttatccaaagttccaaatcaaaaataaatttggattatactggattaaaattattaaatttggaataaaggtgattaaaatttggataa

SEQ ID NO: 46592 - DNA, 201 bp, Homo sapiens
tctttcatgaaatgtttggtgtttcttgggtgtcagtctaggtttgaatgaagcattaaaaggctgatttgcagatctgtttctaggccttgtcgattgayctgtttcattttggaatctccggggtgttaggacctagcactttgctggagaacctcaagctgagaataaagatatttttctctgcggcaggtcagtttt

SEQ ID NO: 46593 - DNA, 201 bp, Homo sapiens
agaaggaagggttaggaacaacatccttaccaagatgaagcagggaggctggagagtggaagatcgaggtcttctggtatcactttaaatcctttcttgarggatgagttgtttttccttttttataatgaataggtgcttgtaacaaatgatggcaaccatctgcccttgttaatataccccttggactgtcatatcaaa

SEQ ID NO: 46594 - DNA, 201 bp, Homo sapiens
gtcatatcaaaggaaaagattctgcacaattcttcatgccacaaatcaacgcatttgtagccttttctccacctctgacttatatctctcagaacggggcmaagacatacaggaaagttgttgaaagtgatgtttatgatgccgtaataaaaagatcccagatcacaatagtactaggtctgaaatcactgcaattcaatc

SEQ ID NO: 46595 - DNA, 201 bp, Homo sapiens
cccttatgatttagtattccatcctggggtgctatttctgactaatataagttggggaatctcatggtcactagtaataagctttcctcccctttcaaacwctgcattagtacctccaggggtcagctgcagagccagtttatcctcttgcgtggatgttctgcttcatgacttttgaaaatagtcacagaaaagtcaaga

SEQ ID NO: 46596 - DNA, 201 bp, Homo sapiens
aaagttgctctatattcataaatctggtgatgttacgcaatgtagttctaagccagaattaatgagaaagcatacctctgtttcctccttactctgcttgmttatgcattatataatcagttttcacattaagatgccttaatttgttagtcatcgcaaaatgcctcactcttggcaaccacagtgttggtatttctgaca

SEQ ID NO: 46597 - DNA, 201 bp, Homo sapiens
atgcattatataatcagttttcacattaagatgccttaatttgttagtcatcgcaaaatgcctcactcttggcaaccacagtgttggtatttctgacatamagtttcccaaatgttgtttttgaagaccattcatatatttttcacatttcatggttaattttaagaccttttaactccttgaactcagttaaattgcagg

SEQ ID NO: 46598 - DNA, 201 bp, Homo sapiens
ctacttacaaagagaaggctaattataaaggaacagcaaatgtcatagtgttttgaatccttttcatacataagacttccattctgcactgtggctacttkgggtcctcttccgagtgtagcatcttctgagtttctgttcctcagaagctaggttcttgcccactctttccttctccattatcatgctgaatgagaaaca

SEQ ID NO: 46599 - DNA, 201 bp, Homo sapiens
tcctatgagctcatcatctctaacttttatttagcttttagcactaatgcttcatagtgtcaagtgcattttgtgtgccattttgtctcctctatgctcayagtaagttttttgaaggtaggcactttgtctgattttttttttttttttgagacggagtctcattctgttgcccaagctggagtgcaatggtttgatatt

SEQ ID NO: 46600 - DNA, 201 bp, Homo sapiens
aaatttttacaaactaactgtgagctgaattgtaattccaccatacgttgattcgactgtttaacattttcactaaaaattaataagaaatgttgaggcayttaaatctcttaccttgctgcttttgccatctctctgggaacatttaccctgttggcagactctcagcaattttacattaatctcttcggtgataaagcc

SEQ ID NO: 46601 - DNA, 201 bp, Homo sapiens
tgtctgattttttttttttttttgagacggagtctcattctgttgcccaagctggagtgcaatggtttgatattggctcactgcaacctctgccttctggrttcaggcgattctcctgcctcagcctcctgagtagctgggattacaggcacccacccctatgcctggctaatttttgtatttttagtagagatggggttt

SEQ ID NO: 46602 - DNA, 201 bp, Homo sapiens
atgttgaggcacttaaatctcttaccttgctgcttttgccatctctctgggaacatttaccctgttggcagactctcagcaattttacattaatctcttcrgtgataaagcctgcatcaacaaccttcaggctaataaaagttagccttccagcaatagtggccaaggtgtacattgtacatagttgttggttttttattt

SEQ ID NO: 46603 - DNA, 201 bp, Homo sapiens
tctcttaccttgctgcttttgccatctctctgggaacatttaccctgttggcagactctcagcaattttacattaatctcttcggtgataaagcctgcatyaacaaccttcaggctaataaaagttagccttccagcaatagtggccaaggtgtacattgtacatagttgttggttttttattttgtttttgttttgtttt

SEQ ID NO: 46604 - DNA, 201 bp, Homo sapiens
gttggcagactctcagcaattttacattaatctcttcggtgataaagcctgcatcaacaaccttcaggctaataaaagttagccttccagcaatagtggcyaaggtgtacattgtacatagttgttggttttttattttgtttttgttttgttttgttttggtgcacttaaaaccctggagaccaagaggggatatgagag

SEQ ID NO: 46605 - DNA, 201 bp, Homo sapiens
gttttgttttggtgcacttaaaaccctggagaccaagaggggatatgagagtagagatcaatgctttatacctcaagacttacttcttctgccttatgaarttatttttaactaatataaatgttttaagaggtttaaaaagaaaatgacatttgatatgggttggctgtgtcctcaccaaaatctcagcttgaattgtat

SEQ ID NO: 46606 - DNA, 201 bp, Homo sapiens
gtattttatttattttgttcattgatacttgctttttgttcccaataacgacatggtgaggcttgaacttagacgtgagagctattttttatttcagtctyggctagaagagcaatctacctcagaaaatagaggcgaggagtcaggtgctttatgttcttcctctctgtaccctcatcctctgaagccaaagttacactc

SEQ ID NO: 46607 - DNA, 201 bp, Homo sapiens
ctgccttatgaaattatttttaactaatataaatgttttaagaggtttaaaaagaaaatgacatttgatatgggttggctgtgtcctcaccaaaatctcarcttgaattgtatctcccagaatccccacgtgttgtgggagggatttgaatcatagggggcggtctttcccatgctattctcgtgatagcgaatcagtctc

SEQ ID NO: 46608 - DNA, 201 bp, Homo sapiens
caggacagaagtagcaggaagatagaccttgtggagagttccatcttggcagtgtgttgtggtattagctgagcccatgttttccacttgttgcatttggrtttcctagttttacatttcatattgtaacatttggcagattttaaataacttgtacaatgtatagaaattctcaaaggactgatgttttgtaaaacttct

SEQ ID NO: 46609 - DNA, 201 bp, Homo sapiens
atctcagcttgaattgtatctcccagaatccccacgtgttgtgggagggatttgaatcatagggggcggtctttcccatgctattctcgtgatagcgaatmagtctcacaagaaccgatgggtttatcaggggtttgtctcttgccaccaccatttaagaagtgccttttgcctcccgccatgattctgaggcctcccagc

SEQ ID NO: 46610 - DNA, 201 bp, Homo sapiens
gtttccataggatttttttaaaattcaagaatatttgcatatacttttctttaggcaaggaattattgattcaatacttattaaaagacagaaggcaaagsattatacattctccacagctcaaaaatgttcccatgattttcttgtgaaattgatcaataacaaaagcttgtcagtaattaaattgtttgctcctttatt

SEQ ID NO: 46611 - DNA, 201 bp, Homo sapiens
gctgaatccgacagatcagaattcaaattctgtctcatgtgattacacctcaatttctttacctataaaatgggttaagaccaaactccctgcactgtgcraagcctctaaaatctctctctatgcccctcacacagtgtggcccttatatgaactcatgcttttttgtttttgtaaggattaaatagttgcagctgaata

SEQ ID NO: 46612 - DNA, 201 bp, Homo sapiens
tatttattttaagatcttggtctatgctagcatattggatggcttatcctttttcgtggaattctcgtctatctaatgttatgtgtatggagccccttgcytcatcattaaaggtgagggaagtgttctcatattgtcaaaagtcaccaagagcaatctcataacctagaaaaatcgacagacagctgagccaaataggca

SEQ ID NO: 46613 - DNA, 201 bp, Homo sapiens
cagcttgaattgtatctcccagaatccccacgtgttgtgggagggatttgaatcatagggggcggtctttcccatgctattctcgtgatagcgaatcagtmtcacaagaaccgatgggtttatcaggggtttgtctcttgccaccaccatttaagaagtgccttttgcctcccgccatgattctgaggcctcccagccatg

SEQ ID NO: 46614 - DNA, 201 bp, Homo sapiens
atgagacatccattgtcccagcccatgtaaccctttcaggtctaccactgtttccatgacaagtttgtggcacggggctatggtgagatttgaaacactgktctgggcttactggatgacattttctctgaagtcttttttatccatattggattgtcaaggagtagggcaagttagtactgattatggaatcataaactt

SEQ ID NO: 46615 - DNA, 201 bp, Homo sapiens
aatttatcctcaaaattgtgctgggacatgaagtattgttcccattttacagatgaggaaactgataccatgccgtgctaccaggctaaccaaaactgcascccaggtttatttaacttcaggtctagtggattcgaagtctacgatctccctcctacaccatgaaatcaaagtaagtcttccacgaacagacttaatttg

SEQ ID NO: 46616 - DNA, 201 bp, Homo sapiens
gcagaatgaaaatagtgatatgaatggtctaacatgactgatctaattgtttagtatcaaaaaatatatatttcagttggtttatgaataataattatagstataatttattcagtatttactatgtacgaggcactgtactgagcacttaatataccaaactctaacaaaaacacactaagaactcattaattcacttaa

SEQ ID NO: 46617 - DNA, 201 bp, Homo sapiens
cagtgatggactgcatataggataatggtcccctaagaaggctataatggaactgaaaaattcctatcacctaatgacattgtattatttgttctcacatycctataaagcactacctaagactgggtaatttataaataaaagagacttaattggcacacagttccacaggctgtacaggaagcatggctggaggggcct

SEQ ID NO: 46618 - DNA, 201 bp, Homo sapiens
tggtctaacatgactgatctaattgtttagtatcaaaaaatatatatttcagttggtttatgaataataattatagctataatttattcagtatttactaygtacgaggcactgtactgagcacttaatataccaaactctaacaaaaacacactaagaactcattaattcacttaaccaatattagttgccataggcctt

SEQ ID NO: 46619 - DNA, 201 bp, Homo sapiens
ccatggtggccaggatggtctcgatctcttgacctcgtgatctgcctgcttccgcctcccaaagtgctgggattacagatgtgagccactgtacccaaccratatatatatatttttcattttattttcctctttctcacacacatacacggacaatatgagttttaaataattagactatatatatatacatatatgcac

SEQ ID NO: 46620 - DNA, 201 bp, Homo sapiens
agtaaaggcctctctctgctccttaatgatgcttttattgtaaaatcttgcatttttttaattttaatttttcttctcaaaactttcttttacctgaagcytactgttgtttcaccatcttatatccttcagctcagttaagactaagtttccatttcctaatttaagttggccaagaacattaaattagcaggtgtttgt

SEQ ID NO: 46621 - DNA, 201 bp, Homo sapiens
taattttaatttttcttctcaaaactttcttttacctgaagcctactgttgtttcaccatcttatatccttcagctcagttaagactaagtttccatttcytaatttaagttggccaagaacattaaattagcaggtgtttgtgttattttgtttcctaatagaacatgaagctgcccaatgaccagtgaagcaattggta

SEQ ID NO: 46622 - DNA, 201 bp, Homo sapiens
attgtttactgttatatctccagcacctagaataatgccctaaatgtagtaagtgctaggtaaatatcaatgaatgcatgaatgaatgaatgcaataatayggcatgccattttgtgattttgcagtgaaaagcattttttccttacccttatttttttctccttcctccgactgaaagtggatgtatttgggggtatatg

SEQ ID NO: 46623 - DNA, 201 bp, Homo sapiens
attttcttttctcttctaaaactcttattaagatgaatgttggtctgtctggatgagtcttgtggcttttaatttttgtctcatactttgcatatcctttycattctgtgagaatttttggctttcttttctggtcactgattttgatgttagctattttcattccgctctttaagtcttcaactgtctagtttttatttt

SEQ ID NO: 46624 - DNA, 201 bp, Homo sapiens
  misc_feature (1)...(201): n = A,T,C or G, or insertion/deletion polymorphism (see Tables 1-2)
tctgtctggatgagtcttgtggcttttaatttttgtctcatactttgcatatccttttcattctgtgagaatttttggctttcttttctggtcactgattntgatgttagctattttcattccgctctttaagtcttcaactgtctagtttttatttttgcaataccattttaaatttccaagaataccagtggtgttttc

SEQ ID NO: 46625 - DNA, 201 bp, Homo sapiens
gttcttcctctctgtaccctcatcctctgaagccaaagttacactccataaaaataacacagaatgtgagagctaatagagcctcagtttatccttctttrtatctccccctggaatgtcctgggcagtgccttatttcccatttgcaaatgtgaggacaatatgcaattaagagcttcaaccttgtcattggtttggtgt

SEQ ID NO: 46626 - DNA, 201 bp, Homo sapiens
ttattcaccaccatgagagcagtatgggggaaaccacctctatgattcaattatctctcatcaggttcctcccacaatatctgggaattatgggagctacratttaagatgagtatgggagaggacacagccaaaccatatcagtcatgttagttttccgtctatcagctattctttttctttttttatttttccttttca

SEQ ID NO: 46627 - DNA, 201 bp, Homo sapiens
tacacaagtagaaatagagcaaagcccctttctccattcttttagtcaatgagcagtcaccagttgtatgagcaaatgggcaggtaagatcttggaacccrtgtgcataggttaattcactattctctcttagaatgaggaataggctgggcacagtggctcatgcttgtaataccggcaatttgggagactaaggcagaa

SEQ ID NO: 46628 - DNA, 201 bp, Homo sapiens
gcaaagcccctttctccattcttttagtcaatgagcagtcaccagttgtatgagcaaatgggcaggtaagatcttggaacccgtgtgcataggttaattcmctattctctcttagaatgaggaataggctgggcacagtggctcatgcttgtaataccggcaatttgggagactaaggcagaaggatcttttaagaccagg

SEQ ID NO: 46629 - DNA, 201 bp, Homo sapiens
acacctcttcttttttccgctttttacttcttttgtgtttgcatgcaaactctccaatgctggcacttaacggtagcctcactcattggctttgtcaaaawtatgtgataacacagaacattgacctcctctcttatattttcactgaggcagaataattcccccactgagttgttcaggaattttaaaaggtaatttatt

SEQ ID NO: 46630 - DNA, 201 bp, Homo sapiens
aaaggctctctaaggcaagtcaggatcaaaacttaaaatttgctatctaaaacctgtagagaatattaatcttttcaataaattgggcagccaaatcaagrttacaatgtcaaataaaatatggcatgaaccttcttttagcatcaggtccaagtagagaccatcttaacttcttaacatgtagcttcctcgtgccattct

SEQ ID NO: 46631 - DNA, 201 bp, Homo sapiens
aataataacactatttactggccgtgtactaaaatttatgtaaaacatttaaacagaagattcagtaagtactcaataaacgtttactactacttcttctrttattcctatgacagatatgagccacgtcttccatattgaatctgcttttctgtaagtcccaacatttcggtggatggaattgagcctgaagttacttaa

SEQ ID NO: 46632 - DNA, 201 bp, Homo sapiens
ttccctctacacactgctttaaatgtgtcccagatattctagtatgttatgtctttgttctcgttggtttcaaagaacatctttatttttgccttcatttygttatgtacccagtagtcattcaggagcaggttgttcagtttccatgtagttgagcagttttgagtgagtttcttaatcctgccttctagtttgattgca

SEQ ID NO: 46633 - DNA, 201 bp, Homo sapiens
attgagcctgaagttacttaatacttgtatatactttctgccatttacctatcactgctcctaaaattgtgtacttatccaacttaagatgagttttgagrcttcaatgctctttggcaattcttctgtaattcctagttatctccctcagtgtctctgcagtgctttcacccgcttcaccctctcaaacctaaaatcctg

SEQ ID NO: 46634 - DNA, 201 bp, Homo sapiens
atgttagggtgtcaattttggatctttcctgctttctcttgtgggcatttagtgctataaatttccctctacacactgctttaaatgtgtcccagatattmtagtatgttatgtctttgttctcgttggtttcaaagaacatctttatttttgccttcatttcgttatgtacccagtagtcattcaggagcaggttgttca

SEQ ID NO: 46635 - DNA, 201 bp, Homo sapiens
cttaatacttgtatatactttctgccatttacctatcactgctcctaaaattgtgtacttatccaacttaagatgagttttgagacttcaatgctctttgrcaattcttctgtaattcctagttatctccctcagtgtctctgcagtgctttcacccgcttcaccctctcaaacctaaaatcctgccattccttccttact

SEQ ID NO: 46636 - DNA, 201 bp, Homo sapiens
ctgctctgatcttagttatttcttgccttctgctagcttttgaatgtgtttgctcttgcttttctagttcttttaattgtgatgttagggtgtcaattttrgatctttcctgctttctcttgtgggcatttagtgctataaatttccctctacacactgctttaaatgtgtcccagatattctagtatgttatgtctttgt

SEQ ID NO: 46637 - DNA, 201 bp, Homo sapiens
atcagaattgtcctcctactttgctgagaaaattgaagccactagactagagatgcatccttatcctatcaccagacttttaatcatactgcattcattcyatgttttcttcctttctgcccattatactggaatattccctcctggcagggcaaagcatgagtgaatctttccacctgtcttgcttctatcccagatacc

SEQ ID NO: 46638 - DNA, 201 bp, Homo sapiens
tgggatcggtggtgatatcccctttatcattttttattgcatctatttgattcttctctcttttcttctttattagtcttgctagcggtctatcaattttkttgatcttttcaaaaaaccagctcctgaattcattgattttttgaagggttttttgtgtctctatctccttcagttctgctctgatcttagttatttctt

SEQ ID NO: 46639 - DNA, 201 bp, Homo sapiens
agtttgtatttctgtgggatcggtggtgatatcccctttatcattttttattgcatctatttgattcttctctcttttcttctttattagtcttgctagcrgtctatcaatttttttgatcttttcaaaaaaccagctcctgaattcattgattttttgaagggttttttgtgtctctatctccttcagttctgctctgat

SEQ ID NO: 46640 - DNA, 201 bp, Homo sapiens
tggactttttttgttggtaagctattaattattgcgtcaatttcagagtctgttattggtgtattcagagattcaacttcttcctggtttagtcttgggarggtgtatgtgtagaggattttatccatttcttctagattttctagtttatttgtgtagaggtgtttacagtattctctgacggtagtttgtatttctgtg

SEQ ID NO: 46641 - DNA, 201 bp, Homo sapiens
agaaggaatgataccagctcctctttgtatctttggtagaaatcggctgtgaatccgtctggtcctggactttttttgttggtaagctattaattattgcstcaatttcagagtctgttattggtgtattcagagattcaacttcttcctggtttagtcttgggagggtgtatgtgtagaggattttatccatttcttcta

SEQ ID NO: 46642 - DNA, 201 bp, Homo sapiens
aagctttttgatgtgctgctggattcagtttgccagtattttattgaggatttttgcattgacgttcatcagggatattggtctaaaattctcttttttgsttgtgtctctgccagctttggtatcaggatgatgctggcctcataaaatgagttagggaggattccctctttttctattggttggaatagtttcagaagg

SEQ ID NO: 46643 - DNA, 201 bp, Homo sapiens
gtgtatgttgaaccagccttgcatcccagggatgaagccaacttgatcgtggtggataagctttttgatgtgctgctggattcagtttgccagtattttaytgaggatttttgcattgacgttcatcagggatattggtctaaaattctcttttttgcttgtgtctctgccagctttggtatcaggatgatgctggcctca

SEQ ID NO: 46644 - DNA, 201 bp, Homo sapiens
taaattttgtataaggtgtaaggaagggatccagtttcagctttctacatatggctagccagttttcccagcaccatttattaaataaggaatcctttccycatttcttgtttttgtcaggtttgtcaaagatcagatagttgtagatgtgtggtattatttctgagggctctgttctgttccattggtctgtatatctgt

SEQ ID NO: 46645 - DNA, 201 bp, Homo sapiens
cctgagttctgttacaattcccacagaggttcttaagctacagttcatggggattcatatgtagaattcagggtgtctgtggacttggatgagaaaaatamatagttctttattttataaagttctatctgaaatttatcactttagttattaatattattaaatacaaaccacagtgcataagatacctaagactttgtc

SEQ ID NO: 46646 - DNA, 201 bp, Homo sapiens
gaactgacagttgtagtgactggaagtggcccaagatagcttagatatccaatggatctatgcttggaagaatggtgacatcatatcttcagtaggagggygtattagtctgttctcacactgttaataaagacatacctgagactggataatttatagaggaaagaggtttaattgattcacagttccacatggctaggg

SEQ ID NO: 46647 - DNA, 201 bp, Homo sapiens
  misc_feature (1)...(201): n = A,T,C or G, or insertion/deletion polymorphism (see Tables 1-2)
actgagccttccaaatcacgtagctgatcgtggatgaatcttttggtttctttcaggttgacttggactctgcttagttcccatcacctgataagaactcncctttaaacatgtgaaatggaggatataattgcaattaaagtaaagcctgataatttaggttgattattgacatctaatcagtttggactaaatgcaagt

SEQ ID NO: 46648 - DNA, 201 bp, Homo sapiens
aggatccaaaagagcaatgtctaaaagcttcagagtaaaaggaaaaaatggaaagcacatgtaccctaaaacttaaagtataataataaaaaaataataawaaaaaaagaatagacataaggtgcctgccaatactctgactcctctccaagcctactataagccaatcaattggcatatgtcatgtcctgcagatggaaa

SEQ ID NO: 46649 - DNA, 201 bp, Homo sapiens
aaggaggtgtagtatctctacaagaaaaataaaacacggctgaaagaaattgtagatgacaaaagcaaatggaaatacattctttgctcatgggttagaasaatcaatatcatgaaaatgaccatacactccaaagcaatctacagattcaatgcaatttctatcaaattaccaacactattttttacagaattagaaaaa

SEQ ID NO: 46650 - DNA, 201 bp, Homo sapiens
aaaaagaatagacataaggtgcctgccaatactctgactcctctccaagcctactataagccaatcaattggcatatgtcatgtcctgcagatggaaaagsagtatgtgcaaacatgtactgtacagatgcatggatctgctctgcagctgctggaggttatatttgttaagcagcctgacaatatccatgagttttgaaa

SEQ ID NO: 46651 - DNA, 201 bp, Homo sapiens
tgcaaaagaaagagtaacagctattaaaaataggagaagttctggcatatttgccattggaatctctagaaggagaacagagagaattaggcaaaaagaaytattttttttaaaaattatgactaagatttaccccacactgatagtagataatagatttaaagagtctaaaaaaatttcaaggtggataaataaaaatgt

SEQ ID NO: 46652 - DNA, 201 bp, Homo sapiens
  misc_feature (1)...(201): n = A,T,C or G, or insertion/deletion polymorphism (see Tables 1-2)
gtaccttttcttttcttctttgtcgatgaattgttttctgggagaactccacaggaataacaattgacataaacctcggaaatgacaggaactattcaaangtttgtttaaattttgcagatttgttgtcatttaggcttggaatcataagcctcatggacatagaaggtgggacacacatgatgttactgagaaattaag

SEQ ID NO: 46653 - DNA, 201 bp, Homo sapiens
aacagggacaccagatattaacagtgtcagtgagagactgaaaaaaatgaagaaaggaggaagacaggaaggaaacaaggaagaaagaaggaagaagcctrtacttattctgttaatgagataaaaagacaaaatatggaaactgtaatttatagaaagtgatatactacatttactacattttttaaaaggaccaaatag

SEQ ID NO: 46654 - DNA, 201 bp, Homo sapiens
  misc_feature (1)...(201): n = A,T,C or G, or insertion/deletion polymorphism (see Tables 1-2)
atttaggcttggaatcataagcctcatggacatagaaggtgggacacacatgatgttactgagaaattaagatttaatatacttaaaaatattggggcatntactttagttttaatgacaatcttattgtgtataaaaatcatctgtattttctctaagttcaatgtagacagaataagttaatcaccattgcgtctatat

SEQ ID NO: 46655 - DNA, 201 bp, Homo sapiens
tatggtaagattaattcaatataatattcaatatcacaacaaaatcaacagattcctggaggtgcttatgttactattcttttatacagagattgtgaaartaggagaatccttcaaagtttatcatattattgatataaaaagataaaaaactgaaagaattcatgatgtgtggtgctgtgcataggctggtttgcttaa

SEQ ID NO: 46656 - DNA, 201 bp, Homo sapiens
ttttcttccagggtttttatggttttaggtctgacatttaagtccttaatccatcttgaattaaattttgtataaggtgtaaggaagggatccagtttcarctttctacatatggctagccagttttcccagcaccatttattaaataaggaatcctttcctcatttcttgtttttgtcaggtttgtcaaagatcagatag

SEQ ID NO: 46657 - DNA, 201 bp, Homo sapiens
tcccaagtagctggaactacaggcacctgccaccactacgcccggctaattttttgtatttttagtagagatggggtttcactgtgttagccaggatggtmttgatctcctgacctcgtgatccacctgccttggcttcccaaagtgttgggattacaggcgtgagccaccgcacctggcgtatcccagaacttaaagtat

SEQ ID NO: 46658 - DNA, 201 bp, Homo sapiens
cgcaatctctgctcactgcaagctccacctcccgggttcatgccattctccttcctcagcctcccaagtagctggaactacaggcacctgccaccactacrcccggctaattttttgtatttttagtagagatggggtttcactgtgttagccaggatggtattgatctcctgacctcgtgatccacctgccttggcttcc

SEQ ID NO: 46659 - DNA, 201 bp, Homo sapiens
ttttttctgtgagatggtctcgctctgtcacccaggctggagtgcagtggcgcaatctctgctcactgcaagctccacctcccgggttcatgccattctcyttcctcagcctcccaagtagctggaactacaggcacctgccaccactacgcccggctaattttttgtatttttagtagagatggggtttcactgtgttag

SEQ ID NO: 46660 - DNA, 201 bp, Homo sapiens
catcaaacaaccatgtcacaagtatgcctatgtaacaaagctgcatgttctgcacatgtataccagaactttttttttttttttttctgtgagatggtctygctctgtcacccaggctggagtgcagtggcgcaatctctgctcactgcaagctccacctcccgggttcatgccattctccttcctcagcctcccaagtag

SEQ ID NO: 46661 - DNA, 201 bp, Homo sapiens
atgagttgatgggtgcatcaaacaaccatgtcacaagtatgcctatgtaacaaagctgcatgttctgcacatgtataccagaactttttttttttttttttctgtgagatggtctcgctctgtcacccaggctggagtgcagtggcgcaatctctgctcactgcaagctccacctcccgggttcatgccattctccttcct

SEQ ID NO: 46662 - DNA, 201 bp, Homo sapiens
aggagaaatacctgatgtagatgatgagttgatgggtgcatcaaacaaccatgtcacaagtatgcctatgtaacaaagctgcatgttctgcacatgtatamcagaactttttttttttttttttctgtgagatggtctcgctctgtcacccaggctggagtgcagtggcgcaatctctgctcactgcaagctccacctccc

SEQ ID NO: 46663 - DNA, 201 bp, Homo sapiens
catcattctcagcaaactaacaaaggaacagaaaaccaaacaccctatgttctcactaataaatgggaattgaacaatgagaacatatgggcacagggaarggaacatcacataccctgttgggggttgggggcaagggtagggatagcattaggagaaatacctgatgtagatgatgagttgatgggtgcatcaaacaac

SEQ ID NO: 46664 - DNA, 201 bp, Homo sapiens
gcccatcaatgatagactggctcaagaaaatgtggcacatatacaccatagaatactatgcagccataaaaaaggatgagttgctgtcctttgcagggacrtggatgaagctggaaaccatcattctcagcaaactaacaaaggaacagaaaaccaaacaccctatgttctcactaataaatgggaattgaacaatgagaa

SEQ ID NO: 46665 - DNA, 201 bp, Homo sapiens
tgggagtgtaaattagttcaaccattgtggaagacaatgtggcaattcctcagggatctaaaaccagaaatgccatttgacccagcaatcccattagtggrtatatacccaaaggatcataaatcattctactataaaaacacatgtacacatatttttattgcagtactattcacaatagcaaagacttggaaccaaccc

SEQ ID NO: 46666 - DNA, 201 bp, Homo sapiens
aaataccatcatggagaatgtgtatatattggtatattgtgggcaatattattcgtgtttgttggcttagtgatagaacaaaaactctagagctatatttyctgatttacatcctgattctaccattgactgacactataatcttgataaatcacttaatgtttcagagagactcgatttcctcacttacaaaattgggat

SEQ ID NO: 46667 - DNA, 201 bp, Homo sapiens
gacgttactaccttaggtgaaatgagtgaaatcagatgagtgaaatttttatcactgttctggtttaaccatcattacagtattagggccatttaaatgtwatatgttcattacttacaagatttttaaaggagtctgtatgtattatatttaattgataagtatattgagtatctctaaaatattttctttttttctgtt

SEQ ID NO: 46668 - DNA, 201 bp, Homo sapiens
acgttactaccttaggtgaaatgagtgaaatcagatgagtgaaatttttatcactgttctggtttaaccatcattacagtattagggccatttaaatgtamtatgttcattacttacaagatttttaaaggagtctgtatgtattatatttaattgataagtatattgagtatctctaaaatattttctttttttctgttg

SEQ ID NO: 46669 - DNA, 201 bp, Homo sapiens
ctaccaccaaaattaggtgtagggaaccccctttatgtttcagtgactatttgatttgagtgactcagccagaagttgagagaggacacacacgtacacamtcttccgtgggtttcctgctgtaaaggccagctgcgtctcagccagcaaaagcttaatcaacacacaggaggtgatcctaggatgatcaggagccttggc

SEQ ID NO: 46670 - DNA, 201 bp, Homo sapiens
ttacctatataacaaacctgcacaggtactccgacttaaaaggtttaggaaaattatgtttagtttttaaaatttgaattaaaacaattttaaatattcarttgacaaagaaggtatatattaaaggtacacaatgtgatgatttgatatacatgtgcattgtgtaatgattaccccaatcatattaattaacataccaat

SEQ ID NO: 46671 - DNA, 201 bp, Homo sapiens
tcagatgatcactgttggctttaaaaggaagagacgtctagttgacttatttgaaggaaagcttttctgagtggaatcagaccaaagctgaggccttttakgtttcttgtgctttggctaggtatgccgttagcctctgtctctgactgaaagtgctgcagtgaagccacatactcctgttcaaaggggagattaacactt

SEQ ID NO: 46672 - DNA, 201 bp, Homo sapiens
  misc_feature (1)...(201): n = A,T,C or G, or insertion/deletion polymorphism (see Tables 1-2)
tactgttttacaaggttacaacatttaaagatagcattcaagtattcatgaaactaggtataggaggagagagaaacatatgagcaagtgattgccttacntagtgataattcagtaaacatgtacagctatggagaaaggtaaaaggggaacgtgatcaactccatttggggaaagggtcatgaagggctttacattttg

SEQ ID NO: 46673 - DNA, 201 bp, Homo sapiens
caaacctgcacaggtactccgacttaaaaggtttaggaaaattatgtttagtttttaaaatttgaattaaaacaattttaaatattcaattgacaaagaakgtatatattaaaggtacacaatgtgatgatttgatatacatgtgcattgtgtaatgattaccccaatcatattaattaacataccaattaccatctatgt

SEQ ID NO: 46674 - DNA, 201 bp, Homo sapiens
tccgacttaaaaggtttaggaaaattatgtttagtttttaaaatttgaattaaaacaattttaaatattcaattgacaaagaaggtatatattaaaggtayacaatgtgatgatttgatatacatgtgcattgtgtaatgattaccccaatcatattaattaacataccaattaccatctatgttgtacattagatcccca

SEQ ID NO: 46675 - DNA, 201 bp, Homo sapiens
aaaaataaccaaaaagtagaagaacagggacaccagatattaacagtgtcagtgagagactgaaaaaaatgaagaaaggaggaagacaggaaggaaacaakgaagaaagaaggaagaagcctgtacttattctgttaatgagataaaaagacaaaatatggaaactgtaatttatagaaagtgatatactacatttactac

SEQ ID NO: 46676 - DNA, 201 bp, Homo sapiens
catctatgttgtacattagatccccagaacttatttatcttataactgaaagtttgcccccactggtcaacatctccccatttcccacaccctctcatctktggcaactgctgcttcactctgtttttatgatttatgtaaaatcaaaacagtttgattttacatataagtggtatcatattgtatttgtctttctgtgtt

SEQ ID NO: 46677 - DNA, 201 bp, Homo sapiens
tccatacacctggtggccacttttatgcctttttgggaaaatgtctatttggttgcttatgcttttgcttttgtttgttttttatttttgctgtgagttaygtgaattccttgtatattttggatattagccccttatcagatgcctagtttgcaaatatttttctttcataggttgcattttcattttattgctcttttt

SEQ ID NO: 46678 - DNA, 201 bp, Homo sapiens
tttcagagaacttatagaaaattgatatgctagaaataatgatggatattgtttttccccattttgtagcatatgtgccttttcccaatatgcacacatawtaagcacgttgttcaattcaacaaaaaatagagaatgtatgttctttcagatgcttagttctgaattgagcaagtcatgaaagcaatgcttaataagcac

SEQ ID NO: 46679 - DNA, 201 bp, Homo sapiens
attcagttttcccagcaccatttattgaagagactattctttccccattgtgcttttacagaatattagttgactgtatatgtgtgggtttattcctgggytcttaattctattcaaatggtgtttgtgtatgtttttatgctagtactatactgttttgattgctatagctttgtaatgtactttgaaatcaggaagtgt

SEQ ID NO: 46680 - DNA, 201 bp, Homo sapiens
agcttgttatcactgatcattagagaaatgcaaatcaaacccacaatgagataccatttcatgccagttagaatggcaatcattaaaaagtcaggaaacarcagacggtggaaaggatgtggagaaataggaacacttttatactgttggtgggagtgtaaattagttcaaccattgtggaagacaatgtggcaattcctc

SEQ ID NO: 46681 - DNA, 201 bp, Homo sapiens
atatccagaatctataaagaacttaaatgaatttacaagagaaaaacaaccccatcaaaaagtgggcaaaggatatgaacagacacttctcaaaagaagayatttatgcagccaacaaacatgaaaaaaagcttgttatcactgatcattagagaaatgcaaatcaaacccacaatgagataccatttcatgccagttaga

SEQ ID NO: 46682 - DNA, 201 bp, Homo sapiens
taccatcagaggaaacaggcaacctacagaatgggagaaaatttttgcaatctatccatttgacaaagggctaatatccagaatctataaagaacttaaaygaatttacaagagaaaaacaaccccatcaaaaagtgggcaaaggatatgaacagacacttctcaaaagaagacatttatgcagccaacaaacatgaaaaa

SEQ ID NO: 46683 - DNA, 201 bp, Homo sapiens
aggcatgggcaaggacttcatgactaaaacaccaaagcaatggcaacaaaagccaaaattgacaaatgggatctaattaaactaaagagcttctgcacggygaaagaaactaccatcagaggaaacaggcaacctacagaatgggagaaaatttttgcaatctatccatttgacaaagggctaatatccagaatctataaa

SEQ ID NO: 46684 - DNA, 201 bp, Homo sapiens
atgtgcagaaaactgaaactggattccttccttacacctaatacaaacattaactcaagataaattaaagacttaaaggtaagacctaaaaccataaaagycctagaagaaaacctaggcagtaccattcaggacataggcatgggcaaggacttcatgactaaaacaccaaagcaatggcaacaaaagccaaaattgaca

SEQ ID NO: 46685 - DNA, 201 bp, Homo sapiens
atttaataaaagctgttgggaaaactggctagccatgtgcagaaaactgaaactggattccttccttacacctaatacaaacattaactcaagataaattraagacttaaaggtaagacctaaaaccataaaagccctagaagaaaacctaggcagtaccattcaggacataggcatgggcaaggacttcatgactaaaac

SEQ ID NO: 46686 - DNA, 201 bp, Homo sapiens
ggctgcagtaacaaaaacagcatgatactgttaccaaaacagatatatagaccaatggaacagaacagaggcctcagaaataacaccacacatctacagcyatctgatctttgacaaacctgacacaaacaagcaatggggaaaagattccctatttaataaaagctgttgggaaaactggctagccatgtgcagaaaact

SEQ ID NO: 46687 - DNA, 201 bp, Homo sapiens
gctcctttctttctctcaggagtaactcaagggcttgcaatgcgtgaacgagtgctcttaaagtaatagggaaagggtactgaaccaaaaaaaaaaaatasttctacctttaaggtgcagtgatgtgaagttgaaataccactgtggctcagagaagttttatgcaagaaggttctcaaaagatatttctggattgcatgc

SEQ ID NO: 46688 - DNA, 201 bp, Homo sapiens
cttcaaactacactgcaaggctgcagtaacaaaaacagcatgatactgttaccaaaacagatatatagaccaatggaacagaacagaggcctcagaaatarcaccacacatctacagccatctgatctttgacaaacctgacacaaacaagcaatggggaaaagattccctatttaataaaagctgttgggaaaactggct

SEQ ID NO: 46689 - DNA, 201 bp, Homo sapiens
aatatgagaagccttcagaagacaaacatggagtgacaactttgatagagaagcagatcttgatatataaaaggtaatcgactaggaatatatatatatattatatatatatatagagagagagatttatacatacatatccaactggatatataaatctatatatagatctatctatctatctatctatctatctatatc

SEQ ID NO: 46690 - DNA, 201 bp, Homo sapiens
aagttcatatggaaccaaaaaagagcccatatagccaagacaatcctaagcaaaaagaacaaagctggaggcataatgctacctgtcttcaaactacactrcaaggctgcagtaacaaaaacagcatgatactgttaccaaaacagatatatagaccaatggaacagaacagaggcctcagaaataacaccacacatctac

SEQ ID NO: 46691 - DNA, 201 bp, Homo sapiens
atgagaagccttcagaagacaaacatggagtgacaactttgatagagaagcagatcttgatatataaaaggtaatcgactaggaatatatatatatattatatatatatatagagagagagatttatacatacatatccaactggatatataaatctatatatagatctatctatctatctatctatctatctatatctat

SEQ ID NO: 46692 - DNA, 201 bp, Homo sapiens
gaaaaaactactttaaagttcatatggaaccaaaaaagagcccatatagccaagacaatcctaagcaaaaagaacaaagctggaggcataatgctacctgwcttcaaactacactgcaaggctgcagtaacaaaaacagcatgatactgttaccaaaacagatatatagaccaatggaacagaacagaggcctcagaaata

SEQ ID NO: 46693 - DNA, 201 bp, Homo sapiens
aaaaggtaatcgactaggaatatatatatatattatatatatatatagagagagagatttatacatacatatccaactggatatataaatctatatatagatctatctatctatctatctatctatctatatctatatctatatatatatatatatatacatgtatccagtcattggctggaaaggagcagaactgaaact

SEQ ID NO: 46694 - DNA, 201 bp, Homo sapiens
aaaggtaatcgactaggaatatatatatatattatatatatatatagagagagagatttatacatacatatccaactggatatataaatctatatatagatctatctatctatctatctatctatctatatctatatctatatatatatatatatatacatgtatccagtcattggctggaaaggagcagaactgaaacta

SEQ ID NO: 46695 - DNA, 201 bp, Homo sapiens
tctgtttactaaaaaatataaaattaaaataaaaccagggatttttatatatcttcttttgtctctaaaattaatggtttgggattaaattcacgactccyatttaccaaaaactcacattgacaatgcatttacaaatagctaatctcttccagtggattttgcttatttaactcttagagtacaaacttattttaggtt

SEQ ID NO: 46696 - DNA, 201 bp, Homo sapiens
aaggtaatcgactaggaatatatatatatattatatatatatatagagagagagatttatacatacatatccaactggatatataaatctatatatagatctatctatctatctatctatctatctatatctatatctatatatatatatatatatacatgtatccagtcattggctggaaaggagcagaactgaaactac

SEQ ID NO: 46697 - DNA, 201 bp, Homo sapiens
aggtaatcgactaggaatatatatatatattatatatatatatagagagagagatttatacatacatatccaactggatatataaatctatatatagatctatctatctatctatctatctatctatatctatatctatatatatatatatatatacatgtatccagtcattggctggaaaggagcagaactgaaactact

SEQ ID NO: 46698 - DNA, 201 bp, Homo sapiens
tggattgcatgcatcagaattattttaccaaatatctagggacagagcctggtaactgcagcataattagctttgaagagcatttacatgtgcatactaaracttgggaaccactcagagagggtgagatcagtttcatctaagcatggaagaatttttagaagaggtggttaatctagttgttggagaatagggatgacc

SEQ ID NO: 46699 - DNA, 201 bp, Homo sapiens
agaggtcagataaattgcccaaggacacacaagcaaagttaattttgaatggaggttggtccgacttcagaatttgggcacctacccattgtacaacaagwctttaccctgtgctaaacacaggataagacccaatcagttctttcctcaaggaagaaacaaattgacacatcagagataacaataattatgttatgtgtt

SEQ ID NO: 46700 - DNA, 201 bp, Homo sapiens
gatcacctaggatgcatttccttaaaagttgcagaaaaattatggggtaaaaggcaaaacataactcttccttgaataaataatacaaaccagtatattayctttgcaaaaataatgactgttaagagtgtaccacctttagtgtgaatattattaaagtaataaaattgaaaatacctaaaagaaagtaaagctgctcta

SEQ ID NO: 46701 - DNA, 201 bp, Homo sapiens
aataatattatattcattctggtaaacaaagaaagcattttgtctatttgattccaaaataattagttgattaatacttgaatctaaaagagtaataaacrtttggtccataattatcttttttaaaatttaagaatttgaatttttaattactttgtatttttataagtaatatgaaatgaagcctagttattaaaaaat

SEQ ID NO: 46702 - DNA, 201 bp, Homo sapiens
cgagaattttttaaagtttattgtaaacacagtattttggcaatagaaaatacactcggagagtataaaaatatgttatatctttgtttatggaaacaatyagtattttgaaatttaaatcttggcatttaagtagttaccataaaaaagtattcattgcaggttttcaaaaatgtatgcaactaattatatttagtaaaa

SEQ ID NO: 46703 - DNA, 201 bp, Homo sapiens
aatatgatatagaagcaaacacatttagaattcatgttgaagaggaggagctaacaaaggagattggcaagaaataactgggaaagatagaaaaccgagaracggctgtctcagaaactaaggcaagtgtatttaaattgtgcacaatataacttagaagacttaaaaagataacaagaaaatatgttcattgcatctggg

SEQ ID NO: 46704 - DNA, 201 bp, Homo sapiens
actttcaatccccaaatatttatcagaatgtaatgtaacacaatgataagtataagattttatatataaacacacacacatatacttatttacatacttamacacctctacctatataaaatacatatacatatctataatcttatacataagattatatactaggaagatcttataatatcttcacagtgtgtttgtgtg

SEQ ID NO: 46705 - DNA, 201 bp, Homo sapiens
tgcaactaattatatttagtaaaagaatacatttaaaggaaataataagtggaattgttgagaataacttgaatgattctaaaacaggctaagagtttttyattagtttcactttctaattttatctatagttcactttaattgcacagttaagttacttcttaggatttccaccaagtccaaccctcttctacctccaac

SEQ ID NO: 46706 - DNA, 201 bp, Homo sapiens
tcactggagtaaaaatcaaattgttggaggaatgcattattttctggagtctctagggaagagtccattatttttgccttttccagtttctagaggtcacyctcattccttggctcatggccctctgcctccatcttctaagccagcaacgtcatgtttctctgaccctgcttccaacctcacatctctttctctgaccac

SEQ ID NO: 46707 - DNA, 201 bp, Homo sapiens
ttgttgggacagtctttcagaaaataaacatataaggaaacatataaagaaaggcagattggcagagaagccaacttacaatggaaatcttagctgtcctrtggggagtgttggagctgggatggcctttcagaattgtctcatattgaaacgggggaatggacccttagaattcctgcaactgtcaatcattgatggcat

SEQ ID NO: 46708 - DNA, 201 bp, Homo sapiens
ttgctatctaaaacctgtagagaatattaatcttttcaataaattgggcagccaaatcaagattacaatgtcaaataaaatatggcatgaaccttcttttrgcatcaggtccaagtagagaccatcttaacttcttaacatgtagcttcctcgtgccattctcttaagagagagagaaaataaaatcttctcattaaaact

SEQ ID NO: 46709 - DNA, 201 bp, Homo sapiens
tgatcatcagagacgattataaatattgatatactcacacactagaaaacctagaagaaatggagaaattcctggaaacataccacctgccaagattgaascaggaaagaatagaaaacctaaacagaccaataattagtagcaatattgaattagtaataaaaaaactcccccaaaagaaaagcccaggaccagatggat

SEQ ID NO: 46710 - DNA, 201 bp, Homo sapiens
ggtcaggctggtctcgaactcccaacctcaggtgaaccgcctgtctcagcctcccaaagtgctgggattatgggcgtgagccactgcgcctggcctagaartaccaaaatatttactttgaatatgcttatatgtctcacataagatttagcaagaagcaattaaaatgcctgaaaaccatttaatggtacaaaaaccatg

SEQ ID NO: 46711 - DNA, 201 bp, Homo sapiens
cttttagattttaaaagtcaggcttctctatgtgctcaaatgaatctgacttactttataagaagaagggcttggcattctgatggagtcctggaaatagrttcttggagacacagctatgtattggtcttcctacatttgtctctgtgattgtggattatgatgcaggtggactttgctcctttcccctgtgctatgcag

SEQ ID NO: 46712 - DNA, 201 bp, Homo sapiens
gaggggcaaaatacaacctatgagcagatgttagaagaatgcaaattttatctcaatatagagaagagttttttaacagagctatcctgacaggaattggrctttattgagaacacaggatttggagtttctcaacactgcagacatttaacacaaggagagtgactagttgaccaaggtattttgtggggggcacaaaca

SEQ ID NO: 46713 - DNA, 201 bp, Homo sapiens
gctctcaccaagtagtatccaataacctgacagggctaaaacagcttccagagatacctaatttattttcagtgatgtggttgggtataaagagataatayttttataagttgttactgaaaatctgtaatttctaaaagagatatatattgagtgtgttgataagtagggaagaaagtcaagattgccctagagaagcat

SEQ ID NO: 46714 - DNA, 201 bp, Homo sapiens
gaaaattctgtgtcaactgaatgggaaaagggagaggcatgacctgctaaaagataattgaatattacatgcagaagtcaggatctgaataagagatgtasgaataagaatttttaagatgggacaaattgcaaatagacaatataaattgatcagaaactgaaaacaaattagatgattgtgatgatggaggtgaaaggg

SEQ ID NO: 46715 - DNA, 201 bp, Homo sapiens
ggcagattgctcaggatcaagttagtgaataatgaaaggccattagaagttagtatccaataacagtgatattacagggatcatgagctatgtttgaaggygtgtaaagagcccatgcaggttgttatgtttttttgttgttgttgttttatggagatagacagggtcttgatctgttgcccaggctcaagtgcagttggg

SEQ ID NO: 46716 - DNA, 201 bp, Homo sapiens
ttaaaaaattcaagactgtggtagcagagcatgaaaacccaagcctgggacccctgtctaaaattgggatcctatgtgcagtagcaggtccctgaagctgsccctgtgtataataaacacatatcacatcaaaataatggtgattttatggttttcttaaactgagcaaattggactgaactaatgaatattgtaattaag

SEQ ID NO: 46717 - DNA, 201 bp, Homo sapiens
tatttatggatcattggctcatgggaatgctagtctagagatttaaaaagtgtgattttctgattcttgtttggatactggattttaagtgagatggtacwgcggggtggaactccggagtttagcaaagttgcaaatctaatggaaagtgacagataattgaggctgcagaatttttgaaggtgaacaggactgttagcc

SEQ ID NO: 46718 - DNA, 201 bp, Homo sapiens
gataagcatgaaaactgaaagtgattaattcatcaaaacctgtgagtcttttaggtgaaggggacttcagagattggcttaaattttgcaaatctgttgcrtccagccagagcagttccgcaatgagaaatgaatgcagcttatgtttgtctcaggctcagtccacacaaccatatgactcctctgagtctaaataaattc

SEQ ID NO: 46719 - DNA, 201 bp, Homo sapiens
atagtgtttatttatggatcattggctcatgggaatgctagtctagagatttaaaaagtgtgattttctgattcttgtttggatactggattttaagtgasatggtacagcggggtggaactccggagtttagcaaagttgcaaatctaatggaaagtgacagataattgaggctgcagaatttttgaaggtgaacaggac

SEQ ID NO: 46720 - DNA, 201 bp, Homo sapiens
cattatatcaatactagtcttccctagtctctttggtggaatcattatcaatcctttcatttcgaatccattatagacagcatccctcatacactttaagytctgtgcaggcagatcacatgtctgttttgtttagttttatcccaagcctcaggcacaatgcatagaatttagaaaaagctgaattgtatttttggatga

SEQ ID NO: 46721 - DNA, 201 bp, Homo sapiens
aatcaatatcttgaaaatggccatactgcccagggtaatttatagattcaatgctattcccattaagcaaccattgacttttttcacagaattagaaaaaactactttaaagttcatatggaaccaaaaaagagcccatatagccaagacaatcctaagcaaaaagaacaaagctggaggcataatgctacctgtcttcaa

SEQ ID NO: 46722 - DNA, 201 bp, Homo sapiens
gtttgcatgtttctattttttttggaatagaagggattaagatttaagaagagaagttggcaacccaaactggcctgaagagaaattatgcgctttgtaaygaaaacttgaaaatagtgtttatttatggatcattggctcatgggaatgctagtctagagatttaaaaagtgtgattttctgattcttgtttggatactg

SEQ ID NO: 46723 - DNA, 201 bp, Homo sapiens
tattcaagtaggaggagaggaggtcaaattgtctctgtttgcagatgacatgattgtatatctagaaaaccctgtcatctcagccccaaaatctccttagrctgataagcaacttcagcagagtctcaggatacaaaatcaatttgcaaaaatctcaagcattcctatacacctataatagacaaacagagagccaaatca

SEQ ID NO: 46724 - DNA, 201 bp, Homo sapiens
acaggcaaggatgccctctctcactactcctattcaacatagtattggaagttctggccagggcaatcaggcaagagaaagaaataaagtatattcaagtrggaggagaggaggtcaaattgtctctgtttgcagatgacatgattgtatatctagaaaaccctgtcatctcagccccaaaatctccttagactgataagc

SEQ ID NO: 46725 - DNA, 201 bp, Homo sapiens
agcattccctttgaaaaccagcacaggcaaggatgccctctctcactactcctattcaacatagtattggaagttctggccagggcaatcaggcaagagawagaaataaagtatattcaagtaggaggagaggaggtcaaattgtctctgtttgcagatgacatgattgtatatctagaaaaccctgtcatctcagcccca

SEQ ID NO: 46726 - DNA, 201 bp, Homo sapiens
aactcacagccaatattatactgaatgggtaaaagctggaagcattccctttgaaaaccagcacaggcaaggatgccctctctcactactcctattcaacrtagtattggaagttctggccagggcaatcaggcaagagaaagaaataaagtatattcaagtaggaggagaggaggtcaaattgtctctgtttgcagatga

SEQ ID NO: 46727 - DNA, 201 bp, Homo sapiens
atgcaaaaaaggcctttgataaaattcaacaccccttcatgctaaaaactctcaataaattaggtattgatggaacatatctcaaaataataagagctatwtatgacaaactcacagccaatattatactgaatgggtaaaagctggaagcattccctttgaaaaccagcacaggcaaggatgccctctctcactactcct

SEQ ID NO: 46728 - DNA, 201 bp, Homo sapiens
aaaagcccaggaccagacagattcacagccaaattctatcagaggtacaaagaagagctggttccattccttctgaaactatttcaaacaatagaaaagawattatcataaaataactcattttatgaggccagcatcatcctgataccaaaacctggcagaaacacaacaaaaaaaagaaaatttcaggccaatatccgt

SEQ ID NO: 46729 - DNA, 201 bp, Homo sapiens
atcgattttgcattataactcagtttctccagaaaaactagttaatatctttttctctcttcttcccttctctgaatctttttcttgtgtatgtagatatyaggggaggaaactgttgatagtgtatcatttcttgcttgatggattatagcataaactctcttccccttaaggctttgctgttgatgtattcaaagtccc

SEQ ID NO: 46730 - DNA, 201 bp, Homo sapiens
tgaataaataatacaaaccagtatattatctttgcaaaaataatgactgttaagagtgtaccacctttagtgtgaatattattaaagtaataaaattgaaratacctaaaagaaagtaaagctgctctaagcaccaacatgcttaaaactatttattcaaagatatgccaaagtgacatccctatcctcatgaaattgtat

SEQ ID NO: 46731 - DNA, 201 bp, Homo sapiens
taagttttatttggaagttagaatattggcatatacttatattgtacattatagtttctgagtgcctttttatgcatttcatttttagatgctcgaaacartgtagagacataagcagataaggtgatggtatttccattttgtatattatttaaatgtccctttactgcactgtatgtgaccaggaggtcacattaatat

SEQ ID NO: 46732 - DNA, 201 bp, Homo sapiens
tgaaattgaggcagtaattaatagcttaccaaccaaaaaaaagcccaggaccagacagattcacagccaaattctatcagaggtacaaagaagagctggtwccattccttctgaaactatttcaaacaatagaaaagaaattatcataaaataactcattttatgaggccagcatcatcctgataccaaaacctggcagaa

SEQ ID NO: 46733 - DNA, 201 bp, Homo sapiens
tcctgacaaacaaattctgtaagtacatagataagcaacaattaactcacacactaatgcattctatttgctttttagtttcatgtatgttgggtaaatgsgaaagaaaaattactgtattcttgtttttatttgttgaacatttatgtagttgcctatgtaatgtgtttttaatttatagctatggagccaggtatgcaa

SEQ ID NO: 46734 - DNA, 201 bp, Homo sapiens
ccactgggattatagagtatgcattatatttagaagaaaatctcacttatccaaattcgcgtgcacacatacacacacacacacacacacacacacacacatatatatatatatatatatctcccagcaactccacctgcaaatgatcttactcagctgattccactaactattcatagatgacttggttgatctagggac

SEQ ID NO: 46735 - DNA, 201 bp, Homo sapiens
gtgcccacaggagaaagcaggaaagatctaaatttgacgccctaacatcacaatgaaaagaactagagaagcaatagcaaacaaattcaaaagctaacagragacaagaaataactaagatcagagcagaactgaaggagatagagacacaaaaaacctttcaaaaaatcaatgaatccaggagctggttttttgaaaaca

SEQ ID NO: 46736 - DNA, 201 bp, Homo sapiens
atgtgtcatatacctctagggggttattttaaacagtactgggatttgcttttctgtgtccaaaagcacagattttatatttggacactcaagttgttctrtattttgaactatgagaaaggaataatacccgattgaatactgactgtttttttataagacaatcgagcaacagaggcattcaacattagcatccagtgt

SEQ ID NO: 46737 - DNA, 201 bp, Homo sapiens
cactgggattatagagtatgcattatatttagaagaaaatctcacttatccaaattcgcgtgcacacatacacacacacacacacacacacacacacacatatatatatatatatatatctcccagcaactccacctgcaaatgatcttactcagctgattccactaactattcatagatgacttggttgatctagggaca

SEQ ID NO: 46738 - DNA, 201 bp, Homo sapiens
tgaaaccaataagaacaaagacacaacataccagaatctctgggacacagctaaagcagtgtttagagggaaatttatagcactaagtgcccacaggagamagcaggaaagatctaaatttgacgccctaacatcacaatgaaaagaactagagaagcaatagcaaacaaattcaaaagctaacaggagacaagaaataac

SEQ ID NO: 46739 - DNA, 201 bp, Homo sapiens
taccaagattgaatgctgaagaaatccaaaacctgaatagacaaataacaagtattgagatattaacagaagtctcccataaaagaaatggctaaaagctratggcttcactgttgggttctaccaaacaatttaaaaataaataatgtcaatcctactgaaattatttctaaaatgtgaggaggagggagtacttcctaa

SEQ ID NO: 46740 - DNA, 201 bp, Homo sapiens
aaaaaaaatctgataacattcaacatcccttcatggtaaaaaccctcaacaagtatgtatttgtcctcaaaatgaaaaatatctcaataagataaacgctrtatataacaaacccacagctagcatcacactgaatggggaaaacctgaaagcctctcctttaacagctgaaataagacaaggattcccactttcaccact

SEQ ID NO: 46741 - DNA, 201 bp, Homo sapiens
aagacaaggattcccactttcaccacttttattgaacataatactagaagtcctagccagagcaattagacaagagaaagaaataaaagtcattcaaattraaaagaaatgagtcaaattatccttgcttgcagatgatatgattttatatcttttttttttttttttttttttgagatggagtctcgctctgtcgcccag

SEQ ID NO: 46742 - DNA, 201 bp, Homo sapiens
ttctgtatttttagtagagatggggtttcaccatgttagtcaggctggtctcaaactcctgacctcatgatctgcctgcctcggcctcccgaagtgctggkattacaggcgtaagccatcacgcccggccgattttttatcttaaaaaaactaaagactatcccaaaagttactggatctgataaattcagtaaagtttca

SEQ ID NO: 46743 - DNA, 201 bp, Homo sapiens
atgggcaaaataaataagagcctgtacaaggagatggggctctgaaggttattttaaaactttcaagcaatgttttcaaccacataccataatgctttccmcctttttcatattttgctttgtcttttgtccatatagttgctggcatgcacttatttaataaatatccgactctataaaataaaaggagaatccattagt

SEQ ID NO: 46744 - DNA, 201 bp, Homo sapiens
gcaaccaaagaaaataaatggacaaatgggatcacatcaaagtaaaaagcttcttctgcacagcaaaggaaatcatcaacaaagtgaaaagccaacccacrggatggaaaaaaatatttgccaatgacccatctgacaagagattaatagccagaatttataagcagcttgaacaactcaataggaaaagaacaatccaat

SEQ ID NO: 46745 - DNA, 201 bp, Homo sapiens
gaatcctgggaatacatatcagttagctgggggagtccacaggggtcatgggtagagatcctagtggagaccatcatgaaccagccagtgggatttatggycagttgttgagatattcatacaggctgccacggcccctacccccttaccctgttcctagtgtccccaagattatttcattttgctaatccccttagtatt

SEQ ID NO: 46746 - DNA, 201 bp, Homo sapiens
aaaacaccatagaaataaatcaccatgcattcctttactgtttgtgttactgacattaaatcacactaatttgataatataaattataaaatttcttttctttttttaaattttttttaattttttgagacagagtcttgcactgtcacccaggctggagtacagtggagtgatctcagctcactacaacctccacctcct

SEQ ID NO: 46747 - DNA, 201 bp, Homo sapiens
ttgccagtttacctcccatttcctcttaaactcatgccacttcttttgtcttcttctttttctttttctgtttctttcatatatatttttacatatatatwtttttttcctgtcttgctctgttgcccagagtggagttcagtggtgatctgagctgcaacctgtacctcccaagttcaagtgattctcctgcctcagcct

SEQ ID NO: 46748 - DNA, 201 bp, Homo sapiens
gattaaacagctgccattatttctgttaatatgacaacatctcaacttgtatgccatttcttaagactgtatattccactcttgaaaattgtaaaaaggartaggtgcttttatcactgatgagttaaacccagtcaaatatgtgcactggttttctaacccaagggaggggaagctccttgatgttgatgcacaatgata

SEQ ID NO: 46749 - DNA, 201 bp, Homo sapiens
tttagaattttctacctttttaaagtctttgtgggattcagcaacttagagatcttctccaagccacctctcaatagaaatttctactgataagagagtaygtaagagtttatatagagtacaagtaaccctcatttggctcatgccaattatctgtgtgacttcatacgtattaggtgtctaagtatttattctcgaaag

SEQ ID NO: 46750 - DNA, 201 bp, Homo sapiens
ttcatggggtaggggcaggtactgattaacccaaaccaactcccttattgggcatggatatatattgccacaatcaaagtgaaatagaagaatttcattakctagctagggaacttcccacccctttcatccctctttcttttttctgcttcccctctcctctatttatccccatcttctccttgatccccctctctctgg

SEQ ID NO: 46751 - DNA, 201 bp, Homo sapiens
tctttctcatctgccttccaaatcttttgcaagtgtacctcattagcagaatcaaatttggaaccatgctggtaagaaattctgggagtgtagcttccagrcaatgcagggaaaagtgtataagggggcagagatgatgcagaattgatgagacaattcagaacatttgcaaagaagaatgttaggtaaatattgaggtca

SEQ ID NO: 46752 - DNA, 201 bp, Homo sapiens
acaatgaatgtacttaatttttaaagtttatcacctgcatacttaagagataatgctaaagcatgagtcatcgctgacatttagcaccactaattttaaamctatgcagattattgctttgaggaatagcactgctggcatgtacagaagagaagacatttttagtaagtgattttccttataggagcttatatgctataa

SEQ ID NO: 46753 - DNA, 201 bp, Homo sapiens
gcatttctgtctttagagaggaaaactgtagtaaaaaaactgttacacttacaggaagctcaaagtaatcatggaaaattatatttcctaagtgttttgtrctttaatactcagattacagcttgtttgaggtagcaacatttaaagaggggaaaaaaaaacaacctttgtttagatcccttttcaatatgttttcttttc

SEQ ID NO: 46754 - DNA, 201 bp, Homo sapiens
tcagcttctctgagtcttggtagttattaatatgccaggtatcatagaggaagcaaggtgataactctctcaaagctctgttatttttcactattctgctrttccccaaaccgttaatttttagccttagttttttttattgattgaatagaattaatgaatttttatttcaagtgtattaaaataaaatttcattgagtc

SEQ ID NO: 46755 - DNA, 201 bp, Homo sapiens
tgagtcttggtagttattaatatgccaggtatcatagaggaagcaaggtgataactctctcaaagctctgttatttttcactattctgctattccccaaaycgttaatttttagccttagttttttttattgattgaatagaattaatgaatttttatttcaagtgtattaaaataaaatttcattgagtcactaaggaag

SEQ ID NO: 46756 - DNA, 201 bp, Homo sapiens
tatatatttctaagatatttctgctgattttgttatatctctatgactggttagacctagttcatcttctctgatgtataacataattaaggaattttttyataaatggggcagagcaacgaggccctgtgaaaaaggaatgatcttcaggaaatcaattatttttacatggtgatctttctgtaattggtgaaaatagaa

SEQ ID NO: 46757 - DNA, 201 bp, Homo sapiens
aatccactgtgtagagacttgacgtaaagagtcatataaagaatgcaggggcattcacgtgctatagcttggagctaaattaaattacaggtaggaaaaakctttcagaggtgagtgtaatgcttactaactgtttgcaagctttcataaaacagttccagagttagagctgtaggagaaataccttcttattgagagtgg

SEQ ID NO: 46758 - DNA, 201 bp, Homo sapiens
ccggcctctggtaaccgccattctacctccatgagatccacagttttagtgaataagaacatgcaatatttgtctttctgtgcctagcttattttacttarcatagtgacctccagttcaatctgtattgctgcaaaagacaggatttcatttttttgtggctgaataatattccattgtatgtgtgcatgtatatacaca

SEQ ID NO: 46759 - DNA, 201 bp, Homo sapiens
taaactgagcttgagtagatcttgaggaagcttagggcagtttacctgatttcattctgcatcaacagaacaggtaagtgttgtttaggtcaacatttctyaaaaaatgggatctgtatccatgaacctcctgcttatttaaaaatgtggatcactagttcctaatggaggagtcagacatcttacagaaatctatctcta

SEQ ID NO: 46760 - DNA, 201 bp, Homo sapiens
ttttaaaaactcaagcccagtgagagctggaatgttttctcttttgcagattttcctgttgtctttcaataatcaattttctattttgatttgattgtgcrcagagaacacactctttgtgactaatttttttttacatatattgaggctattttatggcccaggatatggtctatcttaatatagtttaatgggcactta

SEQ ID NO: 46761 - DNA, 201 bp, Homo sapiens
tctcagaccacagtgcaatcaaattagaactcaggattaagaaactcactcaaaaccgcacaactacatggaaactgaacaacctgctcctgaatgactaytgggtaaataaattaaggcagaaataaataagttctttgaaaccaataagaacaaagacacaacataccagaatctctgggacacagctaaagcagtgtt

SEQ ID NO: 46762 - DNA, 201 bp, Homo sapiens
gagcagacctaatagacatctaccaaactctccacctcaaatcaacagaatatacattcttctcagcaccaaatcatacttattctaaaattgaccacatmattgaaagtaaaacactcctcagcaaatgcaaataaatggaaataataacaaacagtatctcagaccacagtgcaatcaaattagaactcaggattaaga

SEQ ID NO: 46763 - DNA, 201 bp, Homo sapiens
ctccccatgctgaaacccaagtgaaaaatgacacagtatcttggactaggaccttgtcagtgtataagaaaaggtttgacaggtttgtgatctgtgtggcrcacacactaggcctggctgatggattcaatgtggggtgtgtatggagggaggtgaaaaataaatattaatatgacacaaatattccacctgagcaaatga

SEQ ID NO: 46764 - DNA, 201 bp, Homo sapiens
cccactgtcatattagacagataaacgagacagaaaattaacaaggatattcaggatgtgaactcagctcaggtccgagcagacctaatagacatctaccraactctccacctcaaatcaacagaatatacattcttctcagcaccaaatcatacttattctaaaattgaccacataattgaaagtaaaacactcctcagc

SEQ ID NO: 46765 - DNA, 201 bp, Homo sapiens
gaaatcaagttgtatatgtgagtttgaatttaagaggagaggtgtggactcgagatttaaaatttggagtttcagcttagagatgatatttaaagttatgrcagcatttgagatcatctagagagaaagtttaggataaggtaagaagagggctctgaaaccagtctcatgaatgtaataagaaatctacatggtatggtc

SEQ ID NO: 46766 - DNA, 201 bp, Homo sapiens
ccccactgtcatattagacagataaacgagacagaaaattaacaaggatattcaggatgtgaactcagctcaggtccgagcagacctaatagacatctacyaaactctccacctcaaatcaacagaatatacattcttctcagcaccaaatcatacttattctaaaattgaccacataattgaaagtaaaacactcctcag

SEQ ID NO: 46767 - DNA, 201 bp, Homo sapiens
aagataatccttgagaagagcaaccccaagacacataattgtcagattcaccaaggttgaaatgaaggaaaaaatgttaagagcagccagagagaaacgtsgggttacccataaagagaagcacatcagactaacaggggatctcttggcagaaaccctacaagccagaagagggtgggggctgatattcaacattcttaa

SEQ ID NO: 46768 - DNA, 201 bp, Homo sapiens
gaacaaaattagacagagaatgagtttgatgaattgacagaagtaggcttcggaaggtgggtaataacaaactcctctgagcaaaagaagcatgttctaascaaatgcaaggaagctaagaaccttgataaaagattcccctaggtctccctaggaactgctaactggaataagcagtttagagaagaacataaatgacct

SEQ ID NO: 46769 - DNA, 201 bp, Homo sapiens
aaaaaccagaatgtctcttccaaaggatcacaactcctcgccagcaagggaacaaaattagacagagaatgagtttgatgaattgacagaagtaggcttcrgaaggtgggtaataacaaactcctctgagcaaaagaagcatgttctaaccaaatgcaaggaagctaagaaccttgataaaagattcccctaggtctccct

SEQ ID NO: 46770 - DNA, 201 bp, Homo sapiens
cataccttgtgtttgcttttaacctcatggactcctcctttgtcatacctgtggaaaattcaagtttttagttatggtttccttgaagcaattacaaatgrtgctgaagagaatttgtctcatagagagggatctgttctgacaatttttgtgcacctctgagcaaaatataagagaaaaatgaatttcagcaaaagaatg

SEQ ID NO: 46771 - DNA, 201 bp, Homo sapiens
ctcttgctaaaggaaaaaaaaaaaatgcatgaggatgtcaagtattttaaaatgactctaatgtgttgtgcatggataatcgagaaaaatattggtgctatttttttttttactgaaatgtgaattaaaggaaaaagataattctgaggatgatagagagttcaaaatcagatattttggatttcagaaaaaaatgagcat

SEQ ID NO: 46772 - DNA, 201 bp, Homo sapiens
ggagagctctggctggcatctggcaggtgcccctctggaataaagcttccagaggaaggagcaggcagcactctttgctgttctgcagcctccactggtgrtacgtaggcaaacggtctggagtggacctccagcaaactccagcagacctgcagaagaggggcctgactgttagaaggaaaactaacaaacagaaagcaa

SEQ ID NO: 46773 - DNA, 201 bp, Homo sapiens
aatcttctagaaagctttgtggcaggttcatggagaaacttcatggaaaggtaaataataagtacagactttttggaaatctgaggtaagatgaaccacaytgaattcctgaaaacatggtaccttttaagccatatctttttgccttgtatttttttattagtctttgtaatttgttgtccaattccatgtagttttata

SEQ ID NO: 46774 - DNA, 201 bp, Homo sapiens
atgccattctcctgcttcagcctcccgagtagctgggactacaggcacccaccagcacgcctggctaatttttttgtatttttagtagagatggggtttcrccgtgttagccaggatggtcttgatctcctgacctcgtgatccgcccgtctcagcctcccaaagtgctgggattataggcgtgagccaccgcgctgagcc

SEQ ID NO: 46775 - DNA, 201 bp, Homo sapiens
cttgagctctgctaagggacagactgcctcctcaagtgggtccctgaacccggtgcctcctgactaggaaacacctcccagcaggggtcaacagacatctyatacaggagagctctggctggcatctggcaggtgcccctctggaataaagcttccagaggaaggagcaggcagcactctttgctgttctgcagcctccac

SEQ ID NO: 46776 - DNA, 201 bp, Homo sapiens
tgtgtgttctatgcgttactgtctttcatcatgtttgagtcctggcaagaatttcttctaaatacaataccatagatacattacactgatcccatgcaatygttgtaactgctgggcatatgactgctattcatgccaattttcactttccaagtttctgtatgagacaaaaaatttgttcttgagcacataattaggaaa

SEQ ID NO: 46777 - DNA, 201 bp, Homo sapiens
tgtggcaattgtgaatgagattgccttgctgatttgggtctcggtttggctattgtgggtgtataggaatgctagcgatttttgtacattgattttatatmctgcaactttgccgaaggtatcagctggaggagattttgggctgacactttggggttttctagatatagaatcatgtagtctacaaatagaaatagtttg

SEQ ID NO: 46778 - DNA, 201 bp, Homo sapiens
gggcagctgtgagcacagcttcaccagacttaaacgtttctgtctactggctctgaagacagcagtggatctcccagcacagagcttgagctctgctaagrgacagactgcctcctcaagtgggtccctgaacccggtgcctcctgactaggaaacacctcccagcaggggtcaacagacatctcatacaggagagctctg

SEQ ID NO: 46779 - DNA, 201 bp, Homo sapiens
gtgggtgtataggaatgctagcgatttttgtacattgattttatatactgcaactttgccgaaggtatcagctggaggagattttgggctgacactttggkgttttctagatatagaatcatgtagtctacaaatagaaatagtttgacttcctctcttcctatttgggtgccctttatttgtctctcttgccagatagct

SEQ ID NO: 46780 - DNA, 201 bp, Homo sapiens
cttgaacctgggaggggaggttgcagtgagccaatatcgcaccactgcactctagcttgggtgacatagtgagactccatctcaaacacagacacacacamacacacacacacacacacacacacacacacacacacacagcatagtcctattacatttttaggcacaccctaattaactaacatcttgatgtcccttgag

SEQ ID NO: 46781 - DNA, 201 bp, Homo sapiens
cagtggaattgctaatttggggttcaatgtgcatccattatttcaaagcgttcaatatttaagacaatcttccaatatacttccaagtcacatttttgtactttctttttcgtgtttttcccccacatgtccttttcttagcattgccattaaatcatttatctttttgtaactactctgagatttctcttctctctctct

SEQ ID NO: 46782 - DNA, 201 bp, Homo sapiens
agtggaattgctaatttggggttcaatgtgcatccattatttcaaagcgttcaatatttaagacaatcttccaatatacttccaagtcacatttttgtactttctttttcgtgtttttcccccacatgtccttttcttagcattgccattaaatcatttatctttttgtaactactctgagatttctcttctctctctctc

SEQ ID NO: 46783 - DNA, 201 bp, Homo sapiens
gtggaattgctaatttggggttcaatgtgcatccattatttcaaagcgttcaatatttaagacaatcttccaatatacttccaagtcacatttttgtactttctttttcgtgtttttcccccacatgtccttttcttagcattgccattaaatcatttatctttttgtaactactctgagatttctcttctctctctctct

SEQ ID NO: 46784 - DNA, 201 bp, Homo sapiens
tggaattgctaatttggggttcaatgtgcatccattatttcaaagcgttcaatatttaagacaatcttccaatatacttccaagtcacatttttgtactttctttttcgtgtttttcccccacatgtccttttcttagcattgccattaaatcatttatctttttgtaactactctgagatttctcttctctctctctctt

SEQ ID NO: 46785 - DNA, 201 bp, Homo sapiens
ggcgccagtgtctgttgtgcccctctataagtccatgtgttctcctcatttaacttccacttgtaagtgagaacatgctggatttggctttctgtttctgmatgagtttgctaaggataatggcctctagccccatccatgttcttgcaaaggaaattatctcattctttttatggctgcatagtattccatggtgtatat

SEQ ID NO: 46786 - DNA, 201 bp, Homo sapiens
atatttattgtcatgatctaggacactagtgataatcatccctgattcctctctttgccactcccccatcagtcaccaaatcctgggcatttgaatatgtrcaactcgtgtctttcttcatttctccaagtcctatcactgttccattttgggacttcattatctcttggagagaatactgaaacattcatttaatgcctg

SEQ ID NO: 46787 - DNA, 201 bp, Homo sapiens
ataatcatccctgattcctctctttgccactcccccatcagtcaccaaatcctgggcatttgaatatgtgcaactcgtgtctttcttcatttctccaagtmctatcactgttccattttgggacttcattatctcttggagagaatactgaaacattcatttaatgcctgcaggctctactcttagttaccagtcctccac

SEQ ID NO: 46788 - DNA, 201 bp, Homo sapiens
ttgtcccttcctcaccttttatgtccttcaaggaaaaggcacttttggtaactttgtcaggatatgatagcataagtaggttactgagaatgaaagagtcmgtgcttttcaagtcccctcaaaatcagaaagagaagacctcagcattcacatgtgactcacttgtcgactcacttaacaaatgatctagcactccttatt

SEQ ID NO: 46789 - DNA, 201 bp, Homo sapiens
ttgaaacatttactgcttttaagcataaagaaatgaaatgttagatgcaaatagatcggtggtatatgtgtgctaaaggtacaatttgggtgacagctacrgaagggaatttaataatgccttttactattttgaaagccagaataaaaagtaaaagaaaccctttagaataaattttgaaaggttaagttcagagctact

SEQ ID NO: 46790 - DNA, 201 bp, Homo sapiens
atatttatttatttcctacatacagcatatgtcttaagtatattcaaggtaattcatttcagacaaattaaaagtagatattgaagtaccttatatgtgakgtttgcaaatcaaaattccatggaatttccaaatacacatttaagcattaataagtttagcttattaaagagagattgcttgatattccaagtttaataa

SEQ ID NO: 46791 - DNA, 201 bp, Homo sapiens
aaactggtgtcccacgagaaaactcaaacagatggggagaatgtggaaaccccatactgacagtggctctggctggcagtagatttttttttctcatcaaygtgtgtgtgtatatgtgtgtgtgtgtgtgtatactattgaggaaacagtgtcatgaagttaagtgattttcaatatagaaatcattttatagataatcta

SEQ ID NO: 46792 - DNA, 201 bp, Homo sapiens
ctcagcggatcccacccccatggagcccaacaagctccatggcttgaaattctcgctgtcagcacaggagtctgaagttgacctgggatgctccagcttgstgtgggtgagaggcatccaccattactgaggcttgagtaggcagttttcccctcacagtgtaaacaaagccacctggaagttcaaactgggtggggccca

SEQ ID NO: 46793 - DNA, 201 bp, Homo sapiens
aacatttactgcttttaagcataaagaaatgaaatgttagatgcaaatagatcggtggtatatgtgtgctaaaggtacaatttgggtgacagctacagaarggaatttaataatgccttttactattttgaaagccagaataaaaagtaaaagaaaccctttagaataaattttgaaaggttaagttcagagctacttaat

SEQ ID NO: 46794 - DNA, 201 bp, Homo sapiens
agaaaatataaatttataatctcattatacaaatacaaatagtactatttgatatattgtactttatgaagtatttctttataagtattttatcttataawgttataattagattacaaccattatattaaaaatgtgtatcatgaggaatagaagatggctgaataggaacagctccggtcttcagctcccagggagatc

SEQ ID NO: 46795 - DNA, 201 bp, Homo sapiens
atacccctcactcctcttgcttcattcttcctcttcaaataccattattaattcattttctgctatataagtctactgtagactttggccacaagtggttscctaaaaggcttcagttttttccagagtcaaaatcttttcacctccaaatttcaatagtatcacctcttttaaggcgcagaaggtacagaataaacctca

SEQ ID NO: 46796 - DNA, 201 bp, Homo sapiens
catgctaacctatcagcttttttaatgtgtgttcttcatagggtcattgttgtgatgatgtaaatagtatcctttttttaagaaaaagattagaaaatatmaatttataatctcattatacaaatacaaatagtactatttgatatattgtactttatgaagtatttctttataagtattttatcttataaagttataatt

SEQ ID NO: 46797 - DNA, 201 bp, Homo sapiens
aaaattgtgagcacatttggggaatgaatgagtctgtgttgattttttcctcttacaaatttaatatctcagaaaactttgcttttaaaaagaagtttttktgtgtgtgtgtgtgaaggacatcacagctggttttagtgctgtttactttccttgttttatttatggaagtaggagggaattacttaggggtagtaattt

SEQ ID NO: 46798 - DNA, 201 bp, Homo sapiens
cagattttattttgtcagcatttaaaacttgatatgaagaagataacataaacattaagtgaaaagataagctgcagacacagagaaaataccatgcatayagcacatatggtgtttaaagtgtttcaggttttatatacaaaatattacaaatcaataaaaaaatttcactagaaaagtaggcaaatctgaaatagaaaa

SEQ ID NO: 46799 - DNA, 201 bp, Homo sapiens
tagtgaagtggttaaaagcatataatctggagtcagatgggtagtgtatagttacaaaagtcactaaagattggtcattttgatcatcgtaagagcttgargccctaaggaaaatttgacagattttattttgtcagcatttaaaacttgatatgaagaagataacataaacattaagtgaaaagataagctgcagacaca

SEQ ID NO: 46800 - DNA, 201 bp, Homo sapiens
tagcacttattgtgtgccaggccctaatctaatctctttaattatatttactcaactgataaacaagaaactgtacacaggaaagttgagtaactcatttmatgtcgtagagctagtcagatgagggtgccccaggatttaaacctacataatctggctccagatttgatgcttttaactactaccctattctcaagtttc

SEQ ID NO: 46801 - DNA, 201 bp, Homo sapiens
tcaattttaactcaggtgtctggtgtgaataatactataagaaaacaaagcttatgtcaacatttgaaattgtatgaagaaagcaagggtaattatagtcrcccagattattattttacatctaaccttaagcaacagggtagacctctaaccctaaaaataggaagtgaaataaagaacatagatatcagtgaaattact

SEQ ID NO: 46802 - DNA, 201 bp, Homo sapiens
tggagggaacaaataataacaaatgtttatttagcacttattgtgtgccaggccctaatctaatctctttaattatatttactcaactgataaacaagaaactgtacacaggaaagttgagtaactcatttcatgtcgtagagctagtcagatgagggtgccccaggatttaaacctacataatctggctccagatttgat

SEQ ID NO: 46803 - DNA, 201 bp, Homo sapiens
tggaatgtagggtgccatatgcacgcatttacttactcttgactgtcaaagtcaagtattatgtttatcattcaggctataatattatatatctcttgtgktttttttctgttaaaataatattgttctaagtgatcagtttctttcttaaaatgttgaaaattcactagtgcagaagacacaagaggcaaccagatgcag

SEQ ID NO: 46804 - DNA, 201 bp, Homo sapiens
ttgcaaaggaaattatctcattctttttatggctgcatagtattccatggtgtatatgtaccatagttactttatctagtataccattgatgggcatttargttgattccatgtctttgctattgtgaatagtgttgcaatgaacatacacgtgcatctatctttacaatagaacaatttatattcctttgagtatttacc

SEQ ID NO: 46805 - DNA, 201 bp, Homo sapiens
ttagagaaacagacatgtttggagggaacaaataataacaaatgtttatttagcacttattgtgtgccaggccctaatctaatctctttaattatatttaytcaactgataaacaagaaactgtacacaggaaagttgagtaactcatttcatgtcgtagagctagtcagatgagggtgccccaggatttaaacctacata

SEQ ID NO: 46806 - DNA, 201 bp, Homo sapiens
tgtgtgggcagtcttatttctggactctctattctattaagttggtctaaatatctgttttgtaccattaccatgctgttttggtttctgtagccccatartatagtttgaagttgggtagtctatgcctccagctttgctctttttgcttaggatttcctgggctattctttggtttcatatgaatttcaaaatagtttt

SEQ ID NO: 46807 - DNA, 201 bp, Homo sapiens
tacaggtgtgagccatggcacccaaccctaatatttattaattactctgttttttgtgcctggcttggtgccagagaagtacatagtaggaactcacttacagttattaataaatgagaaaaatggaataaaatcttgatataaacatcacattgttggaatttatacaaaaacatctacttagagaaacagacatgtttg

SEQ ID NO: 46808 - DNA, 201 bp, Homo sapiens
gaatgcttctagcttttgtccattcattatgatgttggctgtgggtttgccatgatggctcttattattttgaggtatccagggaaacttctcatcctttsatgcctccatcaagtggtcttccaacaataatgataatttgcatttttttaaagtgtgctataattttgaaagctctcacacattcattacttaatttaa

SEQ ID NO: 46809 - DNA, 201 bp, Homo sapiens
ctacaggtgtgagccatggcacccaaccctaatatttattaattactctgttttttgtgcctggcttggtgccagagaagtacatagtaggaactcacttacagttattaataaatgagaaaaatggaataaaatcttgatataaacatcacattgttggaatttatacaaaaacatctacttagagaaacagacatgttt

SEQ ID NO: 46810 - DNA, 201 bp, Homo sapiens
ataacaagggcctttcctgaacggcatttattttcatttcaaatgagggatgaacacaagggcaaggcaggatacttcaccatggattaacttttcttgaccgtactggaatccactttgctatgagaatgtatcatatcatggtttactctgtatttccaggtagtgcactggcaaagtctttaaataagtttaattctc

SEQ ID NO: 46811 - DNA, 201 bp, Homo sapiens
taagcacgttgttcaattcaacaaaaaatagagaatgtatgttctttcagatgcttagttctgaattgagcaagtcatgaaagcaatgcttaataagcacmtagtagccacaaagatatgactatgaaaatgaaaaaaaattgcagttgtattattttaaatgctaacacttttttactttttaataaaattgtatatatt

SEQ ID NO: 46812 - DNA, 201 bp, Homo sapiens
gctactcgggaggctgaggcaggagaatggcgtgaacccacgaagcggagcttgcagtgagctgagatcgcgccactgcactccagcctgggcgacagggygagactcagtctcaaaaaaaaaaaaaaaaaaaaaaaaaaaattggaactactatataaattttatgcatttctatgataagtctctgtaatatagtccag

SEQ ID NO: 46813 - DNA, 201 bp, Homo sapiens
gggagcaaacaatcaaataatgaaaatgtttattcacaaggagagatcagtgcaatgagaggaaggagctcagagctcggaaagcctatacctgagagacytgacatattcttggggctctgaaaaactttcctgagtttatgtcgctaaaacagagatctggagaatgaattgcagcaacctcaggcgcgactccatgct

SEQ ID NO: 46814 - DNA, 201 bp, Homo sapiens
gcgtgaacccacgaagcggagcttgcagtgagctgagatcgcgccactgcactccagcctgggcgacagggcgagactcagtctcaaaaaaaaaaaaaaawaaaaaaaaaaaattggaactactatataaattttatgcatttctatgataagtctctgtaatatagtccaggccaaataattctcttttaacaactgcta

SEQ ID NO: 46815 - DNA, 201 bp, Homo sapiens
gaacccacgaagcggagcttgcagtgagctgagatcgcgccactgcactccagcctgggcgacagggcgagactcagtctcaaaaaaaaaaaaaaaaaaawaaaaaaaattggaactactatataaattttatgcatttctatgataagtctctgtaatatagtccaggccaaataattctcttttaacaactgctaagta

SEQ ID NO: 46816 - DNA, 201 bp, Homo sapiens
ttcaaagcagtgtaggggtgaaggccaaatttctcctttgccctctggaagttcgggtgaaaaatcaattgagaaaaggcagattaataggagaaaggacrtataaaatttatttcagtgtgcataacacaggggaattgtagcctttaaaaagttgttgttttttttttaactctggagaacaaaacataaaaataatta

SEQ ID NO: 46817 - DNA, 201 bp, Homo sapiens
ccagcggcaaaaaaaaaaaataccctcattccctctattcctactattccctcttcctcttttgtggaatattgacctatttcttcccaatcttttatgtmggtatatatgtatttgtttatttaaattatttgcttctaccataatactgttaacttttgtttagttatttggttattctaaattcttaggctgccaaaa

SEQ ID NO: 46818 - DNA, 201 bp, Homo sapiens
acaagtttatattatagcagggaagagagggataaagctaccagagattttgtttccaaattacctatgacatgcagttatagaattgacatgggagagakgtggaaatagagctgccacttatgaatatgtgtattatgtgtatatatctatatatctatatctatatatatcactctttctcacacatgccaatatcga

SEQ ID NO: 46819 - DNA, 201 bp, Homo sapiens
cccaaacactgcacgctggtcaaatgtggagtataaatttaactctaagctgtttaacaaaagagagtgatataaaatagttacagttattaactattttraaatttaaaattagtaactattatttagtaaaatgtactttttaaacatataattaaatgtttatggaaagcacaacacttactgatttgcaggtacacc

SEQ ID NO: 46820 - DNA, 201 bp, Homo sapiens
ataaaataaaattgatagatatagctatctatctattgaaagaaataagtaaagtgagtcagctcaaacatttcttgatgagacaagtttatattatagcrgggaagagagggataaagctaccagagattttgtttccaaattacctatgacatgcagttatagaattgacatgggagagaggtggaaatagagctgcca

SEQ ID NO: 46821 - DNA, 201 bp, Homo sapiens
tcaaatgtggagtataaatttaactctaagctgtttaacaaaagagagtgatataaaatagttacagttattaactattttaaaatttaaaattagtaactattatttagtaaaatgtactttttaaacatataattaaatgtttatggaaagcacaacacttactgatttgcaggtacaccattcattttctatttttaa

SEQ ID NO: 46822 - DNA, 201 bp, Homo sapiens
ctgggaagtttaagatcaaggtgttggtagatccaatgtctcaagagggtccacttactggtttacaaatggctgtgctcttgctagtttctcacatggcygagaaaagagagtcagagagagagggagagagagagagagcaggcaagctctctcatttctttttttatagacgcatgaatcctatttatgagggctcca

SEQ ID NO: 46823 - DNA, 201 bp, Homo sapiens
tgtaccctttgaccaatgttcctctatttcccccacctttctgcccctgataaccagctttctactctttggcttctatgtatttgacatttttgtatttyacatataagtggatcatgcagtattttgctttctgtatatgtcttcattcactcagcttaatgtcctccaagttcattcatgttgttgaaaatagcagaa

SEQ ID NO: 46824 - DNA, 201 bp, Homo sapiens
cccagtgggatcttctttatttttctagttcatatatagcttttataagcaagtgataattaatggaacagacattttagttgttgttgaatcctttccakttctcttcccatcataagggccagcttcagatgctgttaggtcctaataacttcctggtgataaccatgtggcccacccatcccattaatttctgctttt

SEQ ID NO: 46825 - DNA, 201 bp, Homo sapiens
attaccataaaaatacagcaagaaatcttagcatcccaatgtaactgtaaatctaataacagcaataacagaatttcttagagaaaaaagctgcattggcytgttgttatttttgatcctagcttattatctgggtcaactgggaggtttttaggaacatcagccattttagtcttagttctgtttggtcatcagaagctt

SEQ ID NO: 46826 - DNA, 201 bp, Homo sapiens
cctctgtctcttgctctctctcttatcatgtgaaacgcaggctccccctttcccttccaccattgttggaagcttcttgaggccctcactgggagcagatrctggtgccacgctttgtgtacagcctgcagaacagtgggccaaaataagcctcttttctttataaattaccctgtctcaggtattcctttatggcaatgc

SEQ ID NO: 46827 - DNA, 201 bp, Homo sapiens
actacaggtgtgagccatggcacccaaccctaatatttattaattactctgttttttgtgcctggcttggtgccagagaagtacatagtaggaactcacttacagttattaataaatgagaaaaatggaataaaatcttgatataaacatcacattgttggaatttatacaaaaacatctacttagagaaacagacatgtt

SEQ ID NO: 46828 - DNA, 201 bp, Homo sapiens
atgatttttacgttaataaaatgtattctgcaaggcacagtggtgcgtgccttaggtccagctactcaggaggctgaggcaggaggactgcttgagcccaktagtttgaggcaagcctgggcaacatagacctcatttcatctctaaaaaaatgtattctttgatgctatatatagtataataaattttgagctgattatg

SEQ ID NO: 46829 - DNA, 201 bp, Homo sapiens
gatctttactatctaaaactggatcctcctccttcctttctacatttttgttgatttatttattgactgtgtgaatcataggggatcttcatataatccastgtgtagagacttgacgtaaagagtcatataaagaatgcaggggcattcacgtgctatagcttggagctaaattaaattacaggtaggaaaaagctttca

SEQ ID NO: 46830 - DNA, 201 bp, Homo sapiens
tttgtgtacagcctgcagaacagtgggccaaaataagcctcttttctttataaattaccctgtctcaggtattcctttatggcaatgcagaatggactaayacatatggtttgtaaacattttttcctattctgtaggttgcgttttcaccctgtcaatcgtttcctttgctgtgcagaagctttctcctttgatgtgggc

SEQ ID NO: 46831 - DNA, 201 bp, Homo sapiens
aagattcgttttatacatttattaaggtgttatcaaagtcgtccttttcaatgaggctgtgggtggaaggcacgtcttggaatgtgttctctttacacatstgaatgaagtgtctgtcattaggggactggtgtgtgcaggacatgtaatggaacacaacagggcagcctgacaaattctgaacagaacaggacagagcta

SEQ ID NO: 46832 - DNA, 201 bp, Homo sapiens
gactacaggtgtgagccatggcacccaaccctaatatttattaattactctgttttttgtgcctggcttggtgccagagaagtacatagtaggaactcacttacagttattaataaatgagaaaaatggaataaaatcttgatataaacatcacattgttggaatttatacaaaaacatctacttagagaaacagacatgt

SEQ ID NO: 46833 - DNA, 201 bp, Homo sapiens
ctgtctcaggtattcctttatggcaatgcagaatggactaacacatatggtttgtaaacattttttcctattctgtaggttgcgttttcaccctgtcaatygtttcctttgctgtgcagaagctttctcctttgatgtgggctcatttgtttatttttgcttttgttgcttgtgtttttgatgagatattcatgaaatcac

SEQ ID NO: 46834 - DNA, 201 bp, Homo sapiens
agacagggtcttgctgtgttgctaagtctggtctcaaactcctggcctcaaacaatgctcccaccttggcctcccaggtgttgagactacaggtgtgagcyatggcacccaaccctaatatttattaattactctgttttttgtgcctggcttggtgccagagaagtacatagtaggaactcacttacagttattaataaa

SEQ ID NO: 46835 - DNA, 201 bp, Homo sapiens
cagtcttgaacagatcaatctatcataacatttttatctttcttttctgtcaattgtcacattacaattttactttcttgtattagacagcaagcaccatsagaaaagcaaccattagtgttgattttttaaaattattttaaaatgattaaatattttgtaaagacagggtcttgctgtgttgctaagtctggtctcaaa

SEQ ID NO: 46836 - DNA, 201 bp, Homo sapiens
ccagtcttgaacagatcaatctatcataacatttttatctttcttttctgtcaattgtcacattacaattttactttcttgtattagacagcaagcaccatcagaaaagcaaccattagtgttgattttttaaaattattttaaaatgattaaatattttgtaaagacagggtcttgctgtgttgctaagtctggtctcaa

SEQ ID NO: 46837 - DNA, 201 bp, Homo sapiens
gaacttttgcttaaaaattacttcgtatttgcaaggctaatttcaaaataaattgaaaatgtaattttattaattttaccttgctaaatttgtacaaatgracttcctttcccttttctccagagaaatttttatttattccttatatttcaatttaagcattatttcttcaggaaagcaacttaccagtcttgaacagat

SEQ ID NO: 46838 - DNA, 201 bp, Homo sapiens
cttatttctaatctggcaaatacacagccgtgaatctactctttgtatacattagattgccatccacccaaatgttatctatttccagctacatgtatatwgaacatttgcacacagtgtttttatattctggaaaaatataagaatgttttgaaagcatacaatggatatgtctgcaagagagtaaacgaagaaaaataa

SEQ ID NO: 46839 - DNA, 201 bp, Homo sapiens
caaatgtggagtataaatttaactctaagctgtttaacaaaagagagtgatataaaatagttacagttattaactattttaaaatttaaaattagtaactattatttagtaaaatgtactttttaaacatataattaaatgtttatggaaagcacaacacttactgatttgcaggtacaccattcattttctatttttaat

SEQ ID NO: 46840 - DNA, 201 bp, Homo sapiens
tatattttgctttaccaaaattctccagaaatcagaagtctagccttatttctaatctggcaaatacacagccgtgaatctactctttgtatacattagaytgccatccacccaaatgttatctatttccagctacatgtatattgaacatttgcacacagtgtttttatattctggaaaaatataagaatgttttgaaag

SEQ ID NO: 46841 - DNA, 201 bp, Homo sapiens
agtatcagtcagtctctactgcataacatttaaatattttcaggtaatgcttcccatgaagtcatttagcactttctaactttaaatttcaattgttgttatataatataatataatataattaatataaatagtatgagtactttcaattcacgttcactcacactatctaattcaaatatctagatcacctgtgaggaa

SEQ ID NO: 46842 - DNA, 201 bp, Homo sapiens
cactgaacaagtctaaacatctttctcttatattttgctttaccaaaattctccagaaatcagaagtctagccttatttctaatctggcaaatacacagcygtgaatctactctttgtatacattagattgccatccacccaaatgttatctatttccagctacatgtatattgaacatttgcacacagtgtttttatatt

SEQ ID NO: 46843 - DNA, 201 bp, Homo sapiens
gtatcagtcagtctctactgcataacatttaaatattttcaggtaatgcttcccatgaagtcatttagcactttctaactttaaatttcaattgttgttatataatataatataatataattaatataaatagtatgagtactttcaattcacgttcactcacactatctaattcaaatatctagatcacctgtgaggaag

SEQ ID NO: 46844 - DNA, 201 bp, Homo sapiens
gtagtttcagtgtgaataattatggaaaggatggattaagtaaatgtaattctttttctgcaagagtttctattttagatagcactgaacaagtctaaacmtctttctcttatattttgctttaccaaaattctccagaaatcagaagtctagccttatttctaatctggcaaatacacagccgtgaatctactctttgta

SEQ ID NO: 46845 - DNA, 201 bp, Homo sapiens
ttctcagaatgtgaccgtagttggagacagggcctttggatatagaagtaattaaattaaaatggggtcatttgggtgggccctaatccaatatgactggygtccttatcagaagagattaggatgtacagggaaagacatcattgttgtgtgcatacatgtgaggacacagagagaggacagccatctgatagccaagga

SEQ ID NO: 46846 - DNA, 201 bp, Homo sapiens
tatcagtcagtctctactgcataacatttaaatattttcaggtaatgcttcccatgaagtcatttagcactttctaactttaaatttcaattgttgttatataatataatataatataattaatataaatagtatgagtactttcaattcacgttcactcacactatctaattcaaatatctagatcacctgtgaggaaga

SEQ ID NO: 46847 - DNA, 201 bp, Homo sapiens
gccccaagagcaagataaacttagatccagagagaatacctttgttaaagattcctataaccaattttctgcacctacatggggaacaaactagaaaatayacatgaaatgccaacaaatatttgtgtcatattatgcattttccaaaatactttaccttatttgaccttccccagtcttgtaggataacaatgattgttt

SEQ ID NO: 46848 - DNA, 201 bp, Homo sapiens
atcagtcagtctctactgcataacatttaaatattttcaggtaatgcttcccatgaagtcatttagcactttctaactttaaatttcaattgttgttatataatataatataatataattaatataaatagtatgagtactttcaattcacgttcactcacactatctaattcaaatatctagatcacctgtgaggaagat

SEQ ID NO: 46849 - DNA, 201 bp, Homo sapiens
aaatagtaaaatggttgctgtaataaagtaaattgacatattcataatctcacagttacccatttttttgtgtgtgtagcaagagcatctaaatctactcmtttagtaaaaatcctgaatacagcattattaactatagtcttcatgttgtgtactagatttctagagctcattcttcataactgcaactttgtatccttt

SEQ ID NO: 46850 - DNA, 201 bp, Homo sapiens
tcagtcagtctctactgcataacatttaaatattttcaggtaatgcttcccatgaagtcatttagcactttctaactttaaatttcaattgttgttatataatataatataatataattaatataaatagtatgagtactttcaattcacgttcactcacactatctaattcaaatatctagatcacctgtgaggaagata

SEQ ID NO: 46851 - DNA, 201 bp, Homo sapiens
aacctacctcccaaagcatttcatgatttggcttctaccattatcttgcacctctttcctgtgatgcacctccctcatatgttcctccaaacaggaactcrcagtttcttgaatgttccgtgttgctttatgcctctgtgcatgtgttatcagctacagtcataccttacttaacaatggggacatgttctgagaagtgca

SEQ ID NO: 46852 - DNA, 201 bp, Homo sapiens
cgttcactcacactatctaattcaaatatctagatcacctgtgaggaagataaaaatagttataatttatttattgtcatatcatttcaaagcctgttctaaattcttttcttaactcatttaagtaaatcctatgaggtatatactgttaatattttacagatgcaggcattgaggcatggagaaaatatcttcataact

SEQ ID NO: 46853 - DNA, 201 bp, Homo sapiens
tcatgatttggcttctaccattatcttgcacctctttcctgtgatgcacctccctcatatgttcctccaaacaggaactcgcagtttcttgaatgttccgwgttgctttatgcctctgtgcatgtgttatcagctacagtcataccttacttaacaatggggacatgttctgagaagtgcatccatatgccattttgtcat

SEQ ID NO: 46854 - DNA, 201 bp, Homo sapiens
gaatgagtgctattgtatacacacacacacatacacatgagcacatgtgcatacatgtatgcatacatgcacacaagatttagaagacttatatgcatttwaaaaaaaaggtttagaatccagattaaacaaacaattatgccgggcacagtggctcacgcctgtaatcccagcacttcgggaggctgaggcgggcagacc

SEQ ID NO: 46855 - DNA, 201 bp, Homo sapiens
acatagtgaacacactcatgtaacctccacccacgtcaagaaatagaatattattagaaccctaagagggccccttgtccccgctaccagctactactctstcactatcctgacttctaacaccataggtgagttttgcctctttttgaacttcaaatactgagactatacagtatgttgtattttgtgtctgatttcttt

SEQ ID NO: 46856 - DNA, 201 bp, Homo sapiens
ttcatccaatccattgtttattggcatttaggttaattcaatgtctttgctattgtgaatagtgctgcgatgaacatatgagtgcacatgtctttttggtmggatttattttcctttgggcatgtacccaataataggattgctgggtcaaattatagttctatttttagttctctgaggaatctccaatcgagtttccat

SEQ ID NO: 46857 - DNA, 201 bp, Homo sapiens
cttaatgttgtatgtctgtgagagctcaccatgtagtagttcattcattcattgataataaaccataatttatctatctgttctattgctgatgaacattygaattatttctggttttttctttaatgagcattgctattatatacacatttgtgtattactttcagtgcattaatgtagactttcttttggactaatacc

SEQ ID NO: 46858 - DNA, 201 bp, Homo sapiens
caggtgaacaaagcatagatgtgaggaagatagtagatgatgagcaaaaacacattcaatgatgtaaaacacatttatctgaatttatatcttccaacagkattcagggctaggcaatattcaggaaaaaagtggtattatttaaataaaatgagcaattgctgacttgacccatgggtgtttgacattgttttccaggaa

SEQ ID NO: 46859 - DNA, 201 bp, Homo sapiens
tgttcctctatttcccccacctttctgcccctgataaccagctttctactctttggcttctatgtatttgacatttttgtatttcacatataagtggatcrtgcagtattttgctttctgtatatgtcttcattcactcagcttaatgtcctccaagttcattcatgttgttgaaaatagcagaagctcctttattaaggc

SEQ ID NO: 46860 - DNA, 201 bp, Homo sapiens
tcaggaggtagtccagtcattttggtcacttttggcctgaggtaccagataaaatacggaatgcacagttacacttgaatttcatgtaacagtgattattkttaagtattaagtatgtcccaaatattgcatgggacattctcatacttacacttatttaaggtttatcttaagtgtaaacgtaactgggcattctgtttt

SEQ ID NO: 46861 - DNA, 201 bp, Homo sapiens
agcaagatttgttaaacatgaaacaaaaagctatgaaaagacatacattttactagctcaaagttaactagtttaaattttactaattcaaatcttactasttcaaaattaagaactttgttctgtcaaaaaatttttaaaagaaaatggaaagatacactgagaaaagatattggtataaatccaacaagggatttgtaa

SEQ ID NO: 46862 - DNA, 201 bp, Homo sapiens
cttatttaaggtttatcttaagtgtaaacgtaactgggcattctgtttttttaacatttagcaaccttaatctaatggcatttgcagttctggaagaagcrgttgagaggatgaacagaacttttggcaacatctcaagaatttgaagcaaaagtctaaacaaggaactgccaaagggaagatcaccacaactttgttttg

SEQ ID NO: 46863 - DNA, 201 bp, Homo sapiens
aactagtttaaattttactaattcaaatcttactacttcaaaattaagaactttgttctgtcaaaaaatttttaaaagaaaatggaaagatacactgagaraagatattggtataaatccaacaagggatttgtaacaagaacatatagcgaaccttcacaaatcaaaaagaaaagcaaaatgaacaaaaggaaaatggcc

SEQ ID NO: 46864 - DNA, 201 bp, Homo sapiens
gtagtattagtcctgtgcacagacacttgtaatcagagccccagcattccatttgtcattaggggaaacacaaggaaaactgtacaatttggactccgaayatctgataagcagatggcaggttagcctcaatgtagtgcaaatattgtctgtttgcaagactgatatttgcacacacgtctttggcagatgatggtaaag

SEQ ID NO: 46865 - DNA, 201 bp, Homo sapiens
ccaaagtgatatctggaccttccgtcatgtcttgagaacaattggaaagggtaaatattagagtaattgcagaaaacagagttatttttctctttaaattmacttaataaagaaaaaataattatctggtggggttttcaatgtatataaaagcaataaagtataacctaaaattcaatggggcaaaaggatttataaagt

SEQ ID NO: 46866 - DNA, 201 bp, Homo sapiens
tgctttgctttaatcagaataggcataaacctgtcatcaatgctttttaaaaatctattgatatccagttcaaaaaggaatttcagtattagatctctcartcatgagtcatttgttcattctgggaataaacaacattgtcttgctttattattattttttattacacagttgaattaaattggctaatatttcatctac

SEQ ID NO: 46867 - DNA, 201 bp, Homo sapiens
ctaaaaatcatgataaaatgatgcaggagctgacagtcaaaatagccagcctagaaaagaatctaattgacctgatagagctgaaaaacacactacaagartttcatagtgcaatcacaagtattaatagcagaatagaacaagtggaggaaagaatcccagagcttgaaaactggctgtctgaaataagacattcagaca

SEQ ID NO: 46868 - DNA, 201 bp, Homo sapiens
gttgtgagactacattatgtagtggtgagaatcttaatatgcagctaggcaaatgagttcaagtcccaactccactacttactggtatattctaatctttstgagctttagtttcctcagctgtaagatgggtatggcaatactttcttaccacgactgttgtgaagattaaatagcattacgcatgtaatgccttgttca

SEQ ID NO: 46869 - DNA, 201 bp, Homo sapiens
tgtcttatttcacttactaatgtccctcaggtggatccatgtcatctcaaatgacaggatttccttcttatttaagaccaaatggtattttattgtgtgtrtatgccatattttctttagccattcatatgttgacaaacatttagtttgattccatattttggctattgtgaataatgctgtgaggaacatgggaatgca

SEQ ID NO: 46870 - DNA, 201 bp, Homo sapiens
taactaacaccattttttctcaaactattccaaaaaattgaggattaagaaattcttcctaattaattctgtgaagctagcattaccctgataataaaacsagacaagggcacaacaaaaaaagaaaactatgggccaatatgtctgatgaagatagatttaaacaccctcaaccaaatactagaaaatagaacccaacag

SEQ ID NO: 46871 - DNA, 201 bp, Homo sapiens
ttccaagaaaaataattttaaagtgccctgtccactgtccctacccctatagatggatgacttaggaaatttaatttctgtaaaatctctaggatatcccwcagaggaaaatgcatggatgctggtggacactaagatatacatacaaaacaataacaataaggcaactattttttttcaaaaaacccagaaagttgggtt

SEQ ID NO: 46872 - DNA, 201 bp, Homo sapiens
gatgacttaggaaatttaatttctgtaaaatctctaggatatcccacagaggaaaatgcatggatgctggtggacactaagatatacatacaaaacaatamcaataaggcaactattttttttcaaaaaacccagaaagttgggttgggtgctcatttatgggcaaatcatctgagaagctggcagctgccatttgaaccc

SEQ ID NO: 46873 - DNA, 201 bp, Homo sapiens
ccactatgttttcttctagaagttttatagtttcaggtcttatgtttgtctttaatctactttgagttgaatgttatgtatggtgtaagggttcaatttcrtgtttttgcatatggatatgagtttttacaccatttgttgaagagactatcctttccccattgtgtatttttggcacccttgttgaagatcagttgacct

SEQ ID NO: 46874 - DNA, 201 bp, Homo sapiens
tttacatactattccagtagtttcagtgtgaataattatggaaaggatggattaagtaaatgtaattctttttctgcaagagtttctattttagatagcaytgaacaagtctaaacatctttctcttatattttgctttaccaaaattctccagaaatcagaagtctagccttatttctaatctggcaaatacacagccgt

SEQ ID NO: 46875 - DNA, 201 bp, Homo sapiens
tttaacatcctttcatgataaaaaccctaaaaaacctgggtatagaatgagcatacttcaacataataaaagctatagtattatactataataaaataaartataattaatataatataataaaatataaaatatataatataataaaagctgtagtgttatactagctggggatctgtcatatagaatggagaaaaaatt

SEQ ID NO: 46876 - DNA, 201 bp, Homo sapiens
tgttcaatacagaagcagccatggatgcagaaccccaggagaaagagggttgactgtataggttttcaaacaatgtactattaatattttacatactattycagtagtttcagtgtgaataattatggaaaggatggattaagtaaatgtaattctttttctgcaagagtttctattttagatagcactgaacaagtctaa

SEQ ID NO: 46877 - DNA, 201 bp, Homo sapiens
tatatttacagttattttaattgagaatattttatgtaggttttatttaaaaagcttgaggtcaagagcttttgaagaactttaggaaaaaaaaacctaakccatattatacagccatccctcggtatccatggggggttggttccaggaccttctgcagatgccaaaatccatggatgttcaagttccttatataaaata

SEQ ID NO: 46878 - DNA, 201 bp, Homo sapiens
tgatggtaacgtacagatgggtttttggtgtggatgtcctttctgtttgttagttttccttctaacagacaggaccctcagatgcaggtttgttggagttkgctagaggtccactccagaccctttttgcctgggtgtcagccgtggtggctgcagaacagcagtggctgtagaacagcggattttggtgacccgcaaatg

SEQ ID NO: 46879 - DNA, 201 bp, Homo sapiens
gatgatggtaacgtacagatgggtttttggtgtggatgtcctttctgtttgttagttttccttctaacagacaggaccctcagatgcaggtttgttggagwttgctagaggtccactccagaccctttttgcctgggtgtcagccgtggtggctgcagaacagcagtggctgtagaacagcggattttggtgacccgcaaa

SEQ ID NO: 46880 - DNA, 201 bp, Homo sapiens
tggaggaggagaggtgctctgctttttagagtttccggtttttctgctctgttttttccccatctttgtggttttatctacttttggtctttgatgatggyaacgtacagatgggtttttggtgtggatgtcctttctgtttgttagttttccttctaacagacaggaccctcagatgcaggtttgttggagtttgctaga

SEQ ID NO: 46881 - DNA, 201 bp, Homo sapiens
ttccgttgctggtgaggagctgtgttcctttggaggaggagaggtgctctgctttttagagtttccggtttttctgctctgttttttccccatctttgtgkttttatctacttttggtctttgatgatggtaacgtacagatgggtttttggtgtggatgtcctttctgtttgttagttttccttctaacagacaggaccc

SEQ ID NO: 46882 - DNA, 201 bp, Homo sapiens
ttatatcttccaacagtattcagggctaggcaatattcaggaaaaaagtggtattatttaaataaaatgagcaattgctgacttgacccatgggtgtttgwcattgttttccaggaaacaggatgggtgggttgttttcatcacctccactgtttcccaagcttcccctgtgatccacaatatgaatttacaattgggttt

SEQ ID NO: 46883 - DNA, 201 bp, Homo sapiens
ttcacttatgaagcttagtttggctggatatgaaattctgggttgaaaattcttttctttaagaatgtgaaatgttggcccccactctcttctggcttgtrgagtttttgccaagagatctactgttagtctgatggctttccctttgtgggtaacccaacctttctctctggctgcccttaccattttttccttcatttc

SEQ ID NO: 46884 - DNA, 201 bp, Homo sapiens
tgctgaaatagcagctagagcttgtgcagcaaagtttttctctgccaagttaactgggctgtatgggattaaatctgtgaccttgtcctcattaacccaaygctctaaccaactgagagagcttctccagttcactctggagtatgtgagatgtctgcaatggtggacaaatgcaaatagagtatgtaacataatggccat

SEQ ID NO: 46885 - DNA, 201 bp, Homo sapiens
ttgctttccatgtttagtgcttccttcaggagctcttttagggcaggcctggtggtgacaaaatctctcagcatttgcttgtctgtaaagtattttatttmtccttcacttatgaagcttagtttggctggatatgaaattctgggttgaaaattcttttctttaagaatgtgaaatgttggcccccactctcttctggct

SEQ ID NO: 46886 - DNA, 201 bp, Homo sapiens
actggaaatagagagaccaggtgctaagttaaaatttgctgatgtaaatatgagtcaacattctgcttcaatactgtatctctctgtctctctctctccctctctctgtttgccacttaaaactcatgaggtatgtatgttaacagataagtaacaagttcaaaactttctacattttccaaaaatgtttactaaatgcaa

SEQ ID NO: 46887 - DNA, 201 bp, Homo sapiens
taccggttgttgctttccatgtttagtgcttccttcaggagctcttttagggcaggcctggtggtgacaaaatctctcagcatttgcttgtctgtaaagtrttttatttctccttcacttatgaagcttagtttggctggatatgaaattctgggttgaaaattcttttctttaagaatgtgaaatgttggcccccactct

SEQ ID NO: 46888 - DNA, 201 bp, Homo sapiens
tcctgggcacccagagtatattgggaaaaatagatatgcaaatagctgtaataatgtctgataaatgacactgtaatggtatgaacaaaggctgtggaggsacataggaaaaagcaatcaaatagcgtttccaaatagtgtttccaaagttctttcattttccattattaagtaggggaaagtgaatctccctcatatgaa

SEQ ID NO: 46889 - DNA, 201 bp, Homo sapiens
ctggaaatagagagaccaggtgctaagttaaaatttgctgatgtaaatatgagtcaacattctgcttcaatactgtatctctctgtctctctctctccctctctctgtttgccacttaaaactcatgaggtatgtatgttaacagataagtaacaagttcaaaactttctacattttccaaaaatgtttactaaatgcaaa

SEQ ID NO: 46890 - DNA, 201 bp, Homo sapiens
tattccacaaaacagaagccaaagcaagcaggagtacttgcatcagataaaacagaatttaagtcaaaaaccataaaaaagacaagatcattatataatgrtagagggatcaattcaggaagagaatagaacaattctaaatacatgcatccaatcctggagcacccgtattcataaaacaaatatgactagatctaaaga

SEQ ID NO: 46891 - DNA, 201 bp, Homo sapiens
aggccaaggagggcggatcatgaggtcaggagatcgagaccatcctggctaacacggtgaaaccccatctctactaaaaatacaaaaaaaattagctgggyatggtggcaggtgcctgtagtcccagctactcgggaggctgaggtgggagaatggcgtgaacctgggaggcagagcttgcagtgagtgagcagagatcgt

SEQ ID NO: 46892 - DNA, 201 bp, Homo sapiens
ttctattttggagacagtcttcaaaacaattcaaaattactgtaaaaataaataataaagcctaaaatacaggtgcttaatggagcagatagagactcttytctgggatagatagattattggtgagttttgccaactgcttctttcactaaatgatagaccataagtgttccagggaagaatcgtctttcttccctgttg

SEQ ID NO: 46893 - DNA, 201 bp, Homo sapiens
gagcagatagagactcttctctgggatagatagattattggtgagttttgccaactgcttctttcactaaatgatagaccataagtgttccagggaagaawcgtctttcttccctgttggattgaagtaagggcatatgtcattcatagcacagccactgtgacaacacaaagggttttgctcccagtctgcagcctgggc

SEQ ID NO: 46894 - DNA, 201 bp, Homo sapiens
ataaagtagcagcatttctacgttttatattaactaatacaatattaactcttagtaaaccatgacagcttagatatgcatattgtaatctctagaacaarctgaaaaaaaaatcagagatttataagcagaaaatcaacagattaaaaaaaagtcagccagtagacagaaattacaatgagataataaaaatattcaaat

SEQ ID NO: 46895 - DNA, 201 bp, Homo sapiens
agcagatagagactcttctctgggatagatagattattggtgagttttgccaactgcttctttcactaaatgatagaccataagtgttccagggaagaatcgtctttcttccctgttggattgaagtaagggcatatgtcattcatagcacagccactgtgacaacacaaagggttttgctcccagtctgcagcctgggct

SEQ ID NO: 46896 - DNA, 201 bp, Homo sapiens
agccaatgtatgatattggttcatttgaacaacttttattgaacgcttattgtattcctgacactctttttggtactgaacatttaataaatgaagaagamaaagtgtttttcctcaaggaaatcacagtcagcagggaaatatacaggtaaagagggttgaacagccagaggattaataaactctatgcatctaatcaat

SEQ ID NO: 46897 - DNA, 201 bp, Homo sapiens
aaattgtgttattaaagagtagccagtgaggaactggttgttttcaggcaatgaggccatagtgtcttagaaaacccttaagcagacagtccctgagaaasagtgtgttatccaatgttaagaaaatatctatgattgattctttactacttcatgatagggaagttatgccatgtagtgatggtgtggagggtgtttttg

SEQ ID NO: 46898 - DNA, 201 bp, Homo sapiens
tggacaatattctgaatatatccctattttaatgaactatctgttgctatagtggtttcatttctaccacagcaaacaatgcctagaaagactagtctatyaggtgttgatatggttaatattctcctgatagaatcaaggaattctagctcaagtatgtatttttaaaaatcatttagcatcattttgaactccaataaa

SEQ ID NO: 46899 - DNA, 201 bp, Homo sapiens
acccaaaacacgtttctgtagggcattctttgtatgtagcgtaggactttcattttgttactccccttctgtgcattcattcctagcccatgataaaaataaaaaaaaaaaattatgcgtataatgaaaggtctaaggaaacttggatcaggacagatgttggcctgtagaagacttttattccttcacaagttgttatta

SEQ ID NO: 46900 - DNA, 201 bp, Homo sapiens
tcaaagtaccagttagtatgtataaacctaggtaaaatgaattaaattttgtacataatatattattattaaatatagatttaaggggtatagttacaaaygatttttaggagctagtgtgtctaagtgcctgagggtctattatggagagaaaggagttgttgaactttattgaagagcatgttctttacagcaaaactg

SEQ ID NO: 46901 - DNA, 201 bp, Homo sapiens
tatgaactttttaaaaatgaagtgctttttaaaaaaacagattatgaattttattagttcatttatctcagatgagggatcagcaaacattctctgtgaawggccagaaagtaaatatttcaggctttgtgggccgtacattgttgcaagtatttaactctgtgtgttgaagaatgaaaatagctatagaaatatgtaagc

SEQ ID NO: 46902 - DNA, 201 bp, Homo sapiens
tgctttgttcctttgtcagtttgttttactgtaaaccactttaggtatatgaaacttctaaccccaggagatgataataatgttgcaggaatatattttgkgtattttattatcttaaaattattgtcaaatttagctcagtggggtgggtcatggctataatcccagcattttgagaggccgaagagggaggatcacttg

SEQ ID NO: 46903 - DNA, 201 bp, Homo sapiens
gtatatacatcagcattaaatcaaatgttaaaatctgaagaacctctaaggcatgagctaattcaaaccctgtctccacaccccacctcagtgtatgcatrcctgtatttctgtgaaaataggtcctggagaggtaatatgactttttttatgggcataaaatcagtttaaagcaaagtgaaactttaacttgagcctctt

SEQ ID NO: 46904 - DNA, 201 bp, Homo sapiens
ttcattagttcattagttgtacacacacaaacgcataacttatatagtcgttttgaccgaaaccacaaccaaactatattgactaaaatttccagttttgstgtcttcatggaagaaaacttaatgacacttgcgaagctacctaactgcagaatctttcttgatcttttataatccttttccttgccttgccctgctcca

SEQ ID NO: 46905 - DNA, 201 bp, Homo sapiens
acagcccttatgagcgagcgtgggcagggaatgtccttggaataacagaagccccatttaaaaggaggctggtgagtgctttcagcagttccttggagttstgtgtactcctcctataacctcaatcaatccaattaattcctttctttttacttgcctgacaaaatccaactttaaacgaataaaaaaacttatatattt

SEQ ID NO: 46906 - DNA, 201 bp, Homo sapiens
caactaggattttatcaaaggttatcagcaagtggggggcatgatcacttcggcatttgagaaagaaatgtgtttgcattaaggagaatgtctaagagcamatagagactggaagtagaaacctacaaggctactagaatggcccagttaagatataataaggcccgaactcaaaagagactgtttcaaaggtaaactgac

SEQ ID NO: 46907 - DNA, 201 bp, Homo sapiens
gaaagatacgtttttatttcctaacttgttttcttgccttctaaaacaggtctctcttatttctctctggtgttatattcatttgtctgtctcaatctctktatcccagctctccttatccataaaatggggataattataataacatttaccttattgtgttgttacatgattaaataaaatgacacgtgtcaagcataa

SEQ ID NO: 46908 - DNA, 201 bp, Homo sapiens
gaagatttaaattatgaattcaagtcccttcatggttttaaaaatattcagagtatatatttcttcttaattgaattttggtaatctgtgtctttaaagtrtttggttctttttatttaagaagtaaaattatggccataaaattgttctagttttctctcagtatcctcttaatgcctatgatgctatggtgataattcc

SEQ ID NO: 46909 - DNA, 201 bp, Homo sapiens
ttggtagaaactaacaatgacatcatcaccaaagatgacatttttgagaagatttaaattatgaattcaagtcccttcatggttttaaaaatattcagagyatatatttcttcttaattgaattttggtaatctgtgtctttaaagtgtttggttctttttatttaagaagtaaaattatggccataaaattgttctagtt

SEQ ID NO: 46910 - DNA, 201 bp, Homo sapiens
atttttacattcacttaaggtttaatagtttacaagtttatgtaacttctcagaataatcttttcagactgataagcactgccatattgcggatgaaaacrtgagtttcccagggcgtatggcaaaggttatttcttgtgaaaactgcaaggagacaactttgaagaattttgcttcagggctccagaatttaatgacatt

SEQ ID NO: 46911 - DNA, 201 bp, Homo sapiens
acattagacctatttttgacgaggctgcagcaagggagggaatggctgattctcctgatctgccctatcagtataggggattatttcatttctttccagawtagagggtatacatgagtctcataacttttgtagcttactttagtcatggaaatgatttttcatatattattgtttttctggtaatttctatgcagtttt

SEQ ID NO: 46912 - DNA, 201 bp, Homo sapiens
tttagaagaggagtgctgtacgacaagacaatgtctactttaaatagctttattttaatgagcatgtatgtgagttgtgtcagggacagtgctgggcactkattagccattgtttcagaagagagaaaataaacaaatgctaaaactgattaagaaatatttgatagagcagtatagataagttagatgctcaggcagcag

SEQ ID NO: 46913 - DNA, 201 bp, Homo sapiens
aaacttgtttctttcttacgcttatttgtaaaaaaaaaaaaaaaattggaaagtgactgctccctctgttcagaccacatggtttgcctcttttgccagarcatcgttctctgttctgactttaagctctcccaaagcctacattagacctatttttgacgaggctgcagcaagggagggaatggctgattctcctgatct

SEQ ID NO: 46914 - DNA, 201 bp, Homo sapiens
tttgtatttttagtagagatggggtttcaccatgttggccaggctggtctcgaactcctgacctctagtgatccacccatctctacctcacaaagtgctgsgattataggtgtgagcctccgtgcccaaccctattttgctgtttgacagaaaatttttgattttgtaactgcctgagatacagttgctccctgtggagga

SEQ ID NO: 46915 - DNA, 201 bp, Homo sapiens
ggtagaacaatttattttcttttgaatatgtacatagtaacgggatgagtgagtcaaatgttagttatgttttaagttctttgagaaatctccaaactgcyttctacagtggctgaactaatttacatccccaccaatagtttataaagtgttcccttttctccacagcctcaccagcatctgttgtatttgactttttaa

SEQ ID NO: 46916 - DNA, 201 bp, Homo sapiens
agtcaataataatttaattatacattctgaaataactaaaagtgtaatttgattgtaacacaaaggataaatgcttgagacaattgataccccatcctccrtgatgtgattattatgctttccatgcctgtatcaaaatgccttatgtaccctataaatatttatacctactatgtacccacaaaaattaaaaattgaaaa

SEQ ID NO: 46917 - DNA, 201 bp, Homo sapiens
gtttaggctccaatatgagcaaaaaaatactaagattatggaataaaagtcttgaaaagtgttcgttttgctaattcacccctgaaatttaaactaaaacrtaatgaattttttttacatttttcctcattactaaatgatgtattccatattggctccaagcgtcttggtagaaacgtgaaaactggcttaaagtgagaa

SEQ ID NO: 46918 - DNA, 201 bp, Homo sapiens
tactaggccttctggctggttacataaataggtgtgtctcaataaatgagctattaaatagttgattaactggttattatctctttgtgtccttaggcatytcccaactattgtctctaaaatgagtttggaatgcactttcatgttccactctagctctgatactatctgattatcaagatctagggagagacatgttag

SEQ ID NO: 46919 - DNA, 201 bp, Homo sapiens
tatcagagactaggattgcgacccctgcctttttttgttttccatttgcttggtagatcttcctccatccttttattttgagcccatgcgtgtctctgcaygtgagatgggtttcctgaatacagcacactgatgggtcttgactctttatccaatttgccagtctgtgtcttttaattggagcatttagcccatttacat

SEQ ID NO: 46920 - DNA, 201 bp, Homo sapiens
ttgattcctttaccattatgtaatggccttctttgtctcttttgatctttgttggtttagtctgttttatcagagactaggattgcgacccctgccttttyttgttttccatttgcttggtagatcttcctccatccttttattttgagcccatgcgtgtctctgcacgtgagatgggtttcctgaatacagcacactgat

SEQ ID NO: 46921 - DNA, 201 bp, Homo sapiens
ctgtctaatgttgacagtggggtgttaatgtctcccattattattgtgtgggagtctaagtctctttgtaggtcactaaggacttgctttatgaatctggktgctcctgtattgggtgcatgtatatttaggatagttagctcttcttgttgaattgattcctttaccattatgtaatggccttctttgtctcttttgatc

SEQ ID NO: 46922 - DNA, 201 bp, Homo sapiens
tgttaactttctgtctcgttaatctgtctaatgttgacagtggggtgttaatgtctcccattattattgtgtgggagtctaagtctctttgtaggtcactmaggacttgctttatgaatctggttgctcctgtattgggtgcatgtatatttaggatagttagctcttcttgttgaattgattcctttaccattatgtaat

SEQ ID NO: 46923 - DNA, 201 bp, Homo sapiens
ttctgttgatttggggtggagagttctgtagatgtctattaggtctgcttggtgcagagctgagttcaattcctgggtatccttgttaactttctgtctcrttaatctgtctaatgttgacagtggggtgttaatgtctcccattattattgtgtgggagtctaagtctctttgtaggtcactaaggacttgctttatgaa

SEQ ID NO: 46924 - DNA, 201 bp, Homo sapiens
gttttgagtgagtttcttaatcctgccttctagtttgattgcactgtggtttgagagacagtttgttataatttctgttcttttacatttgctgaggagtrctttacttccaactatgtggtcaattttggaataggtgtggtgtggtgctgaaaaaaaatgtatattctgttgatttggggtggagagttctgtagatgt

SEQ ID NO: 46925 - DNA, 201 bp, Homo sapiens
ctgtataatattgctttcattcacgatgtagaatttcatcatcacatattttgttttcattttaatctagaaactgtctttaatttccacctctatgtcastctaaaatctaatctactggaactagaatctaaaataatatgcagtcaatacaaatttctcttaaaaatgtaacatgttatatttcatggattttgctat

SEQ ID NO: 46926 - DNA, 201 bp, Homo sapiens
cagagattctggtatgttgtgtctttgttctcgttggtttcaaagaacatctttatttctgccttcattttgttatgtacccagtagtcattcaggagcargttgttccgtttccatgtagttgagcagttttgagtgagtttcttaatcctgccttctagtttgattgcactgtggtttgagagacagtttgttataatt

SEQ ID NO: 46927 - DNA, 201 bp, Homo sapiens
cacagagaaaataccatgcatatagcacatatggtgtttaaagtgtttcaggttttatatacaaaatattacaaatcaataaaaaaatttcactagaaaawtaggcaaatctgaaatagaaaatgaatatattaagaaatgccctgatttatataaataaacatatatatgctcaactgtactaataatcaaagaaaaatt

SEQ ID NO: 46928 - DNA, 201 bp, Homo sapiens
taagatgtaatgagtgaaatgtgtaccaggctctgaatcaggctcttacgctttactgcatatattcattcacttgtgtgttgagtgtctttatgtcattrtcatggcaattgctggagatatacacctaccctcacagcccaaggcttgagagaaagacaaataataagtaatcaagtaaagaagttgctactcatgcaa

SEQ ID NO: 46929 - DNA, 201 bp, Homo sapiens
tttcttgccttctgctagcttttgaatgtgtttgctcttgcttttctagttcttttaattgtgatgttagggtgtcaattttggatctttcctgctttctyttgtgggcatttagtgctataaattttcctctacacactgctttgaacgtgtcccagagattctggtatgttgtgtctttgttctcgttggtttcaaaga

SEQ ID NO: 46930 - DNA, 201 bp, Homo sapiens
acagtttctatttggaactgatttagccaagggaaaggaggctacatcgtagatgatagtaacatgttgaaagtagatgcatgctaacaattttagaatgaacaatgttttcggataatcattcactgcctattttggtttcaaaaatgattatccattatgaatgtcacctttattttgaaccttcaaaaaaatgaatac

SEQ ID NO: 46931 - DNA, 201 bp, Homo sapiens
ctctgatggtagtttgtatttctgtgggattggtagtgatatcccctttatcattttttattgcatctatttgattcttctctcttttcttccttcttagycttgatagcggtctatcaattttgttgatcttttcaaaaaaccagctcctggattcattaattttttgaaagtttttttatgtgtctatttccttcagtt

SEQ ID NO: 46932 - DNA, 201 bp, Homo sapiens
gctaacactgtgaagccccgtctctactaaaaatacaaaaaaattagccgggcacggtggtgggtgcctgtagtcccagctacttgggaggctgaggcagragaatggtgtgaacccaggaggcagagcttgcactgagccgagatcgtgccactgctctccagcctgggcaacagagcaagactccctctcggaaaaaaa

SEQ ID NO: 46933 - DNA, 201 bp, Homo sapiens
atttatccatttcttctagattttctagtttatttgcttagaggtgttaatagtattctctgatggtagtttgtatttctgtgggattggtagtgatatcscctttatcattttttattgcatctatttgattcttctctcttttcttccttcttagccttgatagcggtctatcaattttgttgatcttttcaaaaaacc

SEQ ID NO: 46934 - DNA, 201 bp, Homo sapiens
ttcaagcgactcccctgcctctgcttcctgagtagctgggattacaggtgcacaccaccatgcctagctactttttgcatttttagtatagatggagtttygccatgttggccaggctggtctcgaactcttgacctgaggtgatctgcccaccttgacctcccaaagtgctgggtttacaggtgtgagccacaaggatta

SEQ ID NO: 46935 - DNA, 201 bp, Homo sapiens
agatttatttttaattggctctgaaaacatggatttaaactccttgctattcatttgaaactgacctgtattcttatatgttggagaaaagttaaggagtrttgagcgtctaaaattctgttttcttgtttataggacaaagataatagattttaggaacagagtgggcatgcgaagcagcatatgatgtgatgtgcgcaa

SEQ ID NO: 46936 - DNA, 201 bp, Homo sapiens
tcaattaatgatgtggaacattttttcatatacctgttggccatttgtatgtcttcttttgagagatgactattcagatcatttgcccatttttaaatttsttttattcttctgttgatatgtcttatgtattctgtattttaatcccttgtcaaatagtatgaaaatatcttctatcattctgtaggttgtcttgtcact

SEQ ID NO: 46937 - DNA, 201 bp, Homo sapiens
aattacaactcacatgaaaagattggggagcaagccttttcaacttcttgattaacttcaattattggaagcagaaggtcttcagtatattttacataccrgaaaggagataccattaatatgttgctgagaggaataaaaagtttattaatctagagaggtggttaagaggaggtcttttaagacagcttctactatatc

SEQ ID NO: 46938 - DNA, 201 bp, Homo sapiens
tctgatatctgtgtatctcaacatagatttgctgcaatattttaatttcatcatgtctataactcaactaataattttgctcacccaaaccatatattttrtgttctttattttcatcactgaaataatcattaattaaatcatcaagccataaatttgagactgtccttgattccttcataattcttatctctcacattc

SEQ ID NO: 46939 - DNA, 201 bp, Homo sapiens
ttatatgttggagaaaagttaaggagtgttgagcgtctaaaattctgttttcttgtttataggacaaagataatagattttaggaacagagtgggcatgcraagcagcatatgatgtgatgtgcgcaattatgggcatgtccatgctgtgaatggctgcccttaaatgtgtgtagtgcaaaaggtgtgcagttctatgcag

SEQ ID NO: 46940 - DNA, 201 bp, Homo sapiens
ttaatctagagaggtggttaagaggaggtcttttaagacagcttctactatatcctatctatgatgttgggagatgtttctattacttttatagaaactarccccatcaaattttatgttttataaaacattttatataattttaccaacatggcacatatatacatatgtaacaaacctgcacgttgtgcacgtgtaccc

SEQ ID NO: 46941 - DNA, 201 bp, Homo sapiens
gattggtgaataaacctatattttaatatatatacacacatatacatacatatataatccatatattttgtgtatcagtgtttgtgtatataaatttttttcccaaagtttattggaggtttgtatgtgtgcgtgtgtataccgtgtgtttgcttttcctaggatttattcttctagactccaatacaatttccccaaatc

SEQ ID NO: 46942 - DNA, 201 bp, Homo sapiens
aaaagttatattaccatttttatttgcttcatttttcatttgcttaattattttatttatcataaggaatctttgagatcacaagtcagagaatctgaaarccaaaatctacagaaatatgcacatgctaacctctgtatcataatcctcaggtaacaactactctctacaaaatttgtgattaaaattcaaatctttatt

SEQ ID NO: 46943 - DNA, 201 bp, Homo sapiens
aagactcagtcatcatggaaattatgcttggcctgcattatggagtgcatccagttcttcctaatccattacatagaatgacattagctcttcaaatagamcctgccagatgctaaaagccattgtaggtttgtcacctatatttccccggagataattccttcttattcatagctttgtgtcctactactcaatctaatt

SEQ ID NO: 46944 - DNA, 201 bp, Homo sapiens
cagaaaattatccgggcctgatgatgcatgcctgtagtcccagctactcgggaggctgaggcaggggaatctcttgaacccaggaggtggagattgcggtragttgatatcatgccattgtactccaacctggtgacagagtgagactctgtctaaaaaaaaaaacaatctgcaatccatggactcagagtttctaaggtt

SEQ ID NO: 46945 - DNA, 201 bp, Homo sapiens
tctgtgaaccctattatatattgaatcaatgaatatgtactaatgcatgttatatgtgtatgatataaaccttttaccatgatgtatttgtatcacttggmcagatgcatatattagaaatcttaattgaataataaacataatgtcaagtaaaagtttgggaagttttttatctttagtacctgccccttttcattttgg

SEQ ID NO: 46946 - DNA, 201 bp, Homo sapiens
cttgtgagtgtgatacacttgtgttactgatgaggattatgaatcttaagcaggagtctgcccactccacaaccatatgaaataccacttaacatttttttgtaatcagtgccacaggccctttaaagctcatttctgataccacctgcaggtattttgggtaagtgatagatggaaggaataagcgcacacacattgtaa

SEQ ID NO: 46947 - DNA, 201 bp, Homo sapiens
gctgaggcaggggaatctcttgaacccaggaggtggagattgcggtgagttgatatcatgccattgtactccaacctggtgacagagtgagactctgtctaaaaaaaaaaacaatctgcaatccatggactcagagtttctaaggtttataaccctctgattattttgacagccttcatatatactccccctcaatgtatt

SEQ ID NO: 46948 - DNA, 201 bp, Homo sapiens
ttatgtactcttatttaatactcataaaatagtaggtttattattttatattattaaaaaaagaagaaaacgaagagtaatgatgttaagtgacttgattragatactaggacagagacattgaagcagtctggctccagagtacacactgttaattactgtgctatattgcctcctggtcatctgtttcccagtatgaaa

SEQ ID NO: 46949 - DNA, 201 bp, Homo sapiens
atgtgtatgtatttataaaaaaaatgaccaaagtacttgaatagacatttttctaaacaagacataaaaatagccaacgggtatatgaaaaggtgctcaaygtcactaatgagagaaatgcaaatcaaaccaaaatgagatatcacctcacacctattaagatggctgttatttaaaaaaaaagaaaaaaagaaaaacacc

SEQ ID NO: 46950 - DNA, 201 bp, Homo sapiens
ttttgtttttaagccatagccctagttaattgacctgtttctgatcacctgtaccatcttcttctttctcgttttaatcaaaagagaaaggaggaaggagaatgaatgccagaaatgagatgaggtcagggataggaaagagagtcaaggatgaggcagtgtcagaaatgactggcaggtttgtgccaagccaataaattt

SEQ ID NO: 46951 - DNA, 201 bp, Homo sapiens
atggacagctcaggctgtctcagcaggttttattattttattttttatttttatttatttattttttgacacaaggtcccactctgttgaccaggctggartgcagtgttgcaatcatggctcactgcagcattaacttctcgggctcaggcaatcctcccacctcagcctcctgaatagctgggaccacacctggctaat

SEQ ID NO: 46952 - DNA, 201 bp, Homo sapiens
atgtcatgtgcctcttgcaacatgtgtcagctgtaagtaaaagatggcttagtttaccttggcattgtcttcacttctaatttcattctctgaacctggcrtcgatcctagtgcatcttggcttcactctcatttcttaacatcaccccttcagaagcagactagactgggttgtgaagactaatgtatacctcaaaataa

SEQ ID NO: 46953 - DNA, 201 bp, Homo sapiens
agcaaaactccatctcaaaaaaaaaaaaaggtaaatatcattgagtactcatagttattaaaatatgcatatgtatgtgcatacccatgtatatgtgcacwtgtgcatatgtgtatgtatttataaaaaaaatgaccaaagtacttgaatagacatttttctaaacaagacataaaaatagccaacgggtatatgaaaagg

SEQ ID NO: 46954 - DNA, 201 bp, Homo sapiens
agttaattgacctgtttctgatcacctgtaccatcttcttctttctcgttttaatcaaaagagaaaggaggaaggagaatgaatgccagaaatgagatgargtcagggataggaaagagagtcaaggatgaggcagtgtcagaaatgactggcaggtttgtgccaagccaataaattttcaaagatattcctttcacttat

SEQ ID NO: 46955 - DNA, 201 bp, Homo sapiens
taactatgctctctataaataaataaataacataattatatagataatatatgataaacatatgagtataaataacttgagaaatagaaaccttaaagttkaagacatttggaaatttatcctggtttgtaaatgaattctactttgccatgtcctcttgattcaggataaagagtgcatgtttacaggtagtctgtgatg

SEQ ID NO: 46956 - DNA, 201 bp, Homo sapiens
gaatcgcttgaacctaggaggcaaaggttgtgagctgagatcatgactttgcactccagcctgggcaacaagagcaaaactccatctcaaaaaaaaaaaaaggtaaatatcattgagtactcatagttattaaaatatgcatatgtatgtgcatacccatgtatatgtgcacatgtgcatatgtgtatgtatttataaaaa

SEQ ID NO: 46957 - DNA, 201 bp, Homo sapiens
tcacctgtaccatcttcttctttctcgttttaatcaaaagagaaaggaggaaggagaatgaatgccagaaatgagatgaggtcagggataggaaagagagwcaaggatgaggcagtgtcagaaatgactggcaggtttgtgccaagccaataaattttcaaagatattcctttcacttatctgaataaaatgtccatggta

SEQ ID NO: 46958 - DNA, 201 bp, Homo sapiens
actctattttcttgatactgagtaatgctacattatattgatattcattcttatttagtctttccattattttgggacatttaggttatttccaaattttrttattatacataatgctacaatgaagatctttgcatataaatcactgtccacatttccttgttcttataaaaatttactaaaagtggaattaaattagaa

SEQ ID NO: 46959 - DNA, 201 bp, Homo sapiens
acacaatcatggtggaagcaaggaggagcaagtcacatctgatgtggatggcggcaggcaaagagagagcttgtgtagggaaactcccatctttaaaaccrtcagatctcgtgacactcattcactatcacgagaacagtgcaggaaagacctgcccccataattcaatcacctcccaccgggttcctcccatgacacttg

SEQ ID NO: 46960 - DNA, 201 bp, Homo sapiens
caggcagatcacctgaggtcgggagttcgagaccagcctgaccaacatggagaaaccccatctctactaaaaatacaaaattagccagggtggtggcacawgcctgtaatcccagctactcggggggctgaggcaggagaatcgcttgaacctaggaggcaaaggttgtgagctgagatcatgactttgcactccagcctg

SEQ ID NO: 46961 - DNA, 201 bp, Homo sapiens
gaagttccttcgaaaagataaaatgatgtaggaggctggttttcataaggaaatttaatattctaaaacatgtgtcctgtctgtttcttggcttcagttgkattcacagctgttatctaaggtagaaataatttcctttgtctgtaacagctaagtacattgaatgctgaaagtagtagaacatattatgttgctccatgt

SEQ ID NO: 46962 - DNA, 201 bp, Homo sapiens
ttcctttgtctgtaacagctaagtacattgaatgctgaaagtagtagaacatattatgttgctccatgttgtttatgcccatttgagtagcacaggacagrcagtgtagagaccatgagtctcaagcagcattctaatagtaattctaggagccttctaatagtaattctaggtgaaagaaataattacattttaaatatt

SEQ ID NO: 46963 - DNA, 201 bp, Homo sapiens
tctcttttgttttcctctgtttcttacatgtctggtatgttgctcattgataaatatttgttgaatgaatgtcttttatttttcctcaactgatttcacarcaactgagtgaagtaggcaggcaaagacaatttgtcctgtgttatagataacacaatcaaaattggaataataatgacttgtccaaagtgatgcagttat

SEQ ID NO: 46964 - DNA, 201 bp, Homo sapiens
aaaaaaaaccaagtaacttgatttaaaaaaaatgaccaaagtgggccagctgtggtggctcacacctgtaatcccagcactttgggaggccaaggcaggcrgatcacctgaggtcgggagttcgagaccagcctgaccaacatggagaaaccccatctctactaaaaatacaaaattagccagggtggtggcacatgcctg

SEQ ID NO: 46965 - DNA, 201 bp, Homo sapiens
cattatagcaaaatatcgtgtaagcaactacattttcataaatttgtttgtttccatgattgaaatgtgagcactctttaatgcttcctcattatgatttraaattatacattcacagtgctttctaaaaaattttaaagcagaagtatatcctaaaagatgaactttcttttttattttttttaaatgaagtatgctctt

SEQ ID NO: 46966 - DNA, 201 bp, Homo sapiens
ttggctagtaattgaaaaactgtttctgaaacttatatgcaaaggacctagaatagtcaaaacaactttgataaaaggcaaaatttggggactaagactgmctgatttcaaaactcattataaaactatggttatcaagatagtgtagtgttaaaggaaactcagaaaaatagatcaatagaaatgactagagtccataaa

SEQ ID NO: 46967 - DNA, 201 bp, Homo sapiens
cagcacaagaaatcatgtcagtttataaagccaaagagagacgacgacaacgacgacgacgatggctactactactactactactactactactactactwcttttcttttttttttttttttttttgaggtggagtttcactcttgttgcccaggctagagtgccggtggcatgatctcggctcactgcaaccaccacct

SEQ ID NO: 46968 - DNA, 201 bp, Homo sapiens
agacagaaaatgttcattcagaagatgggctaaaagtgggccttgcaagacttgcataggaagagtagtggggccatatggtccaattaaaaaaaaaaaaagataagctatcttttgacaacaatgagtagattaattgaatgaaagctgcatttaagagcgagtataaatatttgttgaatggaaggaaagaagaaaagg

SEQ ID NO: 46969 - DNA, 201 bp, Homo sapiens
tcttttagtacagtggaaagactaacagcctgtaaattttgagaataattcaactgcaccaattattggccctgtgttttggggtaagagctcaatttctytgagattaatgtgtcttcatagggttgttatgaagacaaaatgagataatttatgtaaaatgtggtttgtgaacttcaaaacactgcataactttatggt

SEQ ID NO: 46970 - DNA, 201 bp, Homo sapiens
catgtctattatcttttcatttatacttacaaaaaaagaagctttttaatttaagtctttctcccataacccattgtaagataccactctttttatttacyttctcaggacttaaaatctccaaatcagagagatgaaattgcaggagcccgagcttcactgaaggagaactctcccctcttgcattcaatttgttcagct

SEQ ID NO: 46971 - DNA, 201 bp, Homo sapiens
caccaccacacccagctaatttttgtatttttagtagagatggggtttcaccatgttggccaggctggtctcgaactcctgacctctagtgatccacccayctctacctcacaaagtgctgcgattataggtgtgagcctccgtgcccaaccctattttgctgtttgacagaaaatttttgattttgtaactgcctgagat

SEQ ID NO: 46972 - DNA, 201 bp, Homo sapiens
ctgaagtgcagtggcatgatctcagctaactgcaacctctgtctcctaggttcaagtgattcttatacttcagccttccaagtagctggaattacaggcaygcaccaccacacccagctaatttttgtatttttagtagagatggggtttcaccatgttggccaggctggtctcgaactcctgacctctagtgatccaccc

SEQ ID NO: 46973 - DNA, 201 bp, Homo sapiens
tagttttacgtgaagaagatttaagaatggttattttattttctctagatatatggctaaaattctaggagtgtgacattgggatgaacatttttctgccytaaagagggttagaagaattcttctgaattgtgtcttcttttagatttaagctaaatatcacaagagtcaagtaggataaagcttcttcatagtgtgcag

SEQ ID NO: 46974 - DNA, 201 bp, Homo sapiens
tagctgaatagagagcttatgtttaaaagttgagatcttatttttttttaatgaggctggccgccaacttcagaaaaattctccattccaattagcctgtragagacaaattgttaattccagtttaataatcttattttcctgaggtgtttttgtttttttttttattttttgagacagtctcactccgtcacacaggct

SEQ ID NO: 46975 - DNA, 201 bp, Homo sapiens
tctagctgaatagagagcttatgtttaaaagttgagatcttatttttttttaatgaggctggccgccaacttcagaaaaattctccattccaattagcctrtaagagacaaattgttaattccagtttaataatcttattttcctgaggtgtttttgtttttttttttattttttgagacagtctcactccgtcacacagg

SEQ ID NO: 46976 - DNA, 201 bp, Homo sapiens
tattctctcattaagtaattatttttctttatgtttaataagggagaaagtagcctattgcctcagattcaggagtaaagatgaaattcactgggaagacrttatgtttgaaattttccttagggttcctcttcactgggtgaattcagttttagtgataaagcctaaaagttctcaacatctctaaaaatattatctttc

SEQ ID NO: 46977 - DNA, 201 bp, Homo sapiens
tgcagggaggcaggcatcctggcacctgccacccactatgccacagctgttgctactgctgctactggcacttgtgagcaagaatgggtcccactgtcatygcactctgaaacactttggctgacaccacccgttggagtgtactgaccagtggtctgggagcacctcattctcccccacctccccagtgaagtggattcc

SEQ ID NO: 46978 - DNA, 201 bp, Homo sapiens
tatgttgtctcattgtactatctccattcaataaattttgttcacatctataatgtatttgggtgaaactatatgatttctaatattcctttcagttttaraatctcacaattctgtgggatccctatcagataatctcttggaccatgtgcagattgaacaaaattctggttaggaaccacactaatgcccagtgatgtt

SEQ ID NO: 46979 - DNA, 201 bp, Homo sapiens
ctgtaagatcattcttagcctgcatcttgggcatactgcacaactttttgaatacctagaaacaacaaattggaacatagaacaaagaataaaagtgcatkctggagcattgctggaaaataatgctgcattatgtaagaatctattgcattattgctacttgaaaggaagatttgactatttggttaatttgtttcttct

SEQ ID NO: 46980 - DNA, 201 bp, Homo sapiens
cagtggatgttgggtgaggaataaaatgacatagatatttctaaataattatatatttcatgaaatttattttaattacattatatttgcaaaattactarttacattgttgaaataaaattgtaatagcgttaagctttattactaataatgatctaaaggattaaaagcatgattattttccaaattttaaaaaattag

SEQ ID NO: 46981 - DNA, 201 bp, Homo sapiens
ggttggaatagtttcagaaggaatggtaccagctcctctttgtatctttggtagaaatccgctgtgaatccatctggtcctggactttttttggtttgtargctattgattattgccacagtttcagagcctgttattagtctattcagagattcaactttttcctggtttagtcttgggagggtgtatgtgtcaaggaat

SEQ ID NO: 46982 - DNA, 201 bp, Homo sapiens
gatacgtcccatcaatacgtaatttattgagagtttttagcatgaagggtttttggattttgtcaaaggccttttctgcatctattgagataatcatgtgktttttgtctttggttctgtttatatgctggattacatttattgatttgtgaatgttaaaccagccttgcatcccagggatgaagcccacttgatcatggt

SEQ ID NO: 46983 - DNA, 201 bp, Homo sapiens
tgatattggctgtgggtttgtcatagatagctcttattatttttagatacgtcccatcaatacgtaatttattgagagtttttagcatgaagggtttttgrattttgtcaaaggccttttctgcatctattgagataatcatgtggtttttgtctttggttctgtttatatgctggattacatttattgatttgtgaatgt

SEQ ID NO: 46984 - DNA, 201 bp, Homo sapiens
cccattcagtatgatattggctgtgggtttgtcatagatagctcttattatttttagatacgtcccatcaatacgtaatttattgagagtttttagcatgwagggtttttggattttgtcaaaggccttttctgcatctattgagataatcatgtggtttttgtctttggttctgtttatatgctggattacatttattga

SEQ ID NO: 46985 - DNA, 201 bp, Homo sapiens
ttttgtatcctgagactttgctgaagttgcttatcagcttaaggagattttgggctgagacgatggggttttctagatatacaataatgtcatctgcaaasagggacaatttgacttcctcttttcctaattgaataccctttatttccttctgctgcctgattgccctggccagaacttccaacactatgttgaatagga

SEQ ID NO: 46986 - DNA, 201 bp, Homo sapiens
tattggtgtataagaatgcttgtgatttttgcacattgattttgtatcctgagactttgctgaagttgcttatcagcttaaggagattttgggctgagacratggggttttctagatatacaataatgtcatctgcaaacagggacaatttgacttcctcttttcctaattgaataccctttatttccttctgctgcctga

SEQ ID NO: 46987 - DNA, 201 bp, Homo sapiens
tgagaatataatgaaggattatgctcactttacttgtttcttcagtcaaaactgatttgatatttacttgctgtgaggataccaataaactaagtgctgaraaggagagcatgattcaaatctttcagttgtttaactgtggttgaggatatattaaatagtgggattcttttataaaacaaggcaggaatatgttaagga

SEQ ID NO: 46988 - DNA, 201 bp, Homo sapiens
ttgtagtatagtctgaagtcaggtagtgtgatgcctccagctttcttcttttggcttaggattgacttggcgatgcgggctcttttttggttccatatgamctttaaagtagttttttccaattctgtgaagaaagtcattggtagcttgatgaggatggcatggaatctataaattacctggccagtatggccattttca

SEQ ID NO: 46989 - DNA, 201 bp, Homo sapiens
tcgttttaatcaaaagagaaaggaggaaggagaatgaatgccagaaatgagatgaggtcagggataggaaagagagtcaaggatgaggcagtgtcagaaaygactggcaggtttgtgccaagccaataaattttcaaagatattcctttcacttatctgaataaaatgtccatggtattaccatcactgggttattatagc

SEQ ID NO: 46990 - DNA, 201 bp, Homo sapiens
agggctctgttctgttccattgatctatatctctgttttggtaccagtaccatgctgttttggttactgtagccttgtagtatagtctgaagtcaggtagygtgatgcctccagctttcttcttttggcttaggattgacttggcgatgcgggctcttttttggttccatatgacctttaaagtagttttttccaattctg

SEQ ID NO: 46991 - DNA, 201 bp, Homo sapiens
aatgccagaaatgagatgaggtcagggataggaaagagagtcaaggatgaggcagtgtcagaaatgactggcaggtttgtgccaagccaataaattttcaragatattcctttcacttatctgaataaaatgtccatggtattaccatcactgggttattatagcctttttcattatactttctaacccataatgttttaa

SEQ ID NO: 46992 - DNA, 201 bp, Homo sapiens
gcttcgctgctattaattgatattcattttccccctatttctttttataacatagatgttcatgtcttgagatttttcatttccatatatattttcagaawtggagtatgataaaacttaatagatttagaggaattttcataaattctttggtggccctgagttttaagctgctataaattaccatggtagaactaatgt

SEQ ID NO: 46993 - DNA, 201 bp, Homo sapiens
gtagatatgtggcattatttctgagggctctgttctgttccattgatctatatctctgttttggtaccagtaccatgctgttttggttactgtagccttgkagtatagtctgaagtcaggtagtgtgatgcctccagctttcttcttttggcttaggattgacttggcgatgcgggctcttttttggttccatatgacctt

SEQ ID NO: 46994 - DNA, 201 bp, Homo sapiens
cttatctgaataaaatgtccatggtattaccatcactgggttattatagcctttttcattatactttctaacccataatgttttaaaattatctttattayattttactttctttaattgacaaaatgtatatatttattgtgtacgagataatgttttgaagtatgtataaaaatggaatggctaattaacttatgcact

SEQ ID NO: 46995 - DNA, 201 bp, Homo sapiens
cattccttacactttgaaagggaccttccagaaggtccctttcaaatactaattttttttttttacaaactattcgctagagcttagtcatactgttatawttcactgcaaggtatgctacaaaatataaattttgtatgtttgtttgtgtgttaatcctgcacattgctttccccagtgtaatcagagttctgtttctat

SEQ ID NO: 46996 - DNA, 201 bp, Homo sapiens
tagctttctacatatcgctagccagttttcccagcaccatttattaaatagggaatgctttccccattgcttgtttttttcaggtttgtcaaagatcagakggttgtagatatgtggcattatttctgagggctctgttctgttccattgatctatatctctgttttggtaccagtaccatgctgttttggttactgtagc

SEQ ID NO: 46997 - DNA, 201 bp, Homo sapiens
acgagataatgttttgaagtatgtataaaaatggaatggctaattaacttatgcactacctcagctagtggcaggccctctacttcagagtctgatctgcttttttttttttttgattattattgtaaccactgtttattaaagacttctggcctctggtttctttaaaatattttcaatctctaaccctttcttctctag

SEQ ID NO: 46998 - DNA, 201 bp, Homo sapiens
tctttttaaaagcagtatcagtattatggtgaaggcaaaaattgtatcatgatcagttgagtactgagtatgcaatgacagataaaatatggtggcacagrctcaattttccaaaagtttgaagttgaaaggaataaaagagagagaaagaaagaaagagatacttgagggtcagagcagacagagtcaccaaaagcattt

SEQ ID NO: 46999 - DNA, 201 bp, Homo sapiens
aattgtacatagttgtttgtcccaaaggagaaaagaatgtgatgttacatttattctttagttttctgatatagagaaaagaaggttggatgcatcatgcmaggtcatcctgagtcagtaacaaattcagaattaatattcacatttcctaatatccagctttttgcaatagccatttgatcattttcactacttcataaa

SEQ ID NO: 47000 - DNA, 201 bp, Homo sapiens
cgagataatgttttgaagtatgtataaaaatggaatggctaattaacttatgcactacctcagctagtggcaggccctctacttcagagtctgatctgcttttttttttttttgattattattgtaaccactgtttattaaagacttctggcctctggtttctttaaaatattttcaatctctaaccctttcttctctagg

SEQ ID NO: 47001 - DNA, 201 bp, Homo sapiens
agagtgcagatacctcttcaaaatactgatttcatttcctttggatatatactcagaagtgggattgctggatcatataatagttctatttttttaaaatmtattttaggaaccttcatactactgttcatagtggctgtaccaatttacattcccaccaaggttcccatttctctacaagcattcccatttctgattaca

SEQ ID NO: 47002 - DNA, 201 bp, Homo sapiens
gtagtcataaacccaagtattcaaaaaatagaggttttttctcgaaataatttctgttttgagacagaatggcaaaaactaaaccttagccatttggcagytctctaatttatggggctttccatattgccaagggatgacgacctttatgcttccatttcatctgacatttgctgagactcattatcctttctagtcatt

SEQ ID NO: 47003 - DNA, 201 bp, Homo sapiens
gttctatacatagcccattgaattaaagtctgtaattaagaaccatagccgtatttatctcttacacggcatgttacagctcaacctgccctgaacaaaayaaataacactttaaattacaaattgcagatctgtgctcaacaaagaggagctcttttccagtgtatattattgattatgttttccttgggtaatttttgt

SEQ ID NO: 47004 - DNA, 201 bp, Homo sapiens
ttcagagtctgatctgcttttttttttttttgattattattgtaaccactgtttattaaagacttctggcctctggtttctttaaaatattttcaatctcwaaccctttcttctctaggtctttttctgtaggatccaatgcaataatttaagatgctatttgctgacaggagatcccaagaacccattatggaaatgaag

SEQ ID NO: 47005 - DNA, 201 bp, Homo sapiens
gttgagtactgagtatgcaatgacagataaaatatggtggcacagactcaattttccaaaagtttgaagttgaaaggaataaaagagagagaaagaaagaragagatacttgagggtcagagcagacagagtcaccaaaagcatttttgtttgttaacatttttatttatatactgcctaaagtggcagtaattgagaaat

SEQ ID NO: 47006 - DNA, 201 bp, Homo sapiens
atttagcttaacatttttagtatcacttatgggattttagcaagatgccacaatatgaacttgtaatattgcatttcttttttaactgtattattacaaayctgattttaaatcatttttttctattttagttacagcattaatacaggctaaaattctctatataaattctgctcatattagtatagcacctggtagcac

SEQ ID NO: 47007 - DNA, 201 bp, Homo sapiens
acaccaacttttaatataattcatacttttgtaatcaatataagtgagtgaagaagtaataaggaataagtatttttgtttaatggtagtcataaacccargtattcaaaaaatagaggttttttctcgaaataatttctgttttgagacagaatggcaaaaactaaaccttagccatttggcagctctctaatttatggg

SEQ ID NO: 47008 - DNA, 201 bp, Homo sapiens
ccaagaagaattctccaatagagtagtaaattttaaatggaaatgtttgtaattatttaatgagaaaacatgcttttttttccatttccagaatggaaaakatgttctttccaaactttaatacttcataactttagaaaataaataatttaattttaatatagtaattcatgaagttcgtatagttaatttatgttttct

SEQ ID NO: 47009 - DNA, 201 bp, Homo sapiens
gggagaagggaaggatccatatggttgggtttgccctgccttggtgtctttctctggagacatctatcaccactgtcaagagatttgttctccttcctttrattctgaaaactggaattttgttatagtctctctccaaatctgtacttttcttactttatttataaagcgtactttttcccctttattaagccatctctt

SEQ ID NO: 47010 - DNA, 201 bp, Homo sapiens
aacaaggtatgcatttaaaactagaggtaatttccctttcatcagcccagggtttttaaactgggaaacatagtattttgaggggaagggtactttagctkctccttagatataacactgtctatcatttaaaagatgagagccttagctgctctccttagaaacaatctttgtccattgtttaagacttgaaaaattgat

SEQ ID NO: 47011 - DNA, 201 bp, Homo sapiens
aatatggtggcacagactcaattttccaaaagtttgaagttgaaaggaataaaagagagagaaagaaagaaagagatacttgagggtcagagcagacagartcaccaaaagcatttttgtttgttaacatttttatttatatactgcctaaagtggcagtaattgagaaatgtttaggtaaagaaaaaaaagcgaccagaa

SEQ ID NO: 47012 - DNA, 201 bp, Homo sapiens
acatttttgtcttaaaaacagagagtaaataactctgggtttaagatatctaacatgtttgacctttgttatgctaaaatagtgggctagaattggatccrtaaaaaaatgatcggatgtttatccagggaaggaatcttaagttagacttggtattaaccaatgtgtgataagtaaggtaccacttgtgaacatgtggtt

SEQ ID NO: 47013 - DNA, 201 bp, Homo sapiens
catgttttacaagcccaaggggtcttaaagagtgggcattgaaatgaccgtgtgtcacctacgtataagaacaaatatactagttgatctcatttcaattsttgtttgtaataaacaacaccaacttttaatataattcatacttttgtaatcaatataagtgagtgaagaagtaataaggaataagtatttttgtttaat

SEQ ID NO: 47014 - DNA, 201 bp, Homo sapiens
cttttcttaccttaaatgtgtggtaaaattgctacagtatttctaaatggcctttccagcttgaattcattcttattttcctgttctgacctctagctaaycaagtaatataattaaaatctgaagaaatagcaaaatggtcagtttttgagcataacagttccatgggggaaatcacactttaatgtttaccttttgcta

SEQ ID NO: 47015 - DNA, 201 bp, Homo sapiens
ggatgttgggtatgtgatcctgccctgtgcccagaggacaatgggaatatttgtgaacagccttaataactattacattccctttgccttctttttagggkttccttttgttaagtctccataatgctctcaagacactttggcacccttgttacagctaactttatcagggtgggcaactgacttagtgacactcagtta

SEQ ID NO: 47016 - DNA, 201 bp, Homo sapiens
aacatgttttatctgtgagcccatggggttgtcctgtcacagatatggccattgctcatgccatgcatgctacccaggaacttaatgaaccacatggcccratactgccactgccagaacccaagaaagccacctggaggtccaagaattagccttcttagacctaattacattcgtgcccatgcacgctgcctgtgggcc

SEQ ID NO: 47017 - DNA, 201 bp, Homo sapiens
gatatgagcactctattcaagtttcattttagcaatagaacaaaataaggatgtccacatctcaatcacttttctcaacattgcttagaagagaaaataasctaagttcacagcaagtttttgagatcatgaacagagatagcatatgatagacattttttaccagagccaagctccaggacattgtctggatcttggaac

SEQ ID NO: 47018 - DNA, 201 bp, Homo sapiens
tacatattcacacctcttaatatgtacttcatgttttacaagcccaaggggtcttaaagagtgggcattgaaatgaccgtgtgtcacctacgtataagaasaaatatactagttgatctcatttcaattcttgtttgtaataaacaacaccaacttttaatataattcatacttttgtaatcaatataagtgagtgaagaa

SEQ ID NO: 47019 - DNA, 201 bp, Homo sapiens
gtccagatttaaaaaactattacagtaacagatgacacattctaaaaattttaagaaaccttctcttagaagtggaataacagccaggtgtggtggtgcgygcctgtggtcccagctacttgagaggctgagtgggaggattgcttgggcctgggaggtggaggttgcagtggtgagctgtgatcacgccactggcactcc

SEQ ID NO: 47020 - DNA, 201 bp, Homo sapiens
caaaattaatcaaacagcacaccaaaaagataacacatgttaatcaagtgggatttatccttgggatgcaaggatgattcaacatacacaaatcaataaaygtgatacatcatatcaaaagaatgaaagattaaaaaatgtgatcatctcaataggctcagtaaaagcatctgataaaattcaagatcttttcatgatgaa

SEQ ID NO: 47021 - DNA, 201 bp, Homo sapiens
tgtgacagatggtaactggaaaattgggacactcccaccctaatactgtgcttttccaatggtcttagcaaatggcgcaccaggagattatatcccacacmtggctcggagggtcccactcccacagagcctcactcactgctggcacagcagtctgagattgaactgcaaggtggcagcaaggctgtgggaggggcgtct

SEQ ID NO: 47022 - DNA, 201 bp, Homo sapiens
gccgtgggtttcaagcacaaaactgggaggccgtttgggcagacactgagctagctgcaggaattttgtttcataccccagtgacaactggaatgccagcragtcagaactgtttgctcccctggaaagggggctgaagccagggagccaagtggtgtagctcagcggatcccaccccaacagagcccaacaagctaagat

SEQ ID NO: 47023 - DNA, 201 bp, Homo sapiens
ttggtattgtacatattcacacctcttaatatgtacttcatgttttacaagcccaaggggtcttaaagagtgggcattgaaatgaccgtgtgtcacctacrtataagaacaaatatactagttgatctcatttcaattcttgtttgtaataaacaacaccaacttttaatataattcatacttttgtaatcaatataagtg

SEQ ID NO: 47024 - DNA, 201 bp, Homo sapiens
tacttcgttctattcaccagagtgattcctctaaataaaacagttgatgttttagtgctcaaacatctgcaatagttcttatgatctgcagcctccatacmtttctgactttctctcttactatgctctttgtagctcactctgccctgcttacactggcctccttgctgttctgccactgcttttctgccttaggcttct

SEQ ID NO: 47025 - DNA, 201 bp, Homo sapiens
acaaatcaataaacgtgatacatcatatcaaaagaatgaaagattaaaaaatgtgatcatctcaataggctcagtaaaagcatctgataaaattcaagatmttttcatgatgaaaactctcaagaaagtagatttagaaggaatataccccaacataataaaggccacatattacaaactcacagctaacatcatactgat

SEQ ID NO: 47026 - DNA, 201 bp, Homo sapiens
ataatgagatagtgtagtaaattatgaaaggctgggaacgtggcttcagtaaaggcagaaagtcctttattattatttttaaacctatctttctcctaacygtaaacataagccatatattcatgaatacaacccccaccagtgtgtgaggccagtctattaaaaataaaaaggcacataggagtctgtcacaccgcaaga

SEQ ID NO: 47027 - DNA, 201 bp, Homo sapiens
acacataatttataatttgagatgtattgtcatatttctcttcaagaagttcatatcagtttataccccttcaacagtgtatactaagagcttatgttccyaacacttaaacagcactgatgataccatatcaaaaattttcaattttggctgcttggtgaaaataatatcttgttttatttgatttgcatttaattaatt

SEQ ID NO: 47028 - DNA, 201 bp, Homo sapiens
aaatcaaactcttaacataaaagctatgctgtacaaatattccttttgcgagcttttttttttttttcccccacgttgagctaggtgaagcttctgaaacaggaaatcaaagaaatctggcctgaaaggcaacccccgccttttaaaaaaacaaaacaaaactacctttaaaaagcacaggcatttttattgcttcaagga

SEQ ID NO: 47029 - DNA, 201 bp, Homo sapiens
tggatattccctgtctttattgtgaatctcagcttgtatcacatgtttattatttagcatttgagcatctgcagagaacttagcaccatccttccctttcyaagatttgcagcacatatgtggctaataaatacgaagctggatgatataaacaactccattggctctgtttcagctctaccactgttggaccttgacaag

SEQ ID NO: 47030 - DNA, 201 bp, Homo sapiens
agggttcagcttaagtatcacttccttacagtggatttctctgattaatctaatgtagactttcgcctcttcatagcagttatcactgtaggaaattatcytgcacatttgatctttaagttgtttattgcctggcttctccattgggacataagcacattgtctctcttgatattaagtggcactcaataaacacttgtt

SEQ ID NO: 47031 - DNA, 201 bp, Homo sapiens
cctgtattctaaactgcctaggggaaataactgatataattttgaagtacatatttttggatattccctgtctttattgtgaatctcagcttgtatcacawgtttattatttagcatttgagcatctgcagagaacttagcaccatccttccctttctaagatttgcagcacatatgtggctaataaatacgaagctggat

SEQ ID NO: 47032 - DNA, 201 bp, Homo sapiens
gcatatagtgtatggaggcatttttgctaaaagtaaaaaggagtattttaagtaagtagtatctattcactgcttattcaatctctccctacccctaagcrttatccttaattttttttaatctacaaatagaattgaggctaataaggcctttagatgtaggttcttaaggcacctgcgaaaaccaaaaaccattgagtg

SEQ ID NO: 47033 - DNA, 201 bp, Homo sapiens
gccagtggaggagacattttttgccaagggggatgtcttactgtcaaaacctataacagttatgccttggatgattggtgttatctagctgttaactgaastatgcacagaaaactgacactttcgcaggcttttttggtgttgctatttcttcctggatccaagtgctggagtggctctttggtgcttagtgcagtcagt

SEQ ID NO: 47034 - DNA, 201 bp, Homo sapiens
aaagaaacacactctgctgtgccatagcgttagtaagccaatgaaagttgatggtatattcaaatgtctcttgctgtgtgtgtgagagagagagagagagrgagagagagtgagagcgattaagagagagactgatttgacatttattaataacttctccatattttatattcagaaaaaactgctaatcagtttcagcta

SEQ ID NO: 47035 - DNA, 201 bp, Homo sapiens
aaggcaggcagatcacttgaggtcaggaattcaagatcagcctggccaacacatggtgaaaccctgtctctactaaaaatgcaaaaattagcttggtgttrtggtgcacgcctgtaatcccagctactcaggaggctgaggcaggagaatcacttgaacctgggagacagaggctacagtgagccaagactgcaccactgc

SEQ ID NO: 47036 - DNA, 201 bp, Homo sapiens
tagagctccaaaggaaagaaacacactctgctgtgccatagcgttagtaagccaatgaaagttgatggtatattcaaatgtctcttgctgtgtgtgtgagwgagagagagagagggagagagagtgagagcgattaagagagagactgatttgacatttattaataacttctccatattttatattcagaaaaaactgcta

SEQ ID NO: 47037 - DNA, 201 bp, Homo sapiens
taaaaatgcaaaaattagcttggtgttgtggtgcacgcctgtaatcccagctactcaggaggctgaggcaggagaatcacttgaacctgggagacagaggytacagtgagccaagactgcaccactgcactccaggctgggtgaaagagtgagtgaaactctgtctcaaaacaacaacaacaacaacaacaacaccccaaa

SEQ ID NO: 47038 - DNA, 201 bp, Homo sapiens
tcactatgggtcttggaacacataccttgtctataaggggggactattgcctatataaaatatattgaaaattcagatacagcatatagtgtatggaggcrtttttgctaaaagtaaaaaggagtattttaagtaagtagtatctattcactgcttattcaatctctccctacccctaagcgttatccttaatttttttta

SEQ ID NO: 47039 - DNA, 201 bp, Homo sapiens
tatagagctccaaaggaaagaaacacactctgctgtgccatagcgttagtaagccaatgaaagttgatggtatattcaaatgtctcttgctgtgtgtgtgwgagagagagagagagggagagagagtgagagcgattaagagagagactgatttgacatttattaataacttctccatattttatattcagaaaaaactgc

SEQ ID NO: 47040 - DNA, 201 bp, Homo sapiens
tgttttctactgtctctgtgaaagtatggaatgaacagggtctaataccctggaataccacctggcagtatctgctacacattactttaatcttcaactgrttaatcggaccaagttttcttttctggatttttaaaatgctggatttctattgagcaacaaattatgtcttcaggtctccgtgaagggactttttgcatt

SEQ ID NO: 47041 - DNA, 201 bp, Homo sapiens
gttgtaagaacaaagaagtgaacacattttcgtcttttttattctctcaaaaagtaatcctctgtctaaaataaattatatatacatttttccttttttgwaagagaaggattttcttggaatgtgataatattctttcttataaaatgcaaattctcatgaatatccaacttcattttttaaagttacctgatttgttcc

SEQ ID NO: 47042 - DNA, 201 bp, Homo sapiens
ggctgcatatttctgcatgattgtatattattcaagaacttattcatttatgtgctcttttggtaacatttaaacagtaattttaattattatgaacaacrttaagcatatttttgtctatttgctatctccttcatatagacttcacaaagtaaattcagtcaacaccttatattggaaaagccttttgtaatttgactg

SEQ ID NO: 47043 - DNA, 201 bp, Homo sapiens
acaacttaagcagttcaaaacataaacaagaaacagaaaactcatgtaaaggttacttaaataacaaaaacccttccttatctcatatacctagatgtttkatatacttggctttagggttactagccctagcaaacggaggacttgggtaggagcagttaagctatgtggagagggatattttcatggctaacattattt

SEQ ID NO: 47044 - DNA, 201 bp, Homo sapiens
ccctctagatcttttttgtaccagcctagatgctgtaggtccaaaataaaaccaatgaatagatgggttacctttttttttttttttttttttcagataaytaatcatagtttgaatagctgtgatgagaattggcacaatcttgcatcttctgtaggggacagattttcttagaaaagttacagatgtgtttaatagcaa

SEQ ID NO: 47045 - DNA, 201 bp, Homo sapiens
gtagttactatttgtgcaacattttataaatacatacacacataatgccttagcctgaacctgctcctgctgctataacaaattactttagagtggataawttatttatttatttctcatagtcctggaggctgagaagtacaagttcaaagacccagcagctctggtgtcaaatgagggctctctccctgcttcagagat

SEQ ID NO: 47046 - DNA, 201 bp, Homo sapiens
aaagctctagtattcagaaaggcaatttctttctccacttttatgtctaccaagttactgtgagacttttagaaaggttttatagcttttactttcagaartggaatactttacttaatttttcaaagagctcaaagacatacacctgtattgggaataaatacacattgcctgtttgcaatatcttgcatccatgtagca

SEQ ID NO: 47047 - DNA, 201 bp, Homo sapiens
atcctgccctggggcctaattgctgctgcatctccacatcacaggtgcacagcctacatcccccgacaccatcccagaaggttgcagtgttacattaccarctgaacctaatggtgccacagggtctctgttacctgagcccacacagagacctaaatcccagggaataggcagtcctgcacgtcagggaggctctcccca

SEQ ID NO: 47048 - DNA, 201 bp, Homo sapiens
tggccgcttgaatcccaagttccacacaggaagaggaggggccaggctcttccttgctgcaaatggactggaacctctgtgtgactgcacccgagtgcacsttcccagtgtgcagacctgtttggagttttgccagggaccccctcacacctggctgtctcactatcacctaaatgattttgatcatggtctttaataata

SEQ ID NO: 47049 - DNA, 201 bp, Homo sapiens
tgataatgacttgaggtgatgaatgttttaattaccctgaatttataatcacacactgtatacatgtatctgtcacttggtaccccataaatatgtttcayttattatgtgtcaagtaaaattgaaagaaaaaaagagaaaaatgaacaaaatgtaataacaaaggcctttttgtccatgacatcatagtgagcatgacct

SEQ ID NO: 47050 - DNA, 201 bp, Homo sapiens
aataacaaaggcctttttgtccatgacatcatagtgagcatgacctttggcttctacaaagttttaatctaaatttgacaaagaaaatggaaaataaattkattttccatgttctttcataagctgatgccaaaaaacacataataatgttagcaagagcaaaatgttaaaattaactgcatcaaaactaagcactattaa

SEQ ID NO: 47051 - DNA, 201 bp, Homo sapiens
tcatataagtgtctggatgcaatgctatcccctctgccattttagggtgagaatataatgaaggattatgctcactttacttgtttcttcagtcaaaactkatttgatatttacttgctgtgaggataccaataaactaagtgctgaaaaggagagcatgattcaaatctttcagttgtttaactgtggttgaggatatat

SEQ ID NO: 47052 - DNA, 201 bp, Homo sapiens
gaatgaaagaaaatacaatgaagaaaaatacacagaatttgctttgagagaactcacaatctggtgtatatgaatcagatttcaaaagaattgtatttgtyacgtaaacaaaatcttttacaattaatgctgctgtactgtcaggatactgaggaaatatttttaaagaaacagctgttcagctggattattgaattgaac

SEQ ID NO: 47053 - DNA, 201 bp, Homo sapiens
atctcgactgactgcaacttctgcttcctgagtagctgggattacaggcatgcgccaccatgcctggctaatttctgtatttttaatagagatggggtttyaccatgttggccaggctggtctcgaactcctgacctcaagtgatctgcccacctcggcctcccaaactgttgggattacaggcgtgagccaccgtgccca

SEQ ID NO: 47054 - DNA, 201 bp, Homo sapiens
tattttgaagccaggtcgtgtgatgtttccagctttgctgtttttctcaggattgctttggctattcagggtcttttgtggttctatgtaaattttaggattttttttttctatctatgtaaaaaatgtcattggtatttttctatgggttacactgaatctgtatattgctctgggcagtatggacattttaacaatatt

SEQ ID NO: 47055 - DNA, 201 bp, Homo sapiens
gcatttgggctgattccatatttatgcaattgcaaattgtgctgctataaacgtgtgtgcaagtatctttttcgtataatgcctttttttcctctgggtaratatctagtagtggggttactagatcagatgatagttctactttcagttctttaaggaatctccacactattttccatactggttgtactagtttacatt

SEQ ID NO: 47056 - DNA, 201 bp, Homo sapiens
tactagatcagatgatagttctactttcagttctttaaggaatctccacactattttccatactggttgtactagtttacattcccaataacagtgtaaargtgttcccttttcactgtatccatgccaacacctttttttgttgttttgttttttctgatcatggccattcttacaagagtaaggtggtatctcgttgtg

SEQ ID NO: 47057 - DNA, 201 bp, Homo sapiens
tttcagttctttaaggaatctccacactattttccatactggttgtactagtttacattcccaataacagtgtaaaagtgttcccttttcactgtatccakgccaacacctttttttgttgttttgttttttctgatcatggccattcttacaagagtaaggtggtatctcgttgtggttttgatttgcatttccccgata

SEQ ID NO: 47058 - DNA, 201 bp, Homo sapiens
aagggggatgtcttactgtcaaaacctataacagttatgccttggatgattggtgttatctagctgttaactgaactatgcacagaaaactgacactttcrcaggcttttttggtgttgctatttcttcctggatccaagtgctggagtggctctttggtgcttagtgcagtcagtagcatcttggttcctctgaagcatt

SEQ ID NO: 47059 - DNA, 201 bp, Homo sapiens
ttacattcccaataacagtgtaaaagtgttcccttttcactgtatccatgccaacacctttttttgttgttttgttttttctgatcatggccattcttacmagagtaaggtggtatctcgttgtggttttgatttgcatttccccgataattagtgagttgaacatttttttcatatgcttgttggccatttgtatatctt

SEQ ID NO: 47060 - DNA, 201 bp, Homo sapiens
tcttcatatataaaacaaaggaatttctcttaaggtagcaaatggctattatctatttccacaaatgtagaacaaaatcagaggacaaagctcttattcargcataaatatgcttgagtgcagctagcagttatttggcactttctctatctcaggttatgctaatcactttacttattatttcctgtaatccttgaaata

SEQ ID NO: 47061 - DNA, 201 bp, Homo sapiens
gtccatgtgttctcatccttcagctcccacttataagtgagaacatgtggtgtttggttttctgttcctgcattagtttgctgaggataatgacttccaaytccatccatgtccctacaaaggacgtgaacttgttcttttttatgactgcatagtattccatggtatatatgtaccacattttctttatccagtctatca

SEQ ID NO: 47062 - DNA, 201 bp, Homo sapiens
gttgcctttaaaaagttgggtgaagaaaatcaggaatcaggaatcaaatcagaaatgggtgaaagcgaagagtaaactacctcataaaacatagacatttrctgtagttggcctcatatgcctttatgctctcattttaagtaaaaataaatgaaagtggaaaatacagaaaagtacatatttatagtgagtgaatcacta

SEQ ID NO: 47063 - DNA, 201 bp, Homo sapiens
aatgtaaaacaaaatcattcagcatgaaaaagtgttgctcaattttcagcaaggttttcttatgctactatagagctccaaaggaaagaaacacactctgstgtgccatagcgttagtaagccaatgaaagttgatggtatattcaaatgtctcttgctgtgtgtgtgagagagagagagagagggagagagagtgagagc

SEQ ID NO: 47064 - DNA, 201 bp, Homo sapiens
actgtatccatgccaacacctttttttgttgttttgttttttctgatcatggccattcttacaagagtaaggtggtatctcgttgtggttttgatttgcawttccccgataattagtgagttgaacatttttttcatatgcttgttggccatttgtatatctttttttttttgagaatcgtctattcatgtccttagccca

SEQ ID NO: 47065 - DNA, 201 bp, Homo sapiens
gctctgttgataatttcctttgcagaagctcttctgtttaattagatcccacttctcactttttttttggtaaatggttttgaggatttagtgataaattrtttcccaaagtcaatgtccagaatggtgtttcctaggaaatcctatagtttgaggtcttacatttaaatatttaatccattttgagttaatttttatatg

SEQ ID NO: 47066 - DNA, 201 bp, Homo sapiens
agttttttggggacagttttaaatgagttctcacaagtcatttaaggttttgttcctatccaattataaggagtaggaatagggaaatgaccttcatttcrgagatggctggtgaaaacaaatacattaatgctagtttataacccttatttgctctataacaatggaacattacagttggtcacttaaaacttgctaatc

SEQ ID NO: 47067 - DNA, 201 bp, Homo sapiens
ggaactcttcattcaacaaatacttacggaccacctactgggagcatccatgaagctagggtgaggcaggggcagggagtggggatttagggggtactcartggagcagttctgagaaataagaattttaaggcctaagttttattagaaggaaaatcggaggtggtgtgtcctggcagaagaaacagaatttgtggagga

SEQ ID NO: 47068 - DNA, 201 bp, Homo sapiens
ggtatctacccaaaagaaaaggaatgaatatatcaaagagatgcctgtgtgcatatgtttattgcagcacaattcacaattgcaaagatatgcagtcaacytaaatgtccattaactgatgagtggataaagaaaatgtgatgtatgttatcatggaatactactcagccataaaaagaatggaataatgtattttgtggc

SEQ ID NO: 47069 - DNA, 201 bp, Homo sapiens
tgcctttcaggagcttagacagctttatttaagttgaactttctctagagatgcattgaaataatgaaatgcaatgccttacttgaacataaccatgtacrtaacatctagtcctgcctgatgtgtaaatttgataagagcaactcaaatattataatgattaatgttgatttttttattacaaagcaatctttgtcagca

SEQ ID NO: 47070 - DNA, 201 bp, Homo sapiens
ccacgtgattatggcagtttatttttttttacatatgctgttgaatttagttagctagaattttgttggggatttttgcatctattttcattagggatatktgtctatagttttcttttcttttttttttttgttatgtccttccctggttttgttactagagttatactggcttcataaaatgatttaaggaggatttcc

SEQ ID NO: 47071 - DNA, 201 bp, Homo sapiens
ataggaatgtgccaaattccccattaggcaaagtgcagctgaaggaaaaaaacagagctggatgcagacatcctgatgttcacgagttgagctgaaagccrgggaaaaacacagaagaaaaggggagagaagacaaaaaaaaaaatcaagtagctgtagattctaggatagtaaagtgctggcgtcaaaatctataaaggc

SEQ ID NO: 47072 - DNA, 201 bp, Homo sapiens
atgagttagaaaggagtcctatcccttctcctcagttttttagaatagtttcagtaggattgctataaactcttctttgtacatctggtggaattttgackgtaaattcttctggtccagggcttttttttttggttggtgggctttgtattactggttcaattttggaacttgttattggtctgtccagggtttcaatct

SEQ ID NO: 47073 - DNA, 201 bp, Homo sapiens
attctgttctttcacttaaaaggggataatgatatcaactaatgtttgttgagcccctgccaggtgtcagagatattggctaagttaatggattttatatrgattttcttaggtaatctttaagatccttttgaggtaggtactcttattattctcattttatggattaggaaactgatgttcaggaaagatcagtaattt

SEQ ID NO: 47074 - DNA, 201 bp, Homo sapiens
ctgaatatatgttccaaacatattgcaaacattagactatttcttttctaccctctgtaccctctttctaaattggtaattatttcttctttacctactamtgtacctcttcttctttaagtcatcaatgtaaaaggaaggcagtgcccaaattttctttggacccttaattcctatctactcacccaaaaagtcctgttg

SEQ ID NO: 47075 - DNA, 201 bp, Homo sapiens
gatcattttgggtgtggtctcctctttggagagtgcctcaagcctttaacttaattactctcttacaaggtagatctgttcagaatgggtatttttacttmattatattctatcatgtgattttctctgtagtatgtccttatactttaaaatattattttaggcttagtaaaattaatattactctctttaacaggcagc

SEQ ID NO: 47076 - DNA, 201 bp, Homo sapiens
cttaatatggatatttgatgaacactttgctgttgaatatgcactttagtagtggccctattttttgtgactgcagagttataaataaaataaaatgataygtacattaaaaaattttttaactcttttgtaaggatggggtcttgctatgttgcccaggctggtcttgaactcctgtcctcaagccatttttccacctgg

SEQ ID NO: 47077 - DNA, 201 bp, Homo sapiens
gcagtttatttttttttacatatgctgttgaatttagttagctagaattttgttggggatttttgcatctattttcattagggatatttgtctatagtttkcttttcttttttttttttgttatgtccttccctggttttgttactagagttatactggcttcataaaatgatttaaggaggatttcctctttctctatcc

SEQ ID NO: 47078 - DNA, 201 bp, Homo sapiens
tgtgtgtgtgtgtgttccctagcaaaatcaatgaaattccatattttcccttttgattactaatgtctgaatgttattaatagcaaatcaataactcctartaataattattaaacattgatttttttcatgctttcatctgttccacagtttctcatctgcagcactattgactttgggggctggataattctttgttgt

SEQ ID NO: 47079 - DNA, 201 bp, Homo sapiens
gtggaattttgactgtaaattcttctggtccagggcttttttttttggttggtgggctttgtattactggttcaattttggaacttgttattggtctgtcyagggtttcaatctcttcccgattcaatcttggtaggttgtttccagaaatttatccatttcctttagattttctagtttatgtgcattgaggtgttcata

SEQ ID NO: 47080 - DNA, 201 bp, Homo sapiens
gaattatgctaaacccacactgtcctctataaatgaaacaacaaagcctagatggcagcatgtctgtttactgcatgttgtactaaatattttaaacccarcgttgaaacctgctcagaacaaaagattcctttcaaaatattgctcattgacaatgcacctggtcacccaagagctctgatggagatgcacaaagaaata

SEQ ID NO: 47081 - DNA, 201 bp, Homo sapiens
acatccttaaggagccataactattccaagagatggatgacaatctttaacttgtgaactaggggtgggaggatgtgaggtgggataagcagtgccctttmtattttttcctatgcctccttgcccagtaaacagactttctttccttttaaagagctggaggtataaaaatttaatttgggaaaattatgtaggtggacc

SEQ ID NO: 47082 - DNA, 201 bp, Homo sapiens
ttaataaatttgtaggcttgcaaagtagaaggagccttagactggagccctggttacatgggaagagggattctatttggcactttccacgtaccctgggraaataacataaagacattaagaccactgcttttttataacaatggaaagtagagattagtcattcatcagatgatcactctaatgaacatctcgttaatg

SEQ ID NO: 47083 - DNA, 201 bp, Homo sapiens
ctgggtgacagagtgagacattgtctcaaaacaaaaacaaaaagcataaagaagatgatgaattcactagaaattgggcctcctataataagtgtattttmttctctgggtttctagattaagagatgaagggaattatgcaaaaaaggatggtgtgtagaggattacaatgtgttaggtatagtcaagattttcttgtgg

SEQ ID NO: 47084 - DNA, 201 bp, Homo sapiens
tgatgacagagctggatgttagaattttgtagtttgtgttgtgtaagtgacagatgaagccagagcactgtctactgttgtccaagaagagaatgaaagtwaaaaaaaaaaaattgctcaggaacaaaagctgagaacaacaacacgtgcaaggaaaaaaaaaaatgcttacaatacagtctgggaaggctggtgtaaaac

SEQ ID NO: 47085 - DNA, 201 bp, Homo sapiens
atcaataactcctagtaataattattaaacattgatttttttcatgctttcatctgttccacagtttctcatctgcagcactattgactttgggggctggwtaattctttgttgtggggggcttccttgaacattgtagagtgtttaacaacatttccagtctccacccactctgatgccagtggccatccctttacctgg

SEQ ID NO: 47086 - DNA, 201 bp, Homo sapiens
atatactacattttctttatccatttggccattggtagacatttagggtgattccatatcttggctattatgaataatggtgcagtgaacatgagagtacrtatatctctttgatatactgatttcatttcccttggatatatacacagtagtgggattgctgattatatgatagttctattttcaattttttaaggaacc

SEQ ID NO: 47087 - DNA, 201 bp, Homo sapiens
taagcaaatattccaaagttattattaaatgactagacaaacggtggcaaaattttgggtaatcaaattaggtaagaagaaatatgtgctgggggtggagmtaagatggccggataggaacacctccagtctacagctcccagcatgggtgatgcagaagatgggtgatttctgcatttccaactgaggtaccaggttcat

SEQ ID NO: 47088 - DNA, 201 bp, Homo sapiens
ttagaattttgtagtttgtgttgtgtaagtgacagatgaagccagagcactgtctactgttgtccaagaagagaatgaaagtaaaaaaaaaaaaattgctyaggaacaaaagctgagaacaacaacacgtgcaaggaaaaaaaaaaatgcttacaatacagtctgggaaggctggtgtaaaactaggagaaaatctaagag

SEQ ID NO: 47089 - DNA, 201 bp, Homo sapiens
ctctgacaaccaatcgctaataactgactgagagaaggatataaagctcaggctccttgcttcaagatggaaccaactctgctgtacaatttcacaacccrctctgaggtcaggtaaagctagtctcagacttagattaataattttcttattagttccaggccctacctccccatgcttttttcttccctccccttctga

SEQ ID NO: 47090 - DNA, 201 bp, Homo sapiens
tgaattgttttctgggagaactccacaggaataacaattgacataaacctcggaaatgacaggaactattcaaatgtttgtttaaattttgcagatttgtwgtcatttaggcttggaatcataagcctcatggacatagaaggtgggacacacatgatgttactgagaaattaagatttaatatacttaaaaatattgggg

SEQ ID NO: 47091 - DNA, 201 bp, Homo sapiens
atttgtagggcaggttggcaggctggaaactcaggcaggatttctatgttagtcttaaggcagaatcccttcttatgggggatacctcagttttctgtttwtttttttttctgtttttatcttttgcttttatggcttccaacttactgggtgaagcccacctacattatcaagggtaaactctttaattaaagtcagttg

SEQ ID NO: 47092 - DNA, 201 bp, Homo sapiens
aatagtctttgtggtataaatctgaaataccagaaataattagcaagtgtatataaacaaaaccaagttacgatcagtgttcaaaccatagcacttatttmcacacacacacacacacacacacaagagaagtcagatttttagagccccttgcctctggattggttcaaacacagagccctttaatacttgtcattcaac

SEQ ID NO: 47093 - DNA, 201 bp, Homo sapiens
aataacaaatggtaacatgaataacaaatggtaacaaatggtaacaatgtcctaacctaggggtctgtaaaagacagaaatgttcaaatagacatttcttyattgaccctcaataaaacctgaagttacattaaatttcaacttagtgaaggctctttagcacggatttgtggtaataatatgacctggaaatgttacttt

SEQ ID NO: 47094 - DNA, 201 bp, Homo sapiens
tgcttgttttggattttttcctttgaacagcaggcatcataaattgataaaactttactagaaaagttgattctagcctcatcgttttcctctcttttcckttcctttcctcgtctataatctagaatatacaaactctcttattgtgaaatacttggggagggcagctttgaaaccatctttctattgcatgagagtatt

SEQ ID NO: 47095 - DNA, 201 bp, Homo sapiens
attgatatccagttcaaaaaggaatttcagtattagatctctcagtcatgagtcatttgttcattctgggaataaacaacattgtcttgctttattattaytttttattacacagttgaattaaattggctaatatttcatctacaaattcatgtttaaattaataggaacgttgcctgatagctcttctcctttgtctaa

SEQ ID NO: 47096 - DNA, 201 bp, Homo sapiens
attgcaacatttaggattattgagacagagagaaagagtttagaatcattcctaggattctgcgttagataatgctatgatgagtaacagaaaaaaaaaaaggttaatacaggtgaaagtacttttatatcccttcatttcacattcacagaaactataaaagtttggtgccaatgtagctgtacaacttgttggcttttg

SEQ ID NO: 47097 - DNA, 201 bp, Homo sapiens
catttggcaaccttgggccttatttcatcatggcatcatcacttatgaattagctaaagctggggtggagctgccttctttatctaggacatctagtcttrtgctcaatgctgtccctgggccagcttcactcattcatgttacctgtgcagctcccggggaagaacatgtgagctatgatgaaacaggggcccctgctga

SEQ ID NO: 47098 - DNA, 201 bp, Homo sapiens
agaaatgttcaaatagacatttcttcattgaccctcaataaaacctgaagttacattaaatttcaacttagtgaaggctctttagcacggatttgtggtartaatatgacctggaaatgttactttctgatgatctagctaatcacaaaaaaaaacactgacaaccataggggaataagtgcattaagttgtctctgcaat

SEQ ID NO: 47099 - DNA, 201 bp, Homo sapiens
tagaccatagcttgagaattgctgttctaggaagaacttgcctcttttcctagtaaattttagtgagacagaaagcctgataatttttagtatccaagtastgtaaattctgtaaattcagcatgtttaatcaaattactcactgatcttgctttcaatgccagcttcatacatcaccaactcacaaatcatataaagtac

SEQ ID NO: 47100 - DNA, 201 bp, Homo sapiens
attcttggctgataattgttttgtttgacaaggctgaagatagggtcccaattgcttcttacttgtagggtttctggtgagaaatctgctgttaatatgayaggttttcctttgtaggttacctggtgcttctgtctcacagctcttaagattctttccttcatcttaacttcggataacctgatgacaatgtgtctagga

SEQ ID NO: 47101 - DNA, 201 bp, Homo sapiens
atgaaaatcactgtcctcacaaagcttacattctctttattataagtttattttattatattattaatgatatttacattatattattatatttaattatwatattacagttttattataaatttatttaccataaattactacatatacaaacatgtattgctgcacagtttcatatataatggggagcatactgtattt

SEQ ID NO: 47102 - DNA, 201 bp, Homo sapiens
tgtaaactgtcatgacactggtgggagtgtcttttagcatgctaatgcattataattagcctttaatgaaaagtgaggacaaccagaggtcacttttgatrccatcttcattttggtaggttttggccggcttctttaccccaatctgttttatcagcaaagtctttgtgacctgtatcttgtgccgacttcccatctcat

SEQ ID NO: 47103 - DNA, 201 bp, Homo sapiens
tcctgatcaacactcccattctgggaagttggggcctcagaggctactggagagcaggtctttttgttttcttttcttttcttttctttttttgagacagrgtctctctctgtcacccaggctggagtgcagtggcgcgatctcggctcactgcaacctctgcctccgagttcaagcaattctcctgcctcagcctcccaa

SEQ ID NO: 47104 - DNA, 201 bp, Homo sapiens
aaagacttaaatgttagacctaaaaccataaaaaccccagaagaaaacctaggcattaccattcaggacataggcatgggcaaggacttcatgtctaaaamaccaaaagcaatggcaacaaaagccaaaattgacaaatgggatctaattaaactcaagagcttctgcacagcaaaagaaaataccatcagagtgaatagg

SEQ ID NO: 47105 - DNA, 201 bp, Homo sapiens
acactcaggaaaatctattctctcaaatttcctgggcagctagcaccaattctctgtttatgaaaacatcaaccacagtttagcattttttttttttttttgagacagggtctcgctctgtcgtccagtctaggctcactgcaagctccgcctcccaggttcacatccttctcctgcctcagcctcctcagtagctgggac

SEQ ID NO: 47106 - DNA, 201 bp, Homo sapiens
tacactcaggaaaatctattctctcaaatttcctgggcagctagcaccaattctctgtttatgaaaacatcaaccacagtttagcattttttttttttttttgagacagggtctcgctctgtcgtccagtctaggctcactgcaagctccgcctcccaggttcacatccttctcctgcctcagcctcctcagtagctggga

SEQ ID NO: 47107 - DNA, 201 bp, Homo sapiens
aatctaaaggccgtgttttcatttgtgccaaacagtattttgttggaggatgttacaattattagcttctaaaaagttgtttgatttaattcacataattrtttgaaattaatgccattgcctggatcagtcttcaaaatgttgtatgaacattttattgaaactgacataacattttaaacaaaggattaatattctttt

SEQ ID NO: 47108 - DNA, 201 bp, Homo sapiens
taaattgcaaagcaaaaggctggcgcagctaagaaatattggctgaatattttccatttgtccctccacatcccctttctctcctcctatggtcctaggaraacatcgatggggcaggctcctttgttctctggcttctggttgggcaaggctaatgagaggcactaggaggtgattagaggccaggagcaaaatgatgtc

SEQ ID NO: 47109 - DNA, 201 bp, Homo sapiens
ttagtttaaatctttttctctgtctattcagtttctctctagagaaataatagaaatagttcttggactaatttttattcttaatagtctctcttttggtrgaattaattctatctatctatctatctatctatctatctatctatctatcatttaatatgtattgccatcacaaataccacatttctcttatattccaaa

SEQ ID NO: 47110 - DNA, 201 bp, Homo sapiens
gggattacaggcatgcgccaccatgcctggctaatttctgtatttttaatagagatggggtttcaccatgttggccaggctggtctcgaactcctgacctmaagtgatctgcccacctcggcctcccaaactgttgggattacaggcgtgagccaccgtgcccagccaaaatgtttatttgaagcatggaagacagaattg

SEQ ID NO: 47111 - DNA, 201 bp, Homo sapiens
aaaaatacaaagaggacaatcttctccttattctttattttaacagtaattcctgaatttgtaacacaagtgaatgttgccttggaagccttaagcaaaarctcattgaatgtgttggatgataatcaatttgtggacatctcaaagaagatctatgatacaattcatgatatcagatgttcagtcatgatgattcgggta

SEQ ID NO: 47112 - DNA, 201 bp, Homo sapiens
attagtaaaaggcccttagaggagttaaaatgaaatcattttgcactaatgaaaaggctgtgttgtatttttttgtaagattccttaaatctttcttgcarttacttcacagggcagtgaaaaacagatctttacatgactttaaatttttctttttttgccaaaatctacataggaagatggtgggaactgtatcaataa

SEQ ID NO: 47113 - DNA, 201 bp, Homo sapiens
ttttgctccatctgagacctgtgtgaaatcaagtggtttttaaaagtcaagttagctggtttgttctgatgtgtttggtctttaaaaattcatattttgtyggctgggtgcggtggctcacgcctgtaatcccagcaccttgggaggccgaggtgggtggatcacgaggtcaagagatcaagaccatcttggccaacatga

SEQ ID NO: 47114 - DNA, 201 bp, Homo sapiens
aagccttaagcaaaaactcattgaatgtgttggatgataatcaatttgtggacatctcaaagaagatctatgatacaattcatgatatcagatgttcagtmatgatgattcgggtaagtttgcttttccttccattgaattattgcaatgttcttcaccatctggaatgcctgggatgactgcaagaaatgctttatttct

SEQ ID NO: 47115 - DNA, 201 bp, Homo sapiens
tctttcttgcagttacttcacagggcagtgaaaaacagatctttacatgactttaaatttttctttttttgccaaaatctacataggaagatggtgggaastgtatcaataatagcagattgaaagtattaatagacagaattaaattattactgtattgcacacttgtttggtatatgagaaaaagcattttttagtggg

SEQ ID NO: 47116 - DNA, 201 bp, Homo sapiens
ttagataatataaaattttgtctagaattcaagtgggatgtctttattttttaatttttttttttttacttttgctccatctgagacctgtgtgaaatcargtggtttttaaaagtcaagttagctggtttgttctgatgtgtttggtctttaaaaattcatattttgtcggctgggtgcggtggctcacgcctgtaatcc

SEQ ID NO: 47117 - DNA, 201 bp, Homo sapiens
tacttaactatgtctttggagtgaatagagcatatcacagaggctagaagccattttgtcctgttctttagagtagtagttttgacggttggtttgctgtmtactccagaacctgaaggaaatgtgaaataactggacacattttcttagatgttccctcctcttttaacactacaaaagtaatgattgactcattaagca

SEQ ID NO: 47118 - DNA, 201 bp, Homo sapiens
ctgttttcatcttaggaaattaaaaatgtatgctcacagatatttcactcaaggcattttgttcagctagtaaatattgtttttttcttctttctttcagmggataaaggatatgtctcatcagtttatgtggtttaaaaaacatttccattagataatataaaattttgtctagaattcaagtgggatgtctttattttt

SEQ ID NO: 47119 - DNA, 201 bp, Homo sapiens
attcttgtgggatgttaataaggaatgtcttaaactatgcaataattcctggaggatagagaggttattaactctttgcaattctttttacataagcaaakattccaaagttattattaaatgactagacaaacggtggcaaaattttgggtaatcaaattaggtaagaagaaatatgtgctgggggtggagctaagatgg

SEQ ID NO: 47120 - DNA, 201 bp, Homo sapiens
ttggtttgctgtctactccagaacctgaaggaaatgtgaaataactggacacattttcttagatgttccctcctcttttaacactacaaaagtaatgattractcattaagcagatttgaatgttcctataagcctgcataaatatatttttggagcttttcagttgttaacaaaaccaaaatcacatttaaatgcaagct

SEQ ID NO: 47121 - DNA, 201 bp, Homo sapiens
atttagagactgaagtgctgacctgactaacctccatggttatatctgtggccctgtggcccaggtgtccctatattatcccgctaatgccccctattccyatatggtgagatcagtgcaacagttttaaatcctgggatgaaactgcttaattctttactagaagattcggataagtagtagcctacatggttctgaaaa

SEQ ID NO: 47122 - DNA, 201 bp, Homo sapiens
aagctttagctattaaattatattttatatgctgggtaatgtttaatacaaccagatttcagtaaaatgctataaccacagggatgtgattcatatgcatrtttcagaaataggaggattgaacagaaatataaaaggactgcccgtggtcataaattagaaattacatcaaggaaattttatcggatacattcgcagtgc

SEQ ID NO: 47123 - DNA, 201 bp, Homo sapiens
caaaaataatgaataggactcaaactaaaaagcttcttcacagcaaaataaataatcattacagtaaacagacaacttaaaaactgaaatgtggacaaaasacatgaatagatatttctcaaaaaatatacaaatggtcaaaaacatatgaataaatgctcaacatcactaattgtcaaggaaatgcaaattaaaaccaca

SEQ ID NO: 47124 - DNA, 201 bp, Homo sapiens
gtattaacatgatgtgttcataaaacaacttattgagtgtccatcatttgagagatactataatacttaatgctaagagcaggtgccattcataagattayacttaaaatgaacctgagaatgagcagaatttagacatgggaagaactatgctgtggatggaaatagtagatgatgatgaatagagacagtggggctaaa

SEQ ID NO: 47125 - DNA, 201 bp, Homo sapiens
gcccagataactaaaatacatttttatgtaaaagtaaatgtgcagcatgaatagatttgagttatagaagagaacaaaaatagaactgttactgggtacaygagttttacattatcctctgggaaatcagtgctctgtaatgtgttatgggtcatatatctgtaggattttatatacttgtccttattcgtcatggaaact

SEQ ID NO: 47126 - DNA, 201 bp, Homo sapiens
acctgagaatgagcagaatttagacatgggaagaactatgctgtggatggaaatagtagatgatgatgaatagagacagtggggctaaaaattctcaatgkatttgggatatatttacatagtagagcagatggcacttagtaggtatttggatgtaaggaataaagaagtataggaggtcagataaaacacctgggtttt

SEQ ID NO: 47127 - DNA, 201 bp, Homo sapiens
aatttaaaatttgaggctaatgaatttaatttttaatagctatatgcagctagtagccaccttttattagacaatgtgcctagagaatagacagagaatargagcacagtggataatgtcagcaggtatggtggctcagaagtagggtataagtgatacattttggcagctagaggaaagaaaggaccagataaaaagagt

SEQ ID NO: 47128 - DNA, 201 bp, Homo sapiens
atggtggctcagaagtagggtataagtgatacattttggcagctagaggaaagaaaggaccagataaaaagagtgcccatgtatatcatcaaaatttcctmatatcaataacatggcaggcagaattgcaagagatggtatgccatacaagcagatacaacttaaatgtagaaaaataacatttattgatatttttatacc

SEQ ID NO: 47129 - DNA, 201 bp, Homo sapiens
tgttttgttattttaaagatagttttcatatgagaatgccaattccttttcactaattttttttattatagagaaaacatcttactaaaaggaagtttacratatttttattatttctataaggcagaattactacttttaactaaattttcttctgtttagcaactcaattgctttctttctttaaatatctttgtgttt

SEQ ID NO: 47130 - DNA, 201 bp, Homo sapiens
caaatgcaaatagagtatgtaacataatggccattggcagaatttttattttaaaataagcattcttgcagaagccaatattgcctcttaactaattactrttaaccaaagcattcaaatagatgcaaagctgtcactgctagatttagtatttaaaaacataaaagatattgctattcatgttgggaatgttttcatgta

SEQ ID NO: 47131 - DNA, 201 bp, Homo sapiens
cttggatcttcaccttctggataaaatatatattgcaataactatatggccgtgctaggatcacatctgtcaaaaggatgaggatattcacgtcagctttyttgatacctgctcacatcagcatcttgttttaggggctccatacagatcaccacctttgaaacaacttttctttttggagaaaggtttatgctacagcca

SEQ ID NO: 47132 - DNA, 201 bp, Homo sapiens
aaagttattttaaagcaaatgttacttgagaaacaacagtaaagggcaagaatgttctaccaacctagagaccgaagtttttctgtcactttcacgtaaaratttaaaaggtgggaaaagcattgttcgatgtttttaaatttaattttttttgtaaaaattgtacatatttaaggacttaagatatacaatgtaataatc

SEQ ID NO: 47133 - DNA, 201 bp, Homo sapiens
gagaaacaacagtaaagggcaagaatgttctaccaacctagagaccgaagtttttctgtcactttcacgtaaaaatttaaaaggtgggaaaagcattgttygatgtttttaaatttaattttttttgtaaaaattgtacatatttaaggacttaagatatacaatgtaataatcaacaaaattaaaagacaacctatggtt

SEQ ID NO: 47134 - DNA, 201 bp, Homo sapiens
aatatatatttaagatatacaaaatttgaataaaataaaagtattgattatatcacatttattgatgattgtcatatatttctttcccagcatcttttaattttttttaacccagagtccagaatgtatttatctttaatgcatctaaaaaataatttcaacttttatttagattcagtgggtatattgcatgatactgag

SEQ ID NO: 47135 - DNA, 201 bp, Homo sapiens
aattagtttctcaagcctttactcccttcctccctcccctgtctagtaatcctcagtttctattgtggccatctttatgtccatcattacccattctttasctcctacttgtatgtaagaacatatggtatttgggtttttgttcctgcattaattcacttgggataatggcctccagctgcatccacattgctgcaagag

SEQ ID NO: 47136 - DNA, 201 bp, Homo sapiens
tcaatgtattattctgaaatagacaaccctagtacaccagaatcatcttcatggtccctcaccctcactctttccttgggcaggacttaaagcacagcatytttagagttcagaaccattgctcctataattcgtgaagtatcaatcaagtttgtccaaagaaaggacattatcctaaggcatttctgcagataggcagtc

SEQ ID NO: 47137 - DNA, 201 bp, Homo sapiens
tcccctgtctagtaatcctcagtttctattgtggccatctttatgtccatcattacccattctttagctcctacttgtatgtaagaacatatggtatttgrgtttttgttcctgcattaattcacttgggataatggcctccagctgcatccacattgctgcaagagacataatttcattcattcctttttatggctgtta

SEQ ID NO: 47138 - DNA, 201 bp, Homo sapiens
taaatgcaccaatcagcaccctgtgaaaacagaccaatcagctctctgtaaaatgggccaatcaacaggatgtgggtggggtcagataagggaataaaagsaggctgcccgagccagcggtggcaacgtgttggggtttccttccaggctgtggaagccttgttctttgtggaagctttgggtctgctttgggtctgcacc

SEQ ID NO: 47139 - DNA, 201 bp, Homo sapiens
aagaaatcacatttggcctgagtctcccagtggatgtcacttcttttaacttgtaggtttacttacactcaggaaaatctattctctcaaatttcctgggmagctagcaccaattctctgtttatgaaaacatcaaccacagtttagcattttttttttttttttgagacagggtctcgctctgtcgtccagtctaggctc

SEQ ID NO: 47140 - DNA, 201 bp, Homo sapiens
atggtgatgacttgcatagcacattactgcattaatgtaagtatttttgcctgtcaaacattaaatatggataagatctgcagtgtcatttggttcacttygctactactgaagcattgcttctccataatacatgctggcccactgttcccagtccaatttaaactataagtaatgatggtgtatttctacttcctttgg

SEQ ID NO: 47141 - DNA, 201 bp, Homo sapiens
tgtttttgtgccagtatcatgctgtgtgtgttactgtagccttatagtgtagtttgaagtcaagtaatatgatgcctctggcttctttttttttttttttyccccccttaggattgcttgtctattcaagatatttcttggtttcatatgaattttagaatagttctttttctagttctgtgaaaaatgacgttggttgct

SEQ ID NO: 47142 - DNA, 201 bp, Homo sapiens
aatagacgtttgcatatgggaaaagctagattgctttagttcttcttttctctttgactttggcctaagctttccaatacagccagaaaaattttccctgwataacttgttttcagcatgtttatcatatagaggaaacataagctcagttgtgaattgaacttacttacatatgtatttcttaaataaccacgagaattc

SEQ ID NO: 47143 - DNA, 201 bp, Homo sapiens
tgtatggaagaaatcacatttggcctgagtctcccagtggatgtcacttcttttaacttgtaggtttacttacactcaggaaaatctattctctcaaattkcctgggcagctagcaccaattctctgtttatgaaaacatcaaccacagtttagcattttttttttttttttgagacagggtctcgctctgtcgtccagtc

SEQ ID NO: 47144 - DNA, 201 bp, Homo sapiens
gtttttgtgccagtatcatgctgtgtgtgttactgtagccttatagtgtagtttgaagtcaagtaatatgatgcctctggcttcttttttttttttttttycccccttaggattgcttgtctattcaagatatttcttggtttcatatgaattttagaatagttctttttctagttctgtgaaaaatgacgttggttgctt

SEQ ID NO: 47145 - DNA, 201 bp, Homo sapiens
actagaaaaaattctttggagactaatgctaatttaaaaaggagaaaactatgtttaattcacagtgtaacaattttataagattttataagtatgcagargtttctgcattctaaaggacaatcttttcttaattttgctctaggtattcactggttacaagactttaacttggtgtacagaactgaactctgattaact

SEQ ID NO: 47146 - DNA, 201 bp, Homo sapiens
ctatcaaattaccaacactattttttacagaattagaaaaatcaatcctaaaattcacatggaaccaaaaaatagcccaaatagtcaaagcaacctaaacraaaagaacaaatctggaggcatcacattacctaacttgaaattttactacaaggctaacgtaaccaaatcagcatggtactggtataaaagtagatcaat

SEQ ID NO: 47147 - DNA, 201 bp, Homo sapiens
agtcaagtaatatgatgcctctggcttcttttttttttttttttccccccttaggattgcttgtctattcaagatatttcttggtttcatatgaattttaraatagttctttttctagttctgtgaaaaatgacgttggttgcttgataggaatagcattgaatctgtagattgctttgagcagcatggccattttaacga

SEQ ID NO: 47148 - DNA, 201 bp, Homo sapiens
agtagaaggagccttagactggagccctggttacatgggaagagggattctatttggcactttccacgtaccctggggaaataacataaagacattaagaycactgcttttttataacaatggaaagtagagattagtcattcatcagatgatcactctaatgaacatctcgttaatgagaagagatagtgagatcaatac

SEQ ID NO: 47149 - DNA, 201 bp, Homo sapiens
gatgcatgcctaggtgttttatttatttatttatttgcagctattgtaaatggagttgagttcttgatttggttctcagcttgaatgttattggtgtataraaatgctattgatttttatacaatgattttgtatcctaaaaaattactgaagtcgtgtctcagttccaggagccttttagtaaagtattttatgttttct

SEQ ID NO: 47150 - DNA, 201 bp, Homo sapiens
tccaaagcaatctacagattcaatgcaatttctatcaaattaccaacactattttttacagaattagaaaaatcaatcctaaaattcacatggaaccaaawaatagcccaaatagtcaaagcaacctaaacaaaaagaacaaatctggaggcatcacattacctaacttgaaattttactacaaggctaacgtaaccaaat

SEQ ID NO: 47151 - DNA, 201 bp, Homo sapiens
ttttttttttgagacggagtctcgctctgccgcctaggctggagtgcagtggcgcgatctcagctcactgcaagctccgcctcccgggttcacaccattcycctgcctcagcctcccagctgggactacaggtgcccgccaccatgcccggctattattttgtatttttggtagatggggtttcacagtgttagccaggat

SEQ ID NO: 47152 - DNA, 201 bp, Homo sapiens
tatgaaagagtcagtatatgttgaacaacataatctataataacatcagagtgaatagtggccattaatataaaaaacacataataaagtgatatgttttkcctgttttctgttatgttggagtaagtgtgagagcagaacatgcctgtagtttatagattaacaatgttttaaactaatctggggctagaggtcatcaaa

SEQ ID NO: 47153 - DNA, 201 bp, Homo sapiens
actttgaaacagagtaatgactgtatatttcttcaaatccctttacaatactgagaacagtgctcaggatatggtaggttacatatacacatatttgttgwttacaggtttaactttctaatttattggtctcagaagtagtgagataaaatattgaaacaatgatgatgcaaattagccaaaaggtgatagcgattttca

SEQ ID NO: 47154 - DNA, 201 bp, Homo sapiens
ggaatcaaatactccaggatacaatatctacctaattctgagggcaattcattttctaaacttgctccagaaataactgtttcccctcagcttcaacataytcattgagatggcccctgatcattgctttccttcaaaatctttgcaggatatttgaatcagcagcctccctctttttaatgttcttagttcttatcaaag

SEQ ID NO: 47155 - DNA, 201 bp, Homo sapiens
aacatcatactgaatgagaaaaagttcaaagtatttcccctattaactgaaataagacaaggatgctgacttttatcccttctattcaacatagtacaggraatcctagccagagcaatcagacaagagaaataaataaagggcattcgatttgtaaaacatggagtcaaattatctttgtttgccaatgatataatctta

SEQ ID NO: 47156 - DNA, 201 bp, Homo sapiens
gcaagtgagtaaaagggcataattagagggataaccttgaagccactccaatttgtgagaaaacagtaaatcattttctaatttcaatatttgaactattrttattactatcaaattatggctcttgtgagacatgtcacaaataattgaaatgcaccaatgtgtctggacccctaggttaaaagctttcttctagaggac

SEQ ID NO: 47157 - DNA, 201 bp, Homo sapiens
aaataaaaataaaaataaaaaaggacttaaatgaaaaacccaaaactgtaatataaaaacgctagaagaaaattaggcaataccattcaggacataggcayggggcaaagatttcatgatgaaaacacccaaagcaattgcattaaaagcaaaaattgacaaatgagatctaagtaaaccgaagagcttctacacagcaaa

SEQ ID NO: 47158 - DNA, 201 bp, Homo sapiens
gcgggaaacagaagttgcaatgacagaggttgcaccactgcactccagcctgggtgacggagtgagactctgccaaaaataaaaataaaaataaaaaaggrcttaaatgaaaaacccaaaactgtaatataaaaacgctagaagaaaattaggcaataccattcaggacataggcacggggcaaagatttcatgatgaaaa

SEQ ID NO: 47159 - DNA, 201 bp, Homo sapiens
tgggtaggcctaacctcaggtccccgagaggagtggtcatatgtcatcagtggtgaactaaactgggagattccctggcccctggactgtatgctgtggcwtggggatgatggggaaacctgggctaggctggcttatcttcaggcccccagatggcatgtacaggcactggccatggtagtcaggagcggggtgatcccc

SEQ ID NO: 47160 - DNA, 201 bp, Homo sapiens
ttgtagtcttttatccctcgcccccttccaccctttcccctgagtccccaaagttcactgtataattcttatgcctttgcatcctcatagcttagctcccrcttataagtgagaacatacaatgtttggttttccattcctgagttacttcacttagaataatgatctccaattccatccacattgctgtgaacataatag

SEQ ID NO: 47161 - DNA, 201 bp, Homo sapiens
actaagacacaacttccacctcccccagtccagtctttctaataaccaaaagtgccttcacacatttccataaacctcccagtaaagtgatgttgccccasttaagaaccagtgggagggcatagtctgtggaaaggtaagttgtagcccttagtgccaagtgaaggggtttagatcagtttcatagatttggtttagtta

SEQ ID NO: 47162 - DNA, 201 bp, Homo sapiens
ttattatatgcagtttacaataaagagtattatatgttatttgtaaattgtgttacgtggcctggcgcggtggctcacgcctgtaatcccagcactttggraggccgagaaggacggatcacaaggtcaggagatcgagaccatcctggctaacatggtgaaacccccgtctctactaaaaatacaaaaaattagccaggc

SEQ ID NO: 47163 - DNA, 201 bp, Homo sapiens
cttagctattaacagctttgcagcagtttacagataaaatggaaatgagagacttacgtgccagagttatgcttaaatttccgaggaaagaaggaagtagrgaagacacaaaaagaaggaagggagggagggaaggagggaataaagaaaaagcatgccactgggaaagtcacccatattggctgaagtttgctttgactt

SEQ ID NO: 47164 - DNA, 201 bp, Homo sapiens
gcagaaatttgcgtaagtaatgaggagccaaatgttaagcaccaagacaatggggataatgtctccagggtatgtcagaggtcttcatgggagccccttcyatcacaggcctggaggcctaggaggacaaagtggtttcgtgggccaggcccagggtccctgtgctgtatgcagcctaggaacttggtgccctgcctccca

SEQ ID NO: 47165 - DNA, 201 bp, Homo sapiens
taaagacctgaagctaagacctgaaaccataaaagatctagaagagtacctaggaaaaactcttctggacaccagcataggcaaataatttataactaagwcccctaaaagcaaatccaacaaaacaaaaataatgaataggactcaaactaaaaagcttcttcacagcaaaataaataatcattacagtaaacagacaac

SEQ ID NO: 47166 - DNA, 201 bp, Homo sapiens
ctacctttaacttctctgttaaaggcattagtatctgcataagtaccaaaatttaggaacccctatttctttgtcttatttgactagtcttcagtatttgrtcctattgaccatgatcttcttgttgagattattactactctgagcatttccttttggatgcatttctttatttgtctacattcatgaatactggaatta

SEQ ID NO: 47167 - DNA, 201 bp, Homo sapiens
tttctcatcatgttactttcaggctactgttgtaggttttctacctttaacttctctgttaaaggcattagtatctgcataagtaccaaaatttaggaacscctatttctttgtcttatttgactagtcttcagtatttgatcctattgaccatgatcttcttgttgagattattactactctgagcatttccttttggat

SEQ ID NO: 47168 - DNA, 201 bp, Homo sapiens
aatttatttataattattataaataaatttataatttaataaataaataattccctttccttgagtgacaagggaaatggttgaggtcatacaagtttgcyttgagtttatctcacataaacatcgataaactaagaaaagtctaatttcaatggaggattttccaaggttaatgaatgaagtcacctcatggactgggtt

SEQ ID NO: 47169 - DNA, 201 bp, Homo sapiens
tatcttccccagaaaaagcaagtctgcctttgctgagtccaagaaaaccaattacccgaaagactctgaaaccaccacctgaaaatgctagaatagaggcytctgttgatttttatgacaaaaatatttttttgatcactagccgaacatcacccttatctgctctcctgtgcacatcaattaaatgaagagggagggaaa

SEQ ID NO: 47170 - DNA, 201 bp, Homo sapiens
cttttctttaaatccacagcagttcctatcaacagactacttaaaatcagcagtttttctcatgctttcaatggttagtctatctaacagcatatgtaagwgaccttttgataattatttaaaaggttcgtcagtaaagtctcaaatgcctgattcaggagagtcacgtatctatctgctctggaagcactcaagctgaac

SEQ ID NO: 47171 - DNA, 201 bp, Homo sapiens
ctcatttttaaaatgttttgtagagacggaatctcacaaaaatcttgccccagctggtcttgaactcctggcctcaagcaatcctcccgccttggcctccyaaagtgcttggattacaggtgtgagccatggcatccagcctgtttggctcttaataagacataaaacttcctttaatttcaatcttttcataaataaaat

SEQ ID NO: 47172 - DNA, 201 bp, Homo sapiens
gtggctcctatttttccggatgtacactatagctggctaataaaccttgatgattgagactcatttccaatgtcgtattagtcagcagatgacactttgarcaacaaggttttaaacaactctatgagtaatataattatgacaataacagcaatgatgacaacaatagtcatttaacatacaccatattacttgaacgga

SEQ ID NO: 47173 - DNA, 201 bp, Homo sapiens
tgaatttgcctgatgattatttttgttttctgattttatgattccatatctctatctatagacaaagaaagagaaatactatattagatcactctagtacwtgaatttttttcaggatgtaaatctgatatttgttgtttgctgctttttgtgaggcattttttttttctaccgaagatttatattcacatctgcagatct

SEQ ID NO: 47174 - DNA, 201 bp, Homo sapiens
tcttggtgaataattcatgttgtcacttctagggtaatcactgaaaaaaaaaaaagatatgcttcatttccaaacttactgtggaaaacaatgtacaacawtaacaatgatcaaccaaaaggaagcaaaaaataaaataaacatatatttggtaggacaaatatagagtataaagtgtatgccaacatgttaaatttgaat

SEQ ID NO: 47175 - DNA, 201 bp, Homo sapiens
ctccccctcacaaaccatcgtcacgatgtatattgccaacctgactaaaggttattgacaatatagagcaattcaaatcatgtaggataatgtgaaatttragatcatgcaaacaacaaaaaaatgggtgtaaaaatccctattctcataaatcctatggtcactctcatgctaaagatttctcaaaagtttccattaggt

SEQ ID NO: 47176 - DNA, 201 bp, Homo sapiens
tactactgaagcattgcttctccataatacatgctggcccactgttcccagtccaatttaaactataagtaatgatggtgtatttctacttcctttgggaragcattacgaagtttaatttactgtttcctaacaacttgtaatagtatcagtagttaatgttctagaattttgatagtgaaactttctgctagtctactt

SEQ ID NO: 47177 - DNA, 201 bp, Homo sapiens
agcattgcttctccataatacatgctggcccactgttcccagtccaatttaaactataagtaatgatggtgtatttctacttcctttgggaaagcattacraagtttaatttactgtttcctaacaacttgtaatagtatcagtagttaatgttctagaattttgatagtgaaactttctgctagtctactttcttcctca

SEQ ID NO: 47178 - DNA, 201 bp, Homo sapiens
caatccaggaacctgacctagatttgatatatttgaggtagtgtgataaatgctcaaccgtgacaatctaggaaactgacctagatttaataaagttttcrtgagaaaataatgctttaggtgagccctgctggataaattggagttagctaacaagaggtaaatccctacagaaagaaaagcatagacaaatgcccctag

SEQ ID NO: 47179 - DNA, 201 bp, Homo sapiens
tattttttaggttcacagcagaattgaataaaagttacagagatagcctccacaacacacacacacacacaaactcacacagcctttcccgttatcaacawcctccaccagagtgggtacatttgtttcaattggtgaacctacattgacacataatttttgcccaaaatctgtaccttacatcagggtgtattcttggtt

SEQ ID NO: 47180 - DNA, 201 bp, Homo sapiens
aatgctcaaccgtgacaatctaggaaactgacctagatttaataaagttttcgtgagaaaataatgctttaggtgagccctgctggataaattggagttasctaacaagaggtaaatccctacagaaagaaaagcatagacaaatgcccctagacaaagaagagtggaaatcgaggggtgctgataggaaataatgctaga

SEQ ID NO: 47181 - DNA, 201 bp, Homo sapiens
atatattctttgataaagtgtcttttcaatcttttgttcattttttctgttgtgtttccttttccttactgattttttttgagttctttctttattctggraaacgctcctcacactgtggattcattgactctattaacaatgtcttttaaaaaacagaagttcttggcttttatatagttcaatgtatcaactttttat

SEQ ID NO: 47182 - DNA, 201 bp, Homo sapiens
tgagacataatattagtctggccatttttagaaaatgcaatatgctacaacatggaaatttctttttctacaaagaagtgtcacaagattggtggcttcaytggctatatgtagttatatctatgtgtgttggaatttatatctttaaatttaatatggcataaaaagcatttctcaacaacttcatttttcaaaggaatt

SEQ ID NO: 47183 - DNA, 201 bp, Homo sapiens
agctctacttccctcctcccttcagcttacacacaccctctcacctacatggtcatccacgtaaccttgagaactttattctttgaatttacacaaagacmaacatcacagtgattaaaaaccacacatggcttcttgcttctcctggttgctgaattccaatgcctggggattagtttagatgcctactgctttcaggtt

SEQ ID NO: 47184 - DNA, 201 bp, Homo sapiens; identical to SEQ ID NO: 19476

SEQ ID NO: 47185 - DNA, 201 bp, Homo sapiens; identical to SEQ ID NO: 22320

SEQ ID NO: 47186 - DNA, 201 bp, Homo sapiens; identical to SEQ ID NO: 22534

SEQ ID NO: 47187 - DNA, 201 bp, Homo sapiens
gaagagaagtttagagcaaaaagaataaaaagaagtgaacaaagcctccaagaaatatgggactatgtgaaaagaccaaatctacatctgattggtgtacstgaaagtgacggggagaatggaaccaagttggaaaacactctgcaggatataggaaaacttccccaatctagcaaggcaggccaacattcaaattcagga

SEQ ID NO: 47188 - DNA, 201 bp, Homo sapiens
ttgtcagattcaccaaagttgaaatgaaggaaaaaatgttaagggcagccagagagaaaggtcgggttacccacaaagggaagcccatcagactaacagcrgatctcttggcagaaattctacaagccagaagagagtgggggccaatattcaacattcttaaagaaaagaattttcaacccagaatatcatatccagcca

SEQ ID NO: 47189 - DNA, 201 bp, Homo sapiens
tgcacccaatacaggagcacccagattcataaagcaagtccttagtgacctacaaagtgacttagactcccacacaataataatgggagactttaacaccycactgtcaacattagacagatcaatgacacagaaagttaacaaggatacccaggaattgaactcagctctgcaccaagtggacctaatagacatctacag

SEQ ID NO: 47190 - DNA, 201 bp, Homo sapiens
agaatctctgggacacattcaaagcagtgtgtacagggaaatttatagcactaaatgtccacaagagaaagcaggaaagatctaaaattgacaccctaacrtcacaattaaaagaactagaaaagcaagagcaaacacattcaaaagctagcagaaggcaagaaataactaagatcagagcagaactggaggaaatagaga

SEQ ID NO: 47191 - DNA, 201 bp, Homo sapiens
aagtcagaatttaaaaatgaacttggccaggcatggtggctcatgcctgtaatcccagcacttcgggaggtccactcggaaggatcacctgaagccaggarttcagaaacagcgtgtacaacaaagcgagacttcgtgtctctaaaaaaatttttaaagaattagccaggtatagtggcaggtgcctgtaccccgagctac

SEQ ID NO: 47192 - DNA, 201 bp, Homo sapiens
caggcaggagaaggaaataaagggtattcaattaggaaaagaggaagtcaaattgtccctgtttgcagacaacatgattgtctatctagaaaaccccatcrtctcagcccaaaatctccttaagctgataagcaacttcagcaaagtctcaggatacaaaatcgatgtgcaaaaatcacaagcattcttttacaccaataa

SEQ ID NO: 47193 - DNA, 201 bp, Homo sapiens
ttactaaagtcagaatttaaaaatgaacttggccaggcatggtggctcatgcctgtaatcccagcacttcgggaggtccactcggaaggatcacctgaagycaggaattcagaaacagcgtgtacaacaaagcgagacttcgtgtctctaaaaaaatttttaaagaattagccaggtatagtggcaggtgcctgtaccccg

SEQ ID NO: 47194 - DNA, 201 bp, Homo sapiens
tcttactaaagtcagaatttaaaaatgaacttggccaggcatggtggctcatgcctgtaatcccagcacttcgggaggtccactcggaaggatcacctgargccaggaattcagaaacagcgtgtacaacaaagcgagacttcgtgtctctaaaaaaatttttaaagaattagccaggtatagtggcaggtgcctgtaccc

SEQ ID NO: 47195 - DNA, 201 bp, Homo sapiens
tattggcctgagaggagcctgatggaaagagcctgattacagttctcatgtttcaaggaatattgtatggtaggcctataatttgtcatttttacagacartgtaaagatgaaaagcaacttaattgcgttatttaggtacagtagaaatctgaatttgtattattgttaccggtggatggagtccagcttcttggtgtct

SEQ ID NO: 47196 - DNA, 201 bp, Homo sapiens
taataggtcttaagggaattactctggttgaggaggttaaaaaaactaatctgatagctattattgaattttcaatgttttactttttaaaaaatttattwaaaaaaaaataggaagaaaagaaacggggtctcaccatgttgcccaggctggtttcaaattcctgggctcaagcaatcctcctacctcagcctcccaaag

SEQ ID NO: 47197 - DNA, 201 bp, Homo sapiens
gctacattttatctctcatttctaaactttcttactaaagtcagaatttaaaaatgaacttggccaggcatggtggctcatgcctgtaatcccagcacttygggaggtccactcggaaggatcacctgaagccaggaattcagaaacagcgtgtacaacaaagcgagacttcgtgtctctaaaaaaatttttaaagaatta

SEQ ID NO: 47198 - DNA, 201 bp, Homo sapiens
cgccttccttggcctcccaaagtattgggattacgggcatgagccactgcgcccggcctctatttagatttctttagtttttacttaatattcttgtattmgtctgttttcatgctgctaataaagatagacttgagaccgggcaatttataaaggaaagaggttgaattgactcacagttccatagggctggggaggcct

SEQ ID NO: 47199 - DNA, 201 bp, Homo sapiens
gtcagttcacagccctggctgttcctcagagatctaagtaaccactttgatgatttcagggttctcttagatatttgtaataaaccgattcctttattacyctagttcagttctgtaggcagctttctcagccctttgttgtttttgttgaggagagagtatgaaaggtttctgtaaaccttgtttgggatattcagttct

SEQ ID NO: 47200 - DNA, 201 bp, Homo sapiens
tggaggggatgtttttatttcttaaattatattttagtttatatatagtcaaggctttgaaatgaatcattttcaaagctaccaatattttaaataagtgwcttaaaaattttggagtatataattcagacctaagagtacagtttttattcatctatccatttactcaacgaacatttttattgccaggcacaatattaa

SEQ ID NO: 47201 - DNA, 201 bp, Homo sapiens
gtagcatagcctactacaaaccttgactatatgatacagcctgttgctcttattgttataaaagatttaaacattttatttataaactggtattaccaacyttcccctatttctgaatatttaggtaagaagcaaaaataagttatcctggctttgtgtagtggctcatacctgtaatcacagcactttgtgaggctgagg

SEQ ID NO: 47202 - DNA, 201 bp, Homo sapiens
gttgtccctttttgagaaaaacctgtagaagaagaaatattcttttgacaaaaaagttcttgtatcattatgtaaaacctcatagtgaaaaagctcgctctttttttttttagaaataaggtctcactctgctgcccaggctggagtgcagtggtgtgatcatagctcactgcaggcttgatctcccaaactcctgggctc

SEQ ID NO: 47203 - DNA, 201 bp, Homo sapiens
atgaacagacacttctcaaaagaagacatttatgcagccaaaaaaacacatgaaaaaatgctcatcatcactggccatcagagaaatgcaaatcaaaaccrcaatgagataccatctcacaccagttggaatggcaatcattaaaaagtcaggaaacaacaggtgctggagaggatgtggagaaataggaacacttttaca

SEQ ID NO: 47204 - DNA, 201 bp, Homo sapiens
agccaaaaaaacacatgaaaaaatgctcatcatcactggccatcagagaaatgcaaatcaaaaccgcaatgagataccatctcacaccagttggaatggcratcattaaaaagtcaggaaacaacaggtgctggagaggatgtggagaaataggaacacttttacactgttcttgggactgtaaactagttcaaccattgt

SEQ ID NO: 47205 - DNA, 201 bp, Homo sapiens
cttttacactgttcttgggactgtaaactagttcaaccattgtggaagtcagtgtggcaattcctcagggatctagaactagaaataccatttgacccagmcatcccattactggctatatacccaaaggattataaatcatgctgctataaagacacatgcacacgtatgtttatagtggcactattcacaatagcaaag

SEQ ID NO: 47206 - DNA, 201 bp, Homo sapiens
tgggactgtaaactagttcaaccattgtggaagtcagtgtggcaattcctcagggatctagaactagaaataccatttgacccagacatcccattactggstatatacccaaaggattataaatcatgctgctataaagacacatgcacacgtatgtttatagtggcactattcacaatagcaaagacttggaaccaacct

SEQ ID NO: 47207 - DNA, 201 bp, Homo sapiens
ggactgtaaactagttcaaccattgtggaagtcagtgtggcaattcctcagggatctagaactagaaataccatttgacccagacatcccattactggctrtatacccaaaggattataaatcatgctgctataaagacacatgcacacgtatgtttatagtggcactattcacaatagcaaagacttggaaccaacctaa

SEQ ID NO: 47208 - DNA, 201 bp, Homo sapiens
agggacatggatgaaactggaaaccatcattctcagcaaactattgcaaggaccaaaaaccaaacaccacatgttctcactcataggtgggaattgaacartgagaacacatggacacaggaaggggaacatcacacactggggactgttgtggggtggggggaggggggagggatagcattaggagatatacctaatgct

SEQ ID NO: 47209 - DNA, 201 bp, Homo sapiens
attgagatgaattttagttgttcctaagtactgtgtactgtgactggcagtggctcttaactgttattttttgagacagagtctcactctgttgcccaggytggaatgcagtgacacaatcatggctcactgcaacctctgcctcctgggctcaagctatcctactgcctcagcttcttgagtagctggaatcacaggcat

SEQ ID NO: 47210 - DNA, 201 bp, Homo sapiens
tgctccagtgttttagttttcattgtagggacttttcacttatttggttagttcctaggtatttaattttatttgtagttattgtaaatgggattactttmttgatttcttttttagattgtttgctattggcctatagaaatgctagatttttgtaggttgattttgtatcctgcagctttactgattttgtatgagttc

SEQ ID NO: 47211 - DNA, 201 bp, Homo sapiens
ttaagcatccattgaaatgatcatatggtttttgttcttcattttgttgatatgatgatatatcagattgattgatttgcatatgttgaactatccttgcrtccctgggataaatcctatttagtcatgatgaatgatctttttaatgtgttgttgaatttggtttgctagtattttgttgaggatttttgcatcaatttt

SEQ ID NO: 47212 - DNA, 201 bp, Homo sapiens
gaatttatccattttctctagattttctcatttattggcatatagttgatcatagcagccactaatgatcctttgaatttctgtggtatcagttgaatgtktccttctttatctctggttttacttagttgtgtcttctctttttcttagtctgtctagcagtttgtcaattttttttttcaaaaaaaaaaaaaccttttg

SEQ ID NO: 47213 - DNA, 201 bp, Homo sapiens
atggaggctgatgttctgagctccagctgagggaattttcatttatctaaagtttttatttctgtttttttttccccagccgaatttaagattcatatttytgttttaaaaagttgtgaaatgaatatagcaaagtgttaacatttgttgaattcaggagggaaggtatctacacacagtgttaattatttctgttttact

SEQ ID NO: 47214 - DNA, 201 bp, Homo sapiens
aaagtttttatttctgtttttttttccccagccgaatttaagattcatatttctgttttaaaaagttgtgaaatgaatatagcaaagtgttaacatttgtkgaattcaggagggaaggtatctacacacagtgttaattatttctgttttacttctctatatgctctaatttcttctttttaatttttttgagatagggtc

SEQ ID NO: 47215 - DNA, 201 bp, Homo sapiens
cactttgtcacccagatggagtgcagtggtgcagtctcagctcactgcaacctctgcctccctgaatcagattcaagtgattctcctgccctagcctcccragtagctgggattacaggcacgcgccaccacacctggcaaattttttgtatttttagtagagatgggtttttaccatgttggccaggctggtctcaaact

SEQ ID NO: 47216 - DNA, 201 bp, Homo sapiens
caacctagttttcatacccatacatctacgtgcaagataagtgtaatcacttttttcggaaagagtagcttttaatgcatatatttaaattattttaagayatgctctaaagcctctccattgtgctataattgtctctaacagttgaatttttgccttttcaagaatttcttctataaatgctgagggaagaaccattac

SEQ ID NO: 47217 - DNA, 201 bp, Homo sapiens
aaacaaaggaaagaacttaaataatatatagatcagatggtcagctcttgaaaaggtaggtgttaatggcagtcagatattatatcagtcttgaaggagcmcataaatcgtatattgttttgcaaccaaagaacagaaaaatgactgctatcatcaatgatgaaagctcaaatgtgatgaagaaatggaaaaaatagataa

SEQ ID NO: 47218 - DNA, 201 bp, Homo sapiens
gcaggggattataatgatcagattagcatattaagaagatgattttggcaatagtatggagtctggttgatagggaggccaggtaggaggctactgaagtrgtctggacaagagatgaagtgtacctaaactaaggcatggggatggaacggaacttagcattacaggcagttacttaaatggctaggggaagcaagagga

SEQ ID NO: 47219 - DNA, 201 bp, Homo sapiens
aaatgaatatgaatataactatatttttaaattctgatatgcattttatagaaaatttaagcaatacaggaaaatgtaaagaaagtaaaaatgaacagcamctcaactgtttagagataactactaatacatttagtagccattatgtctctctactctctatgcctgtataattaactttaatatatattgtttgatttt

SEQ ID NO: 47220 - DNA, 201 bp, Homo sapiens
agaattgaagagggtagccaagggccaaatataaatttgtattacaagctaaggaatttttatccagtcataaagagccactgaaagattttatgcagggrattataatgatcagattagcatattaagaagatgattttggcaatagtatggagtctggttgatagggaggccaggtaggaggctactgaagtagtctgg

SEQ ID NO: 47221 - DNA, 201 bp, Homo sapiens
aaagtggtgagcatttctgtgtctttttttttttttttttttttttgccaccacagctccccagtttctctggttttaataggttgtatattgttcccacstttcagccctttctttttctctcttctccttttccctactctctaaaatacctaaagggtagtagtcagataggttattttttttcaattgctaaacttc

SEQ ID NO: 47222 - DNA, 201 bp, Homo sapiens
tagtgatgaacaaaataagcttaatcacatcctaggagctaagtattctgacattataatctcttctctcagagtcccatcacagcagtcttaggattcargatctattcttgggaaacattatagaaccagtgtgtcatgtacatacaaatgagggaaaatataatggctttggtaatcctgtagttatctttcttgtca

SEQ ID NO: 47223 - DNA, 201 bp, Homo sapiens
gagtatctcttttttcttcccttttttccttccgttgtaaaattcctaaaaaatttccatgtggtaatagactcaaggtcagagtgaacacacagctaacscttttcttggtggattaatgccttgattctatttctttcactgttgtttttcttttttcttttatttcttctttcactattttattgaaattcttaaatc

SEQ ID NO: 47224 - DNA, 201 bp, Homo sapiens
aaaaaaaaagggctcagtagttttcacttaaaagacaaagaggcccactgagctattacagatgttaattaggattcatttactttaatatggtagaaagratgctatgataccactttagtgatgaacaaaataagcttaatcacatcctaggagctaagtattctgacattataatctcttctctcagagtcccatcac

SEQ ID NO: 47225 - DNA, 201 bp, Homo sapiens
agcacagtatgaaaatcagagtatgattcttttttcaaagaactagtggaagaataaaaggggaatttaaacaccattgtctaacttttgataccaataattgaagtctaagaaacatttttgggccttgcttacctcctttggttcttcatagtggaaataaaccactacccacaccacactgcatgcctgtgtgccttt

SEQ ID NO: 47226 - DNA, 201 bp, Homo sapiens
cacctcagcctcccaaagtgctgggattacaggtgtgagccaccgtgcccgtcccaaccaggcttcttaaatgaattctaagatagaaacaacaggagctkccaggactctcttaagggctgaacctaggactgtcacagtgacatttctgccatattctgctggtcacaaggcaagcccaaattcaaaaggagagaaata

SEQ ID NO: 47227 - DNA, 201 bp, Homo sapiens
gcacagtatgaaaatcagagtatgattcttttttcaaagaactagtggaagaataaaaggggaatttaaacaccattgtctaacttttgataccaataattgaagtctaagaaacatttttgggccttgcttacctcctttggttcttcatagtggaaataaaccactacccacaccacactgcatgcctgtgtgcctttg

SEQ ID NO: 47228 - DNA, 201 bp, Homo sapiens
gcgtgatcacagctcactgcaacctcaccatccctagactcaggtgatccagttcaacctcccaagtagctgtctgggactataggtgtgcaccaccacasctgtctaatttttatattttttgtggagacaaggttttgccatgttgcccaggctggtctcaaactcgtgggctcaagtgatctgcccaccttagcctcc

SEQ ID NO: 47229 - DNA, 201 bp, Homo sapiens
gattcttgtggattatttgctcaagtgaatatttcttttatttatttatgcctcagcattcacatcgtgaatatttctaaaggaaggaaaggttgtaaaayttaggagcactagaatatatagctacagggcattgttgaactttagacaagatcataggatttgacatgttttctgggtcaaatgcagagtttatctagt

SEQ ID NO: 47230 - DNA, 201 bp, Homo sapiens
agctgtctgggactataggtgtgcaccaccacacctgtctaatttttatattttttgtggagacaaggttttgccatgttgcccaggctggtctcaaactygtgggctcaagtgatctgcccaccttagcctcccaaagagctaacagacgcgagccaccgtgcccacccatgcttaatttgtttaggtgcgagatatact

SEQ ID NO: 47231 - DNA, 201 bp, Homo sapiens
ggcaggagaatcgcttgaaccctggaggcagagactgcagtgagccgagatcgcaccattgcactccagcctgggtaacaagggaaactccatctccaaaraaaaaaaaaaaaaaaaagccagacatggtagtgtatgcctgtagtcccagctacttgggaggctgaggtcgaggatcacctgagcccaggagttagaggc

SEQ ID NO: 47232 - DNA, 201 bp, Homo sapiens
aggtgattctcctgcctcagcctcccgagtagctgggattacaggcacatgccaccacagctagctaatttttgtatttttagtagagacaagttacaccrcgttggccaggctggtcttgaactcctgacctccagtgatccacctgcctcggcctcccaagtgctgggattacagacctgaggcaatgcacctggccac

SEQ ID NO: 47233 - DNA, 201 bp, Homo sapiens
  misc_feature (1)...(201): n = A,T,C or G, or insertion/deletion polymorphism (see Tables 1-2)
tcactctgttgcctaggctggagtgcagtgatgcgactgaactcctgggctcaagcaatcctactgcctcagcctcctgatagctgggactacaggcacangccaccatgctgggctaatttttttcttactttttttttttctttttgtagagatgggggtctcactgtcttgtccaggctggtcgtgaagtcctgggct

SEQ ID NO: 47234 - DNA, 201 bp, Homo sapiens
aacttttttttgttgttgttgttgttttgtttttgagacagagtctcactttattgcccaggatggagtacagtggtgcaaactctgctcactgtaacctycgcctcctgggttcaagcaattctcctgtctcagcctcctgagtagctgggactacaggcgcatgccaccatgcccagctaatttttgtatttttagtag

SEQ ID NO: 47235 - DNA, 201 bp, Homo sapiens
cgtaagtggtggccactgtcctataagaatctatgatgaaatagtaaaatagctaacatttatagagtgctttccacatgccagacactgtgctaaattcktgttgttgttgttgtttgtttttgtttttgtttttgttttttcccagacacagtcttgctctgttgcccgggctggagtgcagtagcgtgatctcggctc

SEQ ID NO: 47236 - DNA, 201 bp, Homo sapiens
agctaatttttgtatttttagtagagacggggtttcaccatgttggtcaggctggtctcgaactcctaacctcaagtgatccacgcgccgtggcctcccaragtgctgggattacaggcatgagccactgtgtccagccttaaacatgttaatctgtcttgctcaatcttccattatctctcaacccttttttttttggag

SEQ ID NO: 47237 - DNA, 201 bp, Homo sapiens
tattcctataaacagattttcacctaaaatttgaatctttatgaatcaaataaggaaaattttaagtaaacttgggctgtggataactgatgattcattamcaaaaaggtagtcatttaaaattataaaatgacacaaaaaatttaaatggaaaacatcctgtttatgcttggtcaggtctttgagttgatgtgactcaag

SEQ ID NO: 47238 - DNA, 201 bp, Homo sapiens
gtaatcccagctactcaggaggctgagtgaggcaggagaatcgcttgaacccaggaagtggaggttgcagtgatccaagattgagccattgcgctccagcytgggcagcaagagtgaaaactcgatctcaaaaaaaaaattaataatgtgtgtggtacttcaaccagtcttgaagagaatacagaactggaaagaagaata

SEQ ID NO: 47239 - DNA, 201 bp, Homo sapiens
attcctataaacagattttcacctaaaatttgaatctttatgaatcaaataaggaaaattttaagtaaacttgggctgtggataactgatgattcattacyaaaaaggtagtcatttaaaattataaaatgacacaaaaaatttaaatggaaaacatcctgtttatgcttggtcaggtctttgagttgatgtgactcaagt

SEQ ID NO: 47240 - DNA, 201 bp, Homo sapiens
cttcttctttttttttttttttttggagacagagccttgctctgtcacacgggctggagtgcagtggcacagtcatagctcactgtaacctcaacctcccwggctcaagcagtccttccacttcagcctcttgagtagctgggactacaggcatgtgccaccatgcctggttaacttttttctttctttctttctgttttt

SEQ ID NO: 47241 - DNA, 201 bp, Homo sapiens
ctgatcattttcttaacctttttaaaaagactcccctaaattcttcctcccaaagattttactgtgtttgttcacagtgggttctgtgaaaggattattayaagcccacaatccattatcctcaattctacaaatccaaaaaattctgaaaaccaaacattctttttgtaactcattcatcagcaaaaccagacctgaacc

SEQ ID NO: 47242 - DNA, 201 bp, Homo sapiens
tgaaactccatctctaccaaaaatacagaaaattagctgggtgttggcagtatgcgcctgtggtcccagctactcggtaggctgaggtgggaggaccacckgagcctggaaggtggagatttcattgagcctagatttcaccactgtactccagcctgggtgacacagtaagaccctcgtctcaaaaaaaaaaaaaaaaaa

SEQ ID NO: 47243 - DNA, 201 bp, Homo sapiens
ttggtacagattaagtctgatgttcattgattttctctctggaagatctgtccaacgctgaaaatgggatgttgaagttaccagctattattatattgggrtctgtctctctttttagctgtaacaatatttgctttatgtatctgggtgctccaacactggtatatggatccagtgttgggtccatatacaattacaatt

SEQ ID NO: 47244 - DNA, 201 bp, Homo sapiens
tactcctagtcttttttgatttccattgtcatggaatgtgtttttccatccttttattttcagtctatgtgtgtctttgtaggtgaaatgtgcttcttgtrggcaacagatcactgagtcttgtttttttgttttttgtttttttaatcccttcagccactctgtctttttattggagaatgtagtccatttacattcagt

SEQ ID NO: 47245 - DNA, 201 bp, Homo sapiens
tcagcgtatctgttgtatgttttttgattagaggttaccatgatgcttgcaaatactatcttataacctattattttacactgatagcctaacactgtttkcataaacacacaagcaaaaagaaaactaataaaaactctacaccttaacttcatccccctgctttctaactttttgttgtttttatttatatcttattgt

SEQ ID NO: 47246 - DNA, 201 bp, Homo sapiens
ctgatagcctaacactgtttgcataaacacacaagcaaaaagaaaactaataaaaactctacaccttaacttcatccccctgctttctaactttttgttgkttttatttatatcttattgtactgtctgtgtcttgaaaagttgttgtagttatttttgatttatcttttagtctacttaaaataagagtaatttacacac

SEQ ID NO: 47247 - DNA, 201 bp, Homo sapiens
ggagcaagacgtctcacatgattagaagcaggaggaagaggggcggagagctgctacacacttctaaacaaccagatcttgcgataactcactatcaggaggaacagtaccgaggggatggctctaaaccattcatcaaggaccaccctcatgatccagtcgcctcccaccaggccccacctccaacattggagattataa

SEQ ID NO: 47248 - DNA, 201 bp, Homo sapiens
gaagaggggcggagagctgctacacacttctaaacaaccagatcttgcgataactcactatcaggaggaacagtaccgaggggatggctctaaaccattcrtcaaggaccaccctcatgatccagtcgcctcccaccaggccccacctccaacattggagattataatttgacatgatatttggtggggatacagattcaa

SEQ ID NO: 47249 - DNA, 201 bp, Homo sapiens
gtggcttctttcttacctcagtgtgatgcagatatcaatgcccaaacaaaagcctttttttttttttttttttttttttgagacagagtcttgctctgtcrcccaggcttgggtgcagtggtgcaatctgcgctcactgcaacctccacctcccaggttcaagctatcttcctgcctcagcctcccaagtagctgggacta

SEQ ID NO: 47250 - DNA, 201 bp, Homo sapiens
caattatagcagtttttatcactctgtgttttaaaaatgtaagagattcttaataaaaactgatgtgattttgtgttgggcattttttaaaggatgttttyttttttaaaaaaaattatttttaaatttttatttatttatttattttgagactgggttatgagactggccaatttttgtatttttggtagagatggggtt

SEQ ID NO: 47251 - DNA, 201 bp, Homo sapiens
ctagagtgtagtggcatgatctcagctcactgcaacctccacctcccgggttcaagcagttctcctgcctcagcctcccgagtagctgggattacaggtgygggccaccatgcctagctaatttttgtatttttagtagagacagggtttcaccatgttggccaggctggtctcgaactcctgacctcatgatccgcccgc

SEQ ID NO: 47252 - DNA, 201 bp, Homo sapiens
atcacttgaggccaggagtttgagaccagcctggccaacatggcaaacccccatctctactaaaaatacaaaaattagccaggcaggtgtggtggtgcatkccggtaatctcagtttcttgggaggttcgggtgggatgatcgcttgaacctgggaggcggaggctgcagtgagccgagatcacgccactgcactccagcc

SEQ ID NO: 47253 - DNA, 201 bp, Homo sapiens
acactcttaatgccatactagctcctgtcacaggcctgacaaatagtaggcgctcaatgtatgtttgaataaattattgattttttgttcttcctggaaawggcaatgttttctatttgtcactttatgttatgctaaacaggtttgagttttaggagtcctctttactataaattgaggtggttagatgttggctaatca

SEQ ID NO: 47254 - DNA, 201 bp, Homo sapiens
ttaaatttatcctttagaaagcaattctgtagtatgaaatgtgtgtactctttacctgtgggtacataaattgccatttttatttattggacttttgggtrgtaatgaggtagggctggccagatagtattaatatgatttctaagcatgtctttctgacttctagacttgaagctacttgagggaaacagtttagcataa

SEQ ID NO: 47255 - DNA, 201 bp, Homo sapiens
cctgacttcaagtgatccactcacctcagcctcccaaagtgctgggattacaaggatgagccaccacaaccggcccactttcattaaagaagttttttttwaatttagagagcatatgattaaaagttgacttaaatttttttatttgcaaaaggcatttgcatgtttcttattggtttccaagagatctcttgaaatcat

SEQ ID NO: 47256 - DNA, 201 bp, Homo sapiens
ctttttcattattcttctgaaatattcatggactcttaacagttcctaccttgtttgcactagatcctcacatactcttaccttctggcagccagtctatrgttgcagtgggttgctcttgttttgtttcttgttgctgaggatgtaatcaataaagagtagatactcaaggtaaagtttatggatactcaaattcactta

SEQ ID NO: 47257 - DNA, 201 bp, Homo sapiens
gcacactttttcattattcttctgaaatattcatggactcttaacagttcctaccttgtttgcactagatcctcacatactcttaccttctggcagccagwctatggttgcagtgggttgctcttgttttgtttcttgttgctgaggatgtaatcaataaagagtagatactcaaggtaaagtttatggatactcaaattc

SEQ ID NO: 47258 - DNA, 201 bp, Homo sapiens
gaatctcttaaaaactcaaagcttactggattgatgttgatgtactcttactaaaatcttaactaagtctaggcaaggtggctcatgcctgtaattccagyactttgggaggctgaggcgggcagatcacttgagcccaggggttcaagaccatgggcagtgtggcgaaaccctgcctctacaaaaatgttttaaaaatta

SEQ ID NO: 47259 - DNA, 201 bp, Homo sapiens
cttcacttgactggcctttaaaaaaataaataaataataaattaaaaagagaaactatatttagtgttaggtaaatataacatggctctttaattttgatrtaatcaagaggaaagatattgtgaatctcttaaaaactcaaagcttactggattgatgttgatgtactcttactaaaatcttaactaagtctaggcaagg

SEQ ID NO: 47260 - DNA, 201 bp, Homo sapiens
aaatgatggccacagagcagaatctaaggagatttctctggatttggtcttcatagtctataactgtaaattactgtctctgcctactcctggtgagtttttgttgttgttgttgggttttttgtttgtttgttttttgtttttttgagacagaatctcactctgtcacccaggcctggagtgcagtggtacgatcgcagc

SEQ ID NO: 47261 - DNA, 201 bp, Homo sapiens
aatgatggccacagagcagaatctaaggagatttctctggatttggtcttcatagtctataactgtaaattactgtctctgcctactcctggtgagtttttgttgttgttgttgggttttttgtttgtttgttttttgtttttttgagacagaatctcactctgtcacccaggcctggagtgcagtggtacgatcgcagct

SEQ ID NO: 47262 - DNA, 201 bp, Homo sapiens
attgcagtacactcagttgagattgaaacagaataactgtgttgtgaaattttggttttcagtgaataaattttagtaattgcaagtgtatttaggcaggwccgagtgcagtggtgttgataactaattcattacaatcagttacagatttctttgttccttctccactcccactgcttcacttgactggcctttaaaaaa

SEQ ID NO: 47263 - DNA, 201 bp, Homo sapiens
atgatggccacagagcagaatctaaggagatttctctggatttggtcttcatagtctataactgtaaattactgtctctgcctactcctggtgagtttttgttgttgttgttgggttttttgtttgtttgttttttgtttttttgagacagaatctcactctgtcacccaggcctggagtgcagtggtacgatcgcagctc

SEQ ID NO: 47264 - DNA, 201 bp, Homo sapiens
tctttttgtaactcattcatcagcaaaaccagacctgaaccaaagtgaccctattcatattctttgattatctgtcctactgggacatatatggtttgctrcagaaatattaatgtatttaattataggatactgccctagatagttcatatatgtggtatatgcaccatactgcttttctaaattaaaaaatctgaattc

SEQ ID NO: 47265 - DNA, 201 bp, Homo sapiens
aggctctccatctgtctcaccaagctaggtgcagttattgtgcagaaagtttgcttaggggcagaggaagccttatctacgtaagtatttagaatttgttaaaaaaaaaaaaaaaggaaaaaggaaagcagtttatagatgaatacttaaatagtttcattttgtacaagtcacctggttttgttcccatgtgttaggaag

SEQ ID NO: 47266 - DNA, 201 bp, Homo sapiens
taaaaaaatgatcaaaaatgttacactggcctggtgcggtggttcacgcctgtaatcccagcactttgggaggccgaggtaggcggattgcttgaggtcargagttcaagatcaccctggccaacatggagaatccccatctctacgaaaaatacaaaaattagcctggtgtggtggtgggcgcctgtaatctcagctact

SEQ ID NO: 47267 - DNA, 201 bp, Homo sapiens
attctaacacctagtttttatgccaccttaaagttatactttctgtgtgttgtactttcaaatgtttaaaaaaataggccaggcgtggtgggattacaagygcttgtaatcccagcactttgggaggccaaggtgggcggatcacaaggtcaagagatccagaccatcctggctaacatgatgaaacccatctctactaaa

SEQ ID NO: 47268 - DNA, 201 bp, Homo sapiens
actgcagccttgaacttctgtgctcaagtaatcctttcacttcagtcccttgagtagctaggactgcaggtgtgcaccaccatgcctaattaaaaaaaaatttttttttttgtagagaaaaaggtcttgatatgttgcccaggctggtccaaagtgattctcctgcttcagcctcccaaagtgttgggattacaggcgtga

SEQ ID NO: 47269 - DNA, 201 bp, Homo sapiens
agatgcaaatccttctctactcacaaggtaggttttccttggattttacattttccaaaaacaagtacttttgctcccaactactgtgtttccatggggtrtattattagaaccgaataatgatcacagtcttttctgttttgtgtaaagggagcaggtatggtgggaccagcggctgagatgagactgctgtttctcttt

SEQ ID NO: 47270 - DNA, 201 bp, Homo sapiens
ttttcttttgagatggagtttcgctcttgttgcccaggctggagtgcaatggcgggatcttggctcaccgcctcctgggtttaagtgattctcctgcctcrtcctcccgagtagctgggattacaggcatgcaccaccacgcccagctaattttgtatttttagtagagacgggttttcttcatgttggtcaggctggtgt

SEQ ID NO: 47271 - DNA, 201 bp, Homo sapiens
ttgcccactccagtgttctggagaggttccccaatgttttcttttagtagtttcatagtttgaggtcttaaatttaagtttttaacccattttcatttgatttttttttttatatggtaagagatacggggtcaaccttcattcttctgcgtaaagatatccagttttcccagcaccattgactgaagagactgtcctttc

SEQ ID NO: 47272 - DNA, 201 bp, Homo sapiens
aagaaatagactagccaaatgcattttgttttgaagacttaatgatattttagtttcttgttgagtgactgatctattttgtatgttaatccatgtaataktttataagataatttatatgtatgttgtctttccatttttcataacaattgttgagagatttttaaatggcagcttgatatatctgtagttgggaaacct

SEQ ID NO: 47273 - DNA, 201 bp, Homo sapiens
ggagtgcagtggcgccgtctcagctgactgcaacctccacctgccaggttcaagtgattcttttgcctcaacttcccaaatagctgggattacaggtgcaygccaccacacttcgctaatttttgtatttgcactagagatggggtttcaccatgttggccaggctggtcttgaacttctgacctcaagtgatccacccac

SEQ ID NO: 47274 - DNA, 201 bp, Homo sapiens
ttgagtatttgaaacttgactagttcaaaatgaaatgagctgtagatgtaaaatactcactggatttcaaagatttaatatctcactaacatttttgtatrtttattacatgttggagcaatattttggatacaagaagtaaaatttattgtcatgatgaatttttcctgtttttgttgttgttgttgttgttgttgttaa

SEQ ID NO: 47275 - DNA, 201 bp, Homo sapiens
gagagtcgcttaaattcttttttttttcttcttcttttttttttgttttttgagacagatgttgcctaagctgctgtgcagtagagcgatcacagctcackgcagccttgacctcctgggctcaggtgatcctatacctcagctttccgaatagctggggctataggtatatgccaccatgtctggctaatttttaaaact

SEQ ID NO: 47276 - DNA, 201 bp, Homo sapiens
ccagggcaggtgtgtcgcttgagctcacaagtaacgagaccagccggggtaacgtggtgaaacctcatctcgacaaaaaatacaaaattagccgggcatgrtggtgtgtgcctgtagtcccaactacttgggagcctgaactggggaggatggcttgagcccaggaggcagaggttgcagtgagctagatcgtgccactgc

SEQ ID NO: 47277 - DNA, 201 bp, Homo sapiens
gttcaagcgatccttccaccctagtctcccaagtagttgggactacaggtgcatgccaccatgcccagctaatttttatatttttttttctagagatgggrctttaccatgttgcccaggctggtctcaaactcctgggttcaagcaatccacctgccctagcctcccaaagtgctgggattacaggtgtgaacctctgtg

SEQ ID NO: 47278 - DNA, 201 bp, Homo sapiens
catctgtctcaccaagctaggtgcagttattgtgcagaaagtttgcttaggggcagaggaagccttatctacgtaagtatttagaatttgttaaaaaaaawaaaaaaggaaaaaggaaagcagtttatagatgaatacttaaatagtttcattttgtacaagtcacctggttttgttcccatgtgttaggaagaaatgagt

SEQ ID NO: 47279 - DNA, 201 bp, Homo sapiens
agcccaggagtttgagaccagaatgggcaccatagcaagaccctgtctcaaaataggtaggtaggtaggtaggtaggtaggtaggtagaggtaggtaggtrggtaggtggatggatggatggatggatagatagatagatagatagatagatagatagatagatagatagaagatagagagatagtcaaccttgagagggt

SEQ ID NO: 47280 - DNA, 201 bp, Homo sapiens
atatgttgcccaggctggtccaaagtgattctcctgcttcagcctcccaaagtgttgggattacaggcgtgagccactgcacccagtgtcacaaatcttawtttttttttttttttgagacggagtctcactttgtcacccagatggagtgcagtggtgcagtctcagctcactgcaacctctgcctccctgaatcagatt

SEQ ID NO: 47281 - DNA, 201 bp, Homo sapiens
tgtgagatgatctcagctcactgcaacctctgcctcctgggctcaagcgatctttctatcctagtctcccaagtagttgggactacaggtgtgtgccggcrcacctagctggtttttttatttttttgtggagacagagttttgccatgttgcccaggctggtctcaagtgagccacctgccttggcctctgaaagtgctg

SEQ ID NO: 47282 - DNA, 201 bp, Homo sapiens
gttctgttttctttttagagacagggtctcactctgttgcccaggctgcagtacagtggcactatcagagctgactgcagccttgaacttctgtgctcaartaatcctttcacttcagtcccttgagtagctaggactgcaggtgtgcaccaccatgcctaattaaaaaaaaatttttttttttgtagagaaaaaggtctt

SEQ ID NO: 47283 - DNA, 201 bp, Homo sapiens
ctttccaaatagctgggactacacccacgtgccaccacacccagctaatgaatttggcaactttattgtatgttgggtttgtcaacctaaataacaaatarggataggctctctaaaagaaaattatttttattttgaaataaggtgttgcaataggaatatacatgcgatagtaaactgtgtgttctttaacattgtgga

SEQ ID NO: 47284 - DNA, 201 bp, Homo sapiens
ctacatcaggaagtccaccagaggcatgctggataccaccagcagcttcacatctccattggcagtgcttggcagggcataagccttgctagacacagctyctggtctgcaccaccatggctcctgtgccgccagccacaggtccagacctagacccctctgttgcccttgaggggctgaccttattctccacagtgatgc

SEQ ID NO: 47285 - DNA, 201 bp, Homo sapiens
ctgtgaaagaatccaatactgttacaataataataataatgataatttaaacataatttcagtataattataatcgcaattttaaaaaatgtatgtgtatrtatttagagatggggtctcactctgtcacccaagctgaagtgcagtggcacaatcatagctccctgcagccttgaacttatgggctcatgtgatccttcc

SEQ ID NO: 47286 - DNA, 201 bp, Homo sapiens
gttatggagagattgtttcttttatcagttcatatttctatgcacttctcattcagtactgtgctatacttttcactgcccttcacctcagctaagatggytttcaccttaagtctcaagacaaaggcagcaaacagccaatacagaattagggcatagagctgggtgtgatacagggtgctaactactcatagtccgctt

SEQ ID NO: 47287 - DNA, 201 bp, Homo sapiens
gagactcttaattcaagcctcagctctgtctttaattctcaccttaggcaaaccatgttagctgagcatctgtgttctcctaatgtaaacaatgagagagrgagagggactgctcaggctcttaaagataattcaagtctaacattttttgaattatttgtttgtgtagtgttatttcctaaaatatttgaatcaagtttt

SEQ ID NO: 47288 - DNA, 201 bp, Homo sapiens
gcctcctgggttcaagtgattctcctgcctcaacctctcaactagctgggattacaggcgcctgccactacgcccagcttattttttgtgtttagtagagrcgggctttcaccatgttggtcaggctgatctcaaactcctgaccttgtgatttgcccaccttggcctcccaaagtgctgggattacaggcatgagccacc

SEQ ID NO: 47289 - DNA, 201 bp, Homo sapiens
aaaaaaaaaaaaaaaaaaaaaagatactgaatcatccattcaaattatgtgaccttcatttaagcctttcagtgtaaagaatggtgtaggccggccaggcrcagtggctcacacctataatcccagcactgtgagaggctgaggcaggtggattacgaggtcaggagttcaagaccagcctggccaagatggtgaaacccc

SEQ ID NO: 47290 - DNA, 201 bp, Homo sapiens
gttaaaggttaaaaaaggccgtgtgcagtcgctcacctgtagtcccagggtgaggccagggcaggtgtgtcgcttgagctcacaagtaacgagaccagccrgggtaacgtggtgaaacctcatctcgacaaaaaatacaaaattagccgggcatgatggtgtgtgcctgtagtcccaactacttgggagcctgaactgggg

SEQ ID NO: 47291 - DNA, 201 bp, Homo sapiens
taagaatataaaaaaattacccaggcatggtggtggacacctgtaatcccagctacgcgggaggctgaggcagacaattgctcgaacccaggaggcagagkttgcagtgagctgagatcgcaccactacactccagcctgggtgacagagcaagactacatctcaaaaaaagaaaagaaaagaatggtgtaggcagtgcta

SEQ ID NO: 47292 - DNA, 201 bp, Homo sapiens
ctcttgaattttctatatctacttgaaaaatatttaaaatatttattcaaaataaattccaaatgtagagtgtaaacaaactcaaacatttcttctgatttctgtcacctcttctactcaactcaaaaatatcttgtgtgaactcttaattattcaaaggttaatcaagtgcatagttacatatgcacttgcctctaccac

SEQ ID NO: 47293 - DNA, 201 bp, Homo sapiens
tcttgaattttctatatctacttgaaaaatatttaaaatatttattcaaaataaattccaaatgtagagtgtaaacaaactcaaacatttcttctgatttctgtcacctcttctactcaactcaaaaatatcttgtgtgaactcttaattattcaaaggttaatcaagtgcatagttacatatgcacttgcctctaccacc

SEQ ID NO: 47294 - DNA, 201 bp, Homo sapiens
atatttccagtacacagcacagtgaaatggctccataaacgttacctgagtaagtgaagtaattctctgtaaggtctggctgaagaccttcatgtctccarataagtagcctacaagtatctctctattctgattttacttttaggccagttccagcttttctgttgtagtgagtagaatggagatataagctcagtttct

SEQ ID NO: 47295 - DNA, 201 bp, Homo sapiens
ttacctgagtaagtgaagtaattctctgtaaggtctggctgaagaccttcatgtctccaaataagtagcctacaagtatctctctattctgattttacttytaggccagttccagcttttctgttgtagtgagtagaatggagatataagctcagtttctgctgggcggatcaaggaagttgcagggtccgtcagtattta

SEQ ID NO: 47296 - DNA, 201 bp, Homo sapiens
tatagtaaaatgttttgaaccttctttctagaaaaatgtttgcatattcaaaatattgtatacagtgtttcacttttcacaaataatcctgaaactgattmatatattgtttttatttttatttttttcgagatggagtcttgctctgtcacccaggctggagtgcaatggcacgatcttggctcactgcaacctccacct

SEQ ID NO: 47297 - DNA, 201 bp, Homo sapiens
aaggggcacaaggcctgtgaaaacatggactgcaagcaagtggtcttactgcatatggagtgatgataaggaatgaggcagacaagggccaaatcatgaaragcctcatgtgccttgctgaggcctgtcttaaatattaaaataacttcttttatacattcatcactttgagtatcaattataaaaagactttcctaaaat

SEQ ID NO: 47298 - DNA, 201 bp, Homo sapiens
ttggccagagattccaaaaatttttgatatgggactgtctttccccattactcttctctcttctctcttctctcctccctccctccctccctccttccttmcttcctcccttcctccctctctcccttccctcccctcccctccccttccctctttctctcactctttctctctttctccttttctttctcagaatctcgc

SEQ ID NO: 47299 - DNA, 201 bp, Homo sapiens
ctggccaacatagtgaaaccccgtctctacaaaaatacaaaaattagccaggcatggtggtgtgcacctgtaatcccagctgctggggaggctgaggcagragaaccacttgaactcaggaggcggaggttgcagtgagccaagttcatgccactgcactccagcctgggcaacagagcgagattccatctcaaaaataaa

SEQ ID NO: 47300 - DNA, 201 bp, Homo sapiens
ctttttaaatgatacagtcaagagtttattccagagttgagaacctaataaatgttcttttatattgtataccatgctttttttagaaggcaaaaaaaaamtccaaaagcttccattatcacacttcctcttttattttttatttttatttttttttattgagacggagtcttgctctgtcacccaggctggagtgcagtg

SEQ ID NO: 47301 - DNA, 201 bp, Homo sapiens
atgaatttaggactgcagagtacagcaaattttagttcctgatatggccatgctttcctaagaagtttccaaaggttattgactctcagcttagccttttytactgcacaatgtgatagatgctgtaaatcagcgtttagaggtgtttatctaactctccctagtgggagatggggaaattttcactgagaatgtaactct

SEQ ID NO: 47302 - DNA, 201 bp, Homo sapiens
cagagcgagattccatctcaaaaataaaaaataatcagtcacagcatccaggatcataggtgtataatcctccagctacatcaggaagtccaccagaggcrtgctggataccaccagcagcttcacatctccattggcagtgcttggcagggcataagccttgctagacacagctcctggtctgcaccaccatggctcctg

SEQ ID NO: 47303 - DNA, 201 bp, Homo sapiens
agatggttagaggcagaaattgaatcagatctcaacattatcagtcagtagtaggactataaaataaatagaaaactatgacatgcttttggaaaagttcwagatattaactatgtattatttgttgtaggcgaaaattttgaccagagtcctttgagaagaacattcaaatccaaagttctcgcccactatcctcagaat

SEQ ID NO: 47304 - DNA, 201 bp, Homo sapiens
cgtggtggcacatgcctgtaatatcccagttactctggaggctgaggcaggagaatcgcttgaacccaggaggtggaggttgcagtgagctgagatcgtgycactgcactccagcctgggcaacagagggagactctgtctcaaaaaaaaaaaaaaaaaaaaaaaaaaaaaggtatttgtggtgagagaagttgttggctt

SEQ ID NO: 47305 - DNA, 201 bp, Homo sapiens
atcttcacagtaactggtagacaaaaagttaagagaaaaactgaaacagagctgcttttgcaactttgttcttgtcatatcttgccctgagattctgaggraataatttattttattttttagacagggtctcactctgtcacccaggcaggaatgtggtggcacagctcactgcagccttgacctcctgagctcaggaga

SEQ ID NO: 47306 - DNA, 201 bp, Homo sapiens
gggagtcttggaaccaatcccacacagatactgagggataactataccacatgaggagcgattaagtaattagaaaatcagccaccaggaaagggagaaamtcaattagtttatacagttccctttccagaaaagctactttttttttttttttttttgagacagagtttccctgttgttgcccaggctggagggcaatgg

SEQ ID NO: 47307 - DNA, 201 bp, Homo sapiens
actccagcctgggcaacagagggagactctgtctcaaaaaaaaaaaaaaaaaaaaaaaaaaaaaggtatttgtggtgagagaagttgttggcttggtgaascagcaggaaggactcagattctagatagatgttgaaggtaggcccaacgagatttgctgatgatttatatgaatatgtatgaattctatgaatatggtag

SEQ ID NO: 47308 - DNA, 201 bp, Homo sapiens
ttcgtctacccatgattttaagaagcaaagagtgtgatgtttcccacctacccacacccccttaaaactattcaaatgaaaccatttaattctttaattayagtggaatagaactgacctattttctgtatgatcataaagaaatatttacttttaacgcagaaatttttttcttaagatccacattttccagcttaatga

SEQ ID NO: 47309 - DNA, 201 bp, Homo sapiens
ccactgtcctataagaatctatgatgaaatagtaaaatagctaacatttatagagtgctttccacatgccagacactgtgctaaattcttgttgttgttgttgtttgtttttgtttttgtttttgttttttcccagacacagtcttgctctgttgcccgggctggagtgcagtagcgtgatctcggctcactgcaacctct

SEQ ID NO: 47310 - DNA, 201 bp, Homo sapiens
aactagctattatattttggattatttaatgttaaatgcttacagtgtgtcagattctggagtacatacgtaagtggtggccactgtcctataagaatctrtgatgaaatagtaaaatagctaacatttatagagtgctttccacatgccagacactgtgctaaattcttgttgttgttgttgtttgtttttgtttttgtt

SEQ ID NO: 47311 - DNA, 201 bp, Homo sapiens
caaaaattagcctggtgtggtggtgggcgcctgtaatctcagctacttgggaggctgaggcaggagaatcgcttgaatccgagatgtggaggttgcagtgygccaagatcgcaccattgcactccagcttgggcaacaaagcgagactccatctcaaaaataataacaatgttacactgtatcttgtacatttttagtggg

SEQ ID NO: 47312 - DNA, 201 bp, Homo sapiens
tgtgaagggggatgtaaagaaatttgagtaagttttttactagcctgggttctaatataggtaatatataactaacagactgtaataacaactggtttgayagcacagaggaaattattaatgttaactgggtgaggtgagaaatagggagaagatcacatttaaacttgcccttaaagtattaatagaattttttaaaaa

SEQ ID NO: 47313 - DNA, 201 bp, Homo sapiens
ctgtcctataagaatctatgatgaaatagtaaaatagctaacatttatagagtgctttccacatgccagacactgtgctaaattcttgttgttgttgttgtttgtttttgtttttgtttttgttttttcccagacacagtcttgctctgttgcccgggctggagtgcagtagcgtgatctcggctcactgcaacctctgcc

SEQ ID NO: 47314 - DNA, 201 bp, Homo sapiens
ctaaattttgtttttggtaaaaccataactagctattatattttggattatttaatgttaaatgcttacagtgtgtcagattctggagtacatacgtaagyggtggccactgtcctataagaatctatgatgaaatagtaaaatagctaacatttatagagtgctttccacatgccagacactgtgctaaattcttgttgt

SEQ ID NO: 47315 - DNA, 201 bp, Homo sapiens
agatcaccctggccaacatggagaatccccatctctacgaaaaatacaaaaattagcctggtgtggtggtgggcgcctgtaatctcagctacttgggaggytgaggcaggagaatcgcttgaatccgagatgtggaggttgcagtgcgccaagatcgcaccattgcactccagcttgggcaacaaagcgagactccatctc

SEQ ID NO: 47316 - DNA, 201 bp, Homo sapiens
gctttatgaattctctctttacctgtgtttaatctacaattagccctttctttgacattttttggtcacagtgaagcttgttacagacaaacatgtttagrttgggtggcttaggtggtgtggtggctccacattgatgtcatactgaggacaggggtcaagtactccatgattagtctttgctcttacttcaggagctgc

SEQ ID NO: 47317 - DNA, 201 bp, Homo sapiens
gaattcctgtttacccttcacccagtttctccaaatgttaacgtttcacataaccatggtacattcatcaaaactaagaaattaacattggaataatactrttaactaaactccaggcttcatttggatttcgtgaatttttccactaataccctttttctgttccactgtccaatccaggataccacattgcatttagtt

SEQ ID NO: 47318 - DNA, 201 bp, Homo sapiens
cccaaagtgcttacaggcgtgagccaccacacccagcctcattccaattttctgtgtgtctctgtgctgcattctgggtaatttctccacatctgtctccwgctttatgaattctctctttacctgtgtttaatctacaattagccctttctttgacattttttggtcacagtgaagcttgttacagacaaacatgtttag

SEQ ID NO: 47319 - DNA, 201 bp, Homo sapiens
tctgatttttttttttctttctttcacagttgtgcatgcctaaagggctatctttcaggacacaaacggacaataaagacccccagtttcactcatttatmattaccagggaagatggttctcgcacctatggttttgttctcactttttatgaagaagttacaagtaagcaaatctgcacagcaatgcagacactttacc

SEQ ID NO: 47320 - DNA, 201 bp, Homo sapiens
tgagggaggagagaaagggaaagaaaaggggacagggagagagaaaggaggctggaggagtacaagttctgtttgctgctaaggtgttaagacagactgtyctaaaattcctgtgcacatccttttgcttgtatttccactgttggtcacagatactctcagagtaataaaagtaaatatctagaatacaatgcattgtta

SEQ ID NO: 47321 - DNA, 201 bp, Homo sapiens
tccctcatatgatctggccgcccgtaacctctggagctttctctcctcttcactcattatattgcttttgtcttgctcttttccagacaatctgagcatgytcctgtcttatgatctttgctttagctgttctggttgcctggaaagctcttccccccaaggatcttttggctcactgtctcacctccttcatgtctgcct

SEQ ID NO: 47322 - DNA, 201 bp, Homo sapiens
tactgcctcagcctcctgatagctgggactacaggcacacgccaccatgctgggctaatttttttcttactttttttttttctttttgtagagatgggggwctcactgtcttgtccaggctggtcgtgaagtcctgggctcaagcagtcctctgcctcagcctcccaaagtgctgggattataggtgtgagccactgcacc

SEQ ID NO: 47323 - DNA, 201 bp, Homo sapiens
ccacaggcatgtgccaccatgcctggctaatttttgtattttttgtagagatggggttttgccatctctacaaagatgttgcctaagctgatctcaaactmctgagctcaagcagtccacccatccttggcctcccaaagtgctgggattacaggcagtgagccaccatgcctggctgcgccatttctttatagactaccc

SEQ ID NO: 47324 - DNA, 201 bp, Homo sapiens
agggtttcaccatgttggccaggctggtctcgaactcctgacctcatgatccgcccgcctcggcctcccaaagtgctgggattataggcatgagccaccaygcccagcctggagtgattctttcaaagcgcagcattcctctgtttgaaagtctccagtgacttcccatttgttcagaggaaaagccagatccctcatatg

SEQ ID NO: 47325 - DNA, 201 bp, Homo sapiens
ggctggagtgcagtgatgcgactgaactcctgggctcaagcaatcctactgcctcagcctcctgatagctgggactacaggcacacgccaccatgctgggmtaatttttttcttactttttttttttctttttgtagagatgggggtctcactgtcttgtccaggctggtcgtgaagtcctgggctcaagcagtcctctgc

SEQ ID NO: 47326 - DNA, 201 bp, Homo sapiens
atgttggaggtggggcttattgggagatatttgggttatgggggcagatccctcgttaatggcttggtgccctcctagaggtaatgggtgagttctccctytatgagttcccacaagagctagttgttaaaaagagtctggcaccactcccctaccctcttcgttcctctctcttgctatgtgatctctaattggctagcc

SEQ ID NO: 47327 - DNA, 201 bp, Homo sapiens
gcctaggctggagtgcagtgatgcgactgaactcctgggctcaagcaatcctactgcctcagcctcctgatagctgggactacaggcacacgccaccatgmtgggctaatttttttcttactttttttttttctttttgtagagatgggggtctcactgtcttgtccaggctggtcgtgaagtcctgggctcaagcagtcc

SEQ ID NO: 47328 - DNA, 201 bp, Homo sapiens
gtggttttcaaaagagcgtagagacggtggagaccatgatctgaattcaaataagcagaacatttagtcaagactgacagaatatcatgtcacgttagttmttgaagggaccttagacatatttatggtaaagagactgaggctcagagattaagggccctctcagattacatttgatcagcagtagacacctgactagtg

SEQ ID NO: 47329 - DNA, 201 bp, Homo sapiens
gtcacgcaggctagagtgtagtggcatgatctcagctcactgcaacctccacctcccgggttcaagcagttctcctgcctcagcctcccgagtagctgggrttacaggtgtgggccaccatgcctagctaatttttgtatttttagtagagacagggtttcaccatgttggccaggctggtctcgaactcctgacctcatg

SEQ ID NO: 47330 - DNA, 201 bp, Homo sapiens
caggaggctgaggtaggagaatcgcttgaacccaggaggcagaggttgcagtgagctgagcactgcactccaacctaggcaatagagcgagactccgtcamaaaaaaaaaaaaaaaaaaaaaagggcagtggaggggatgtttttatttcttaaattatattttagtttatatatagtcaaggctttgaaatgaatcattt

SEQ ID NO: 47331 - DNA, 201 bp, Homo sapiens
aatttcccttctttgtttagtataattatttttaaagagcgtgaaaatgtgtattctatttttaaaatttaatattttttcagtgctgacatattcaactrtgatttattttgattttcaggtctttagcaatgttaattcaaacctgagagttttaaactatgttggaataatggataccattgagaatatagtaaaatg

SEQ ID NO: 47332 - DNA, 201 bp, Homo sapiens
ttagccttccagagtgctgggattacaggtgtgagccaccgcacctggccaaaataaaaactttattcccactaaatatgtattactcagggaggagttgraaagaaatataatggagaaagaatttaagagagctttgttttggtaaagatttggggaaatgttcagaaaatggttatagaacgacaccgtgcttaataa

SEQ ID NO: 47333 - DNA, 201 bp, Homo sapiens
ataaaattttaggatcataagacatatgattagcttaatgtaagacttttcttttctgaagtaaatgttttcatatagtttattattaccacacactgaawtgtggaccataattaggttacagcaatgattatattaccatattttgatttttagtatcagttgagtagccaggattttaaaattcagattctgaagttt

SEQ ID NO: 47334 - DNA, 201 bp, Homo sapiens
ccagagattccaaaaatttttgatatgggactgtctttccccattactcttctctcttctctcttctctcctccctccctccctccctccttccttccttmctcccttcctccctctctcccttccctcccctcccctccccttccctctttctctcactctttctctctttctccttttctttctcagaatctcgctgtg

SEQ ID NO: 47335 - DNA, 201 bp, Homo sapiens
ttttgtatttttagtagagacggagtttcaccatgttggtcaggctggtctcgggctcccgacctcaggtgatctgcccgcctcggcctcccaaagtgctrggattacaggccactgtgcctggccgaaagctacaatttttaagaagcattttgaaatcttaatgtcaattaatggactcccaattattatctacatgga

SEQ ID NO: 47336 - DNA, 201 bp, Homo sapiens
cttagccctataatcccagcactttgggtggccgagacgggtggatcacttgaagtcaggagtttgtgagcatgctcaccaacatggcggaactctgtctstactagaaatacaaaaattagctgggcgtggtggtgtttgcctgtaatcccagctactcgggaggctgaggcacgagaatcgcttgaacccaggatgtca

SEQ ID NO: 47337 - DNA, 201 bp, Homo sapiens
agagtatttataaattacaataaaaaatgatccaaaaggtgatctgagctaaagacgaacaaacaaaaatgtgatggagttaataatgttagggttgtagttttttttttttttttttttttttgagacagcgtcccactttgtcccccaggctggagtgcagtggcatgatcttggctcacttcagtctccactttctgg

SEQ ID NO: 47338 - DNA, 201 bp, Homo sapiens
accacgcctggctaatttttgtattttttgtagagatggggtttcactatgttgccgaagctggtctcgaactccagagctcaagctatcagtctgcctcrgcctcctaaagtgcttaggtttacaggcgtgagccactgcactggaccctgtagaattttttcattcagttctgctgtgaagactgaagtgctgaatcct

SEQ ID NO: 47339 - DNA, 201 bp, Homo sapiens
tgaatccttaaatatagtttgtggacctctagattttaaactgtgaaacccagtttaaagattttttttttttttttttttttttttgagacagagtctckttctgtcgcccaggctggagtacagtggcgcaatctcagctcactgcaagctctgcctcccaggttcacgccgttctcctgtctcagcctcctgagtagc

SEQ ID NO: 47340 - DNA, 201 bp, Homo sapiens
aatccctcaaattagacatttttattctatacacttggttttgtttaaatttactcatagtgaccttattttgtttttctttgaaataaggtctcactctrttgcctaggctggagtgcagtgatgcgactgaactcctgggctcaagcaatcctactgcctcagcctcctgatagctgggactacaggcacacgccacca

SEQ ID NO: 47341 - DNA, 201 bp, Homo sapiens
tgcactccagcctggacgagagagtgagaccctgtctccaaaaataaataaataaaaagaaaaatacatatattgctctctaggagatgatggggtattgrggaagagagaccatgaagagagaattatgatagaattgtaatgtttcagtgagatgaataattcctgggatggaaataaagatagggtactgttgaagca

SEQ ID NO: 47342 - DNA, 201 bp, Homo sapiens
tcttgcttttctctctctctctgtttttgatgttttgaattgatttaaatttttttctcattgcagttttttctgtttagatgttatatgctctttttctkaatgataaattttgagatttcaacatgaacagttactcttatgttatagaatcttcacagataactataaaatgctttaactccatgcccattgtggctt

SEQ ID NO: 47343 - DNA, 201 bp, Homo sapiens
tttaaaaaaaatgcttaaagaagaaaactctgccttttatttcttgattcagttaaaaagaattgtcttatttctgctgagtaattgcattattaaaaagygtgtgggctgggcacagtggctcacgcctgtaatcttagcactttgggaggcaaaggcgtgtggatcacctgaggtcaggagttcgagaccagcccggcc

SEQ ID NO: 47344 - DNA, 201 bp, Homo sapiens
gccatttgtcttgcttttctctctctctctgtttttgatgttttgaattgatttaaatttttttctcattgcagttttttctgtttagatgttatatgctmtttttcttaatgataaattttgagatttcaacatgaacagttactcttatgttatagaatcttcacagataactataaaatgctttaactccatgcccat

SEQ ID NO: 47345 - DNA, 201 bp, Homo sapiens
tcttggaaatgtctgtctgaatcttccatttaccttcatttctagcagaaactgggaaatttctttttttcttttttcttttctttctctcttttctctgkctctttcttatctttcattattattacttttttttgagatggtgtgttgctctgtctcccaggctggagtgcagtggcatgatcacggctcactgcaaca

SEQ ID NO: 47346 - DNA, 201 bp, Homo sapiens
gcttttgttgcttttaaaattcccagtttgtgttgctgtaagggaggtaacatttctcaccctttctgtaaatgagtttcctgccaaaacctacctgtgartttcaaatgtttagaccaatcaaccaaccaaagaccttgagataacctaagaaggtataacctaagaagggacagttacacagtaattgggaaaacttct

SEQ ID NO: 47347 - DNA, 201 bp, Homo sapiens
taaccattcactaaaatcactctatgttaggaattgtgctacaaaaaggcattgtatattttggatcttttccctacatttaatcctctcaacagcagtgrgttagtgctgttgtgcattttttgttgaggaggagattgaggcttggggaaactaagtaatctgcccaagatgatacagctagtaagtaatgtagtacta

SEQ ID NO: 47348 - DNA, 201 bp, Homo sapiens
tggtctggaactcctgacctcaaatgatccactcaccttggcctcttaaaatgctgggattacaggtgtgagcccctgtgcgcgcggcctcattcttcttytttttttttttttttttggagacagagccttgctctgtcacacgggctggagtgcagtggcacagtcatagctcactgtaacctcaacctcccaggctca

SEQ ID NO: 47349 - DNA, 201 bp, Homo sapiens
aacttgacacaagttgaacagaaactgattatttttggtgctgatccaagagaaatgtatttttaaatactgtacatcctggatctttgttgagtatttartatattgatatatatttttataaggtgaggtaactcaaaatttaagtcttaaatattgatgcagtcatctgtcttctctacattaccatagccagttact

SEQ ID NO: 47350 - DNA, 201 bp, Homo sapiens
ttgaagaatcatggagtcattataagagtctcttgcacaagtgttgagcctacttaatgaatattgaacgaaattacattcacttttccctggaatgaaayctctaagcaagagtaaaaatttagctttttctgaatgtgaacataaggccatgaagtagacataccttgttgaatcattatggggcagaggcccagatat

SEQ ID NO: 47351 - DNA, 201 bp, Homo sapiens
aggatctgagtagattatttttcaaaaaccagccacatgttccagtctgtgtttattgaataaacattccctttctgttttctaattttccttttattacrtgctaagtaattacatatactagtgtctgtgggctttctctttttttcctagcaacttgtttgtatgctgctatacttttgatgattgtcataacgttat

SEQ ID NO: 47352 - DNA, 201 bp, Homo sapiens
tctcttttctctgtctctttcttatctttcattattattacttttttttgagatggtgtgttgctctgtctcccaggctggagtgcagtggcatgatcacrgctcactgcaacacactctgtctcccgggttcaagcgattctgatgcctcagcctcccgattagctgggattacaggcgtctgccactacgcttggctaa

SEQ ID NO: 47353 - DNA, 201 bp, Homo sapiens
acattccctttctgttttctaattttccttttattacatgctaagtaattacatatactagtgtctgtgggctttctctttttttcctagcaacttgtttrtatgctgctatacttttgatgattgtcataacgttataagagaatttctaataggactaacctttttctaatttctcaccttttttcaaaatggtagcac

SEQ ID NO: 47354 - DNA, 201 bp, Homo sapiens
attttttttttgtagagatgggttcttgctttattgctcaagctggtctcgaactcctgacttcaagtaatcctccctcctcatcctacaaaagtgctggrattataggtgtgagccaccacgcctgacctgaaaaaactcttggaaatgtctgtctgaatcttccatttaccttcatttctagcagaaactgggaaattt

SEQ ID NO: 47355 - DNA, 201 bp, Homo sapiens
ttcttttcttttttttttggtgggggggttggggggcgggacagagtctgactgtgtcgcccaggctggagtgcagtggcacagtcttggctcactacaayctctgcctcccaggttcaagcgattcttgtgcctcagcctcctgagtagctaggattacaggtagtcgccacctcacctggctaatttttgtatttttag

SEQ ID NO: 47356 - DNA, 201 bp, Homo sapiens
cggcctcctaaagtgcttaggtttacaggcgtgagccactgcactggaccctgtagaattttttcattcagttctgctgtgaagactgaagtgctgaatcyttaaatatagtttgtggacctctagattttaaactgtgaaacccagtttaaagattttttttttttttttttttttttttgagacagagtctcgttctgt

SEQ ID NO: 47357 - DNA, 201 bp, Homo sapiens
aataaaattaaccatttttaccaggtatatgcaagcaagcatgcaggtaccaacaaggctttgatttttttttaagcaaacatgtcttatttatttataarctagtgccaagtgatgagcatgtaaatgatgggcagtatttatgaaatttcagaaagtggttgtactaaagagcacttgtagcttcagttgtggttttaa

SEQ ID NO: 47358 - DNA, 201 bp, Homo sapiens
ttcttccaccttggcctcccactgttgggatttcaggcatgagccactgtgcctttttttttttttttaagagataaagagtctccctttgttgcccagartggagcacagtggctattaacaggccatcatagctcactacagcctcaacctcctgggctcaagggatcttcctgcctcagcctcctgggatagctggga

SEQ ID NO: 47359 - DNA, 201 bp, Homo sapiens
tgagatgggaaagtattggaaggttttgagcagagtaatgacaagatctgatgtgccttctaaaatgactgttgtggctgccatgttgggtagactatatyagggcaggggtagaggcaagagaccagttagggagctctttcagtatttgaggtgagaggctggatgctgtggctcacgcctataatcctagcactttgg

SEQ ID NO: 47360 - DNA, 201 bp, Homo sapiens
ataactagaataaccaatgcagagaagtccttaaaggacctgatggagctgaaaaccaaggcacgagagctacgtgacgaatgcagaagcctcagtagccratgtgatcaactggcagaaagggtatcagtgatggaagacgaaatgaatgaagtgaagcgagaagagaagtttagagcaaaaagaataaaaagaagtgaa

SEQ ID NO: 47361 - DNA, 201 bp, Homo sapiens
gctggagtacagtggtgcagtcacagctcattgcagtctggaactccagggctcaagagatcctcctgcctcagcctcctgagtagctgggactacaggckcatgccaccatgcctggctaattttttaaaaaaaatttttttgcagagatggggtctcactgtgttggccaggctggtctcaaactcctgggctcaagtt

SEQ ID NO: 47362 - DNA, 201 bp, Homo sapiens
acagcttttatctgaacatcagtctttgagggacagttgaagcactggtatatgtgtgagcgagagattggtgtttttttcaaatgtagaagaggtaactkcttacattttttgctcttaaaagtatattatttcataatattcaaatttgccttgggatttaaagtataaattgtcattttagtaacacaattgaatatt

SEQ ID NO: 47363 - DNA, 201 bp, Homo sapiens
tgttctcctcctgatatatgtgatgtgtgattttcagtctgtgcagaaccttaatactattttaaaatctgggtcttctaacaccaaacatagtaggggagggccttgaaggcctttagatgaaaggccacacactaacgcagagagactcagataactgcttttgtttagcacaaatcacatcaactgaaccattttaag

SEQ ID NO: 47364 - DNA, 201 bp, Homo sapiens
tatgaaaggtggagaacatgcattaaaaatgggcaaattctggcctgggcatggtggcttatgcctgtaatcccagcacttgggaggctgaagcgggcagrtcatctgaggtcaggagtttgagaccagcctggccaaaataatgaaatcctgtctctactaaaactacaaaaattagctgggcatggtagcacacctgta

SEQ ID NO: 47365 - DNA, 201 bp, Homo sapiens
gaaccagaaataccatttgacccaacaatcccattactgggtatatacccaaaggaatataaatcatcctgttacaaagatgcatgcatgcgtatgttcaytgaagcactatctgcagtagcaaagacgtggaatcaacccaaatgcccatcaatgatagactgggacctgggagccattatcctcagcaaactaacacag

SEQ ID NO: 47366 - DNA, 201 bp, Homo sapiens
gaaaggtggagaacatgcattaaaaatgggcaaattctggcctgggcatggtggcttatgcctgtaatcccagcacttgggaggctgaagcgggcagatcrtctgaggtcaggagtttgagaccagcctggccaaaataatgaaatcctgtctctactaaaactacaaaaattagctgggcatggtagcacacctgtagtc

SEQ ID NO: 47367 - DNA, 201 bp, Homo sapiens
cgggtgggatgatcgcttgaacctgggaggcggaggctgcagtgagccgagatcacgccactgcactccagcctgggcgacagaatgaggctttttctttaaaaaaaaaaaaaaaggaaaaaaaaaggcacatttatctcaccttccctcctattctgggaatgctaacatcctcagggaatctcccatattggtccccta

SEQ ID NO: 47368 - DNA, 201 bp, Homo sapiens
ctactttgcatctcattttgtggaagtgattttcagtgtcaattgtttgtttagacacagagtttggccctgttgcccaggctggaatggatcacagctcrttgcaacctccacctcctgggttcaagccatcctcccacctcagcctcctgagtagctgggactacaagcacctgccaccacgcccagctaatttttata

SEQ ID NO: 47369 - DNA, 201 bp, Homo sapiens
tattgctaactaaagtctacactctatttagatttcttttttctttcttttttttttttttgagatggagttttgctcttgttgcccaggctggagtgcartggcgcgttctcagctcactgcagcctccacctcccgggttcaggcaattcttctgcctcagcctcccaagtagctgggactacaggcatgcaccaccat

SEQ ID NO: 47370 - DNA, 201 bp, Homo sapiens
gaatgagaattactgtcacttcctatccttgtcaatatttggtatagtcagcttttgggacttaagccattctaatcaatatgcagtggttgggatgtaatttttttttttttttttttttttttgtgacagtctcactttgtcatccaggctgaagtgcagtggcatgatctcagatcactacaacctccacctcttggg

SEQ ID NO: 47371 - DNA, 201 bp, Homo sapiens
aatgagaattactgtcacttcctatccttgtcaatatttggtatagtcagcttttgggacttaagccattctaatcaatatgcagtggttgggatgtaatttttttttttttttttttttttttgtgacagtctcactttgtcatccaggctgaagtgcagtggcatgatctcagatcactacaacctccacctcttgggt

SEQ ID NO: 47372 - DNA, 201 bp, Homo sapiens
tgggctgggcacagtggctcacgcctgtaatcttagcactttgggaggcaaaggcgtgtggatcacctgaggtcaggagttcgagaccagcccggccaacrtggtgaaaccccatctctactaaaaatccaaaaaaattagccaggtgtggtggcgtgtgcctgtaatcccagctactcaggaggctgagtgaggcaggag

SEQ ID NO: 47373 - DNA, 201 bp, Homo sapiens
ttgagccattgcgctccagcctgggcagcaagagtgaaaactcgatctcaaaaaaaaaattaataatgtgtgtggtacttcaaccagtcttgaagagaatrcagaactggaaagaagaatagacatagaacactcacaacacatggatggaataaaatctaagcatgtctttttaagttatagatatctagcaaaattata

SEQ ID NO: 47374 - DNA, 201 bp, Homo sapiens
tagcctcccaagtaactgggattacaggtgcctgccaccatgccctgctaatttttgtatttttagtagaaatggggtttcaccatgttggccagactggyctctaacttctgacctcaggtaatccacccacctcggtctcccaaagtactgggatcacaggcataagccactgtgcctgcccggcctttttttgtattt

SEQ ID NO: 47375 - DNA, 201 bp, Homo sapiens
agaaagtggatgccactctgtccttaggaaacccacagagaggagagacagtacgggggccaagtgccataatggagtcctgtgatagtgcagaacttcarttagttctgattagggcacagtttctacttctaggggccatccagccgacctcaggggtttcaggtcagcttttcatcctcaccccgcccccgcccctgg

SEQ ID NO: 47376 - DNA, 201 bp, Homo sapiens
gtatggctaggggagagcctgagctatagaatgcagactcttgatgatgactactacatagtcattaaacctggtttaaaacaagacagtggctgattttyacaactataaatttctgaagatggagcagtggtagcatgatctcattgctttattctagtaacatattttttttctttattcacgttataaattttgttt

SEQ ID NO: 47377 - DNA, 201 bp, Homo sapiens
aaaagtaacatgttgcagcaaactagggataatggaaatatcaaacacttcagtattctctgttttcagatacaaggccagttatttgttctaaatgtcarcttggcttggtggttgagataaaaattctaacacctagtttttatgccaccttaaagttatactttctgtgtgttgtactttcaaatgtttaaaaaaata

SEQ ID NO: 47378 - DNA, 201 bp, Homo sapiens
tttcttaatattgttctgcaaagcctctgaaattcccagatgtcataaagttctcttttgaaaattaagaatggccttttagctgggcatggtggctcacrcctgtaatcccagcactttgggaggccgaggcaagtgaatcagctgaggtcgggagttcaagaccagcctgaccaacaatgtgaaaccctatctctacta

SEQ ID NO: 47379 - DNA, 201 bp, Homo sapiens
aggtgcctggagtcccagctacttgggaggctgagacagaactgtttgaacccaggaggcggaggttgcagtgagccgaggtcatgctgctccactccagyctgggtgacagagtgagactgcatcttaaaaaaagaaaaaaaaggggggaggagccaagatggccaaataggaacagctccggtctacagctcccattgt

SEQ ID NO: 47380 - DNA, 201 bp, Homo sapiens
catgctgctccactccagcctgggtgacagagtgagactgcatcttaaaaaaagaaaaaaaaggggggaggagccaagatggccaaataggaacagctccrgtctacagctcccattgtgagcaacgcagaagacgggtgatttctgtatttccaactgaggtaccgggttcatctcactggggagtgccagacagtaggt

SEQ ID NO: 47381 - DNA, 201 bp, Homo sapiens
gccttgaaggacatgaggaagcaggccagatggatcacctgggggcacagcattgcacgcagaagaaacagcaagtgcgaagaccctgagtgggacagtcmctagtttgtgctggtaacagcaaggagtccagtatggctggagctgagggagagggagagtagtaggtaagatcaaagagaaagggcaggggagattgta

SEQ ID NO: 47382 - DNA, 201 bp, Homo sapiens
cagaagacgggtgatttctgtatttccaactgaggtaccgggttcatctcactggggagtgccagacagtaggtgcaggacagtgggtgcagcgcaccacrcgcaagccgaagcagggcgaggcatcacctcacccgggaagcgcaaggggtcagggaattccctttcctagtcaaagaaagcagtgacagagggcacctg

SEQ ID NO: 47383 - DNA, 201 bp, Homo sapiens
cccccgaccgccgtgcctgcctcccacccgccagccacccggccccggccgcgaagtttcggccccgcacgtgacgcggctttcgggcctcttcgggagasggggagtcggactcagctcggctcccgccggggtagcgtccgcggaggagccggtggccgtgcggagcgagcgcggggcggggaccggtcggactctgcc

SEQ ID NO: 47384 - DNA, 201 bp, Homo sapiens
cgaactgggtggagcccaccacagctcaaggaggcctgcctgcatctgtaggcgccacctctgggggcagggcacagacaaaaagacagcagtaacctctrcagacttaaatgtccctctctgacagctttgaagagagtagtggttctcccagcatgcagcttgagatctgagaacgggcagactgcctcctcaagtggg

SEQ ID NO: 47385 - DNA, 201 bp, Homo sapiens
tgtaatttttttttttttttttttttttttgtgacagtctcactttgtcatccaggctgaagtgcagtggcatgatctcagatcactacaacctccacctyttgggttccagtaattctcctgcctggccttcctgagtaactgggattatgggcacccaccaccatgcccagctaatttttgtatttttagtagagatga

SEQ ID NO: 47386 - DNA, 201 bp, Homo sapiens
tttttttttttttttttttttgtgacagtctcactttgtcatccaggctgaagtgcagtggcatgatctcagatcactacaacctccacctcttgggttcmagtaattctcctgcctggccttcctgagtaactgggattatgggcacccaccaccatgcccagctaatttttgtatttttagtagagatgaggtttcacc

SEQ ID NO: 47387 - DNA, 201 bp, Homo sapiens
ataatatttaaaaggtaaattttaagtacaggatgcttatgtaatttttcatttcctgggaatccaaattcttagacttggttattttcctgttttttttycccagcagtaaattctaagttagaggtaaaacttgtgtttaaaatgagaagtataggttgttcccccatctctcatccccaaaagtcatcaccaagattc

SEQ ID NO: 47388 - DNA, 201 bp, Homo sapiens
agtcctttgagaagaacattcaaatccaaagttctcgcccactatcctcagaatatagaatggaacccttttgatcaagatgcggtgaacatggtatgtgttttttttcccctcatttactctttagccttgttttcactttattaatatgaaggtagtgactgtattttgaatgtctaccttatttcatttcatttattc

SEQ ID NO: 47389 - DNA, 201 bp, Homo sapiens
taaggtgattttaagttagtttgagaagggaaggtaatatacagtactaaaagcttgattaaaagctgcttgaagatatttgcttgctaactatcttagtaaaaaaaaaaaaaggtatatttgaatagtgcctcaaagctcacagattacatgtagaaaagtctgttggcccatttttattgagtatgtgcctcatgctta

SEQ ID NO: 47390 - DNA, 201 bp, Homo sapiens
gggcaccatagcaagaccctgtctcaaaataggtaggtaggtaggtaggtaggtaggtaggtagaggtaggtaggtaggtaggtggatggatggatggatrgatagatagatagatagatagatagatagatagatagatagatagaagatagagagatagtcaaccttgagagggtcttagaaataaagtaggtcatagt

SEQ ID NO: 47391 - DNA, 201 bp, Homo sapiens
agacttcactgtaaacatttatatagagaagctgctcctgaccatcaccttccaccgtcttcccagcactcaggtcaccttaggttctcttagtaccttgtatacctttttgtagcacctatctcagttgcagttaaccaattacttagctagtagtcaactgtgtatctcgtgcttaatgtaagcaccatgagaacagga

SEQ ID NO: 47392 - DNA, 201 bp, Homo sapiens
gacttcactgtaaacatttatatagagaagctgctcctgaccatcaccttccaccgtcttcccagcactcaggtcaccttaggttctcttagtaccttgtatacctttttgtagcacctatctcagttgcagttaaccaattacttagctagtagtcaactgtgtatctcgtgcttaatgtaagcaccatgagaacaggag

SEQ ID NO: 47393 - DNA, 201 bp, Homo sapiens
agctccagctgagggaattttcatttatctaaagtttttatttctgtttttttttccccagccgaatttaagattcatatttctgttttaaaaagttgtgmaatgaatatagcaaagtgttaacatttgttgaattcaggagggaaggtatctacacacagtgttaattatttctgttttacttctctatatgctctaatt

SEQ ID NO: 47394 - DNA, 201 bp, Homo sapiens
tgtaacgtaaaatatccgtgctttgggatttgatgaactcttggaaagcattttctgcatcctgctggttgtggaagcgttttccctgcaaaaaattgtcsagatgcttgaagaagtggtcagttggcaagaggtcaggtgaacatggtggatgaggcatgactgcatagcccaattcgttaaacttttgaagtatttgtt

SEQ ID NO: 47395 - DNA, 201 bp, Homo sapiens
tcaggtgaacatggtggatgaggcatgactgcatagcccaattcgttaaacttttgaagtatttgttgtgtgatgtgcggtcaggcattgttgtggaaaakaattgggccctttctgttgaccagtgcccgctgcaggctttgcagtttttgatgcatctcatcgatttgctgagcatacttcttggatgtaatgatttcg

SEQ ID NO: 47396 - DNA, 201 bp, Homo sapiens
cttaggagcactagaatatatagctacagggcattgttgaactttagacaagatcataggatttgacatgttttctgggtcaaatgcagagtttatctagygtcttctcttctgccatcagagcttcccaatcctttcatgttgtcatttgaagaggtgaatcctagcctaaccattaactgtttgtgacattttaatggg

SEQ ID NO: 47397 - DNA, 201 bp, Homo sapiens
ggacgtagtggcatgcgcctgtaatcccagctacttgggaggctgaggcaggagaatggcttgaacccaggaggcggagattgcagtgagccgagactgcrccattgcactccagcctgggtgacagagcgagactccgtctcaaagtaaaaaggaaaaaaaaaaaaagttagttctaagaacagttattaactcgtagta

SEQ ID NO: 47398 - DNA, 201 bp, Homo sapiens
tggctgggcacggtggctcacgcctgtaatcccagcactttgggaggctgaggcagatcccttgaggtcaggagttcgagaccagcctggccaacatggcraaacactgtctctactgaaagtacgaaacttagcgggacgtagtggcatgcgcctgtaatcccagctacttgggaggctgaggcaggagaatggcttgaa

SEQ ID NO: 47399 - DNA, 201 bp, Homo sapiens
cttttgcacatgtcctctctgcctggaatcttctttatccactaagacctatactcgtcctgaggtttcagttgggcttcattttttcctggtagctcctycttttctaatgtgtgtcttcctactattatatgtttttcccatagcaacccttatttaccctatcatagcacttcccttactttatagtttatgattttt

SEQ ID NO: 47400 - DNA, 201 bp, Homo sapiens
aaaggtgatctgagctaaagacgaacaaacaaaaatgtgatggagttaataatgttagggttgtagttttttttttttttttttttttttgagacagcgtmccactttgtcccccaggctggagtgcagtggcatgatcttggctcacttcagtctccactttctgggcttacgcagtactcctgcctcagtcccccaaat

SEQ ID NO: 47401 - DNA, 201 bp, Homo sapiens
taaacttcaagtgtataattgctaaacagatattaataagtgctgtcagattcttacatttccattacactttaattaagctaaacagtataggcaaaacwttcctaatgttaataaaaattaaagatgtaaattctgaaaatcatcagcggttgaacataataggattttaacatttttcttgtgtttttactctttgtc

SEQ ID NO: 47402 - DNA, 201 bp, Homo sapiens
actttggtttttactctaagagaatggggggagccattgcctgatttgaacagggtagagagacctctgacttagttttaaaaggatcatcctggcagctrgctgtattaagactaaattgtgtgtgtgtatgcagggaggttcaagggtagaagcaggaagatctgttgggaagcctgcagtaatttaagtaagggatga

SEQ ID NO: 47403 - DNA, 201 bp, Homo sapiens
tatttactaatagactgcattgactaatgtgatattttacattagtagaacaaatgtacccccttctctaccttgtaatttatatctttcttttagagaastttgttgatttctaatgtaggaggaagaaagtggtatttttgtgtaagcttaactgagttccttgtgtttttgacttcttataaaaatttttttggtgat

SEQ ID NO: 47404 - DNA, 201 bp, Homo sapiens
atatgattagcttaatgtaagacttttcttttctgaagtaaatgttttcatatagtttattattaccacacactgaaatgtggaccataattaggttacarcaatgattatattaccatattttgatttttagtatcagttgagtagccaggattttaaaattcagattctgaagttttaaatgctgctctgttgttaaca

SEQ ID NO: 47405 - DNA, 201 bp, Homo sapiens
aagctgtagtggatcaaaccagcagcaggccaccaaacagtgaccgtgacctttttttggtgcaagtttggctttgggaagtactttagagcttcttcttrgttcagccactaagctggtcatcgccggttgtctaatgaaatccactttttgttgcacatgacaatttgattgagaaatggttcgttgttgctgtgtaga

SEQ ID NO: 47406 - DNA, 201 bp, Homo sapiens
cccattaaaatgatggtccaggctcagtggctcaagcctgtaatcccagcactttgagaggacgaagcaggcggatcatgaggtcaggagtttgagaccakcctggccaacatagtgaaacccatctctactaaaaatacagaaattagccaggtgcagtggcagacgcctgtaatcccagctacttgggaggctgaggca

SEQ ID NO: 47407 - DNA, 201 bp, Homo sapiens
aataaattttagtaattgcaagtgtatttaggcaggtccgagtgcagtggtgttgataactaattcattacaatcagttacagatttctttgttccttctccactcccactgcttcacttgactggcctttaaaaaaataaataaataataaattaaaaagagaaactatatttagtgttaggtaaatataacatggctct

SEQ ID NO: 47408 - DNA, 201 bp, Homo sapiens
ttctgtttttttttccccagccgaatttaagattcatatttctgttttaaaaagttgtgaaatgaatatagcaaagtgttaacatttgttgaattcaggagggaaggtatctacacacagtgttaattatttctgttttacttctctatatgctctaatttcttctttttaatttttttgagatagggtctcactctgttg

SEQ ID NO: 47409 - DNA, 201 bp, Homo sapiens
ttgggaggccgaggtgtgtggatcatgaggtcaggagatcgagaccatcctggctaacacagtgaaaccctgtctctattaaaaataccaaaaattagccrggcatggtggcacacacctgtagtcccagctagtcgggaggctgaggcaggagaatcgcttgaacccaggaggtggaggttgcagtgagctgagatcaca

SEQ ID NO: 47410 - DNA, 201 bp, Homo sapiens
tttttattgagacggagtcttgctctgtcacccaggctggagtgcagtggcgcaatctcagcatattgcaacctccacctcctgggttcaagcgattctcrtgcctcagcctcccaagtccctgggactacaggcgcgcaccaccatgcctggctaatttctttgtatttttagtagagatgaggttttgccatgctggct

SEQ ID NO: 47411 - DNA, 201 bp, Homo sapiens
gggcataagccttgctagacacagctcctggtctgcaccaccatggctcctgtgccgccagccacaggtccagacctagacccctctgttgcccttgaggrgctgaccttattctccacagtgatgctggtggacagcatggcaggggctgaggcagcagaggccattgccaccttgggatctgtgccagagccatcacta

SEQ ID NO: 47412 - DNA, 201 bp, Homo sapiens
tttgtatttttagtagagatgaggttttgccatgctggctaggctggtctcgaactcctgaccctaggtgatctgcctgccttggcctcccaaagtgctgrgattacaggtgtaagccaccgcacccggcccacacctcctcttttaagtagcaggttatgtctcaccgtttgtggtctgtcctgagctctcctatttctg

SEQ ID NO: 47413 - DNA, 201 bp, Homo sapiens
gctcccaactactgtgtttccatggggtatattattagaaccgaataatgatcacagtcttttctgttttgtgtaaagggagcaggtatggtgggaccagyggctgagatgagactgctgtttctctttgaggtggcagtcagtgactgcagagagaaataggaaggaacacaagtgttaacttggctgatttgggtatat

SEQ ID NO: 47414 - DNA, 201 bp, Homo sapiens
gttttgccatgctggctaggctggtctcgaactcctgaccctaggtgatctgcctgccttggcctcccaaagtgctgggattacaggtgtaagccaccgcrcccggcccacacctcctcttttaagtagcaggttatgtctcaccgtttgtggtctgtcctgagctctcctatttctgctctttttttgtttgtttgtttt

SEQ ID NO: 47415 - DNA, 201 bp, Homo sapiens
gcacaatgtgatagatgctgtaaatcagcgtttagaggtgtttatctaactctccctagtgggagatggggaaattttcactgagaatgtaactctgcacyatgagcagatgtttgctaagtgggcaaggattgagtgggggatgtcttaaactgagggaaaacatttgtaaaagcagaaaggggtgaggatatgacagca

SEQ ID NO: 47416 - DNA, 201 bp, Homo sapiens
ttgtggagtctgttcaggagttttagctcattaatatctaccaatttatttcagtttcaaatgaagaagaataagcatttatggatatggttttatactcdatttttttgtaatctgtatgccgagaacaacagagtgaatcctgagattatagagctagatttttaaaaaatttaaagtgacataccccaaaaaattgcc

SEQ ID NO: 47417 - DNA, 201 bp, Homo sapiens
tcctttactcttcttaactgtgttaagggggttttaataacatgtgatacttcatttcttactcactgataaagctatgccataaatttaaaaacattgcrtgtgctgaagagttaccatgaaaacccaaagtgaatcaaagtaggtggatttcagtgatgaaaatgtccttctagactgatttgaaattctgatccacag

SEQ ID NO: 47418 - DNA, 201 bp, Homo sapiens
cagcacagtatgaaaatcagagtatgattcttttttcaaagaactagtggaagaataaaaggggaatttaaacaccattgtctaacttttgataccaataattgaagtctaagaaacatttttgggccttgcttacctcctttggttcttcatagtggaaataaaccactacccacaccacactgcatgcctgtgtgcctt

SEQ ID NO: 47419 - DNA, 201 bp, Homo sapiens
taaacaaactcaaacatttcttctgatttctgtcacctcttctactcaactcaaaaatatcttgtgtgaactcttaattattcaaaggttaatcaagtgcrtagttacatatgcacttgcctctaccacctctctctgcctcctgcattaggtataatgacttctgaaatggttttgctctaggaggtttagtgaattttg

SEQ ID NO: 47420 - DNA, 201 bp, Homo sapiens
ttccccttactttgccgtctaggatcagagagcagtgtgaattttccccttggtgcctgggggtgggggagccagggagaaacacatagtgaagcttcctrttttgtttattaacttccaccccatgtcttatgttcaaccattgatgtaatcaatattatttttatgtgatgggctacacttttggcactccacccccca

SEQ ID NO: 47421 - DNA, 201 bp, Homo sapiens
agttgcctgaagaatttccacagttccccaataaagtggattttatccaagaactctctgaggttcttgttcaatttgggatccctcctgagggcagcctrcattgcagtgagagtaccagcaaactgaagaatatggttctgaaagacttggtcaatgacaaaaagaacggcaatgtctgtactaataacatcagcatgt

SEQ ID NO: 47422 - DNA, 201 bp, Homo sapiens
tttgttaaaaaaaaaaaaaaaggaaaaaggaaagcagtttatagatgaatacttaaatagtttcattttgtacaagtcacctggttttgttcccatgtgtkaggaagaaatgagttggacagaattagaagtcttgtcactgaagtaattaaagttattacagagcagcttttttagattagaaaggaagaagctagaaat

SEQ ID NO: 47423 - DNA, 201 bp, Homo sapiens
taaattttaagtacaggatgcttatgtaatttttcatttcctgggaatccaaattcttagacttggttattttcctgtttttttttcccagcagtaaattytaagttagaggtaaaacttgtgtttaaaatgagaagtataggttgttcccccatctctcatccccaaaagtcatcaccaagattctcttcttttggccag

SEQ ID NO: 47424 - DNA, 201 bp, Homo sapiens
ggttgttcccccatctctcatccccaaaagtcatcaccaagattctcttcttttggccagtgctagtaggaatagctgcatccagtcatttctaaattctyttttttttttttttttttgagacggagccttactctgtcacccaggctagagtgcggtggtgtgatcttggctcactgcaacccccacctcccgggttca

SEQ ID NO: 47425 - DNA, 201 bp, Homo sapiens
gataaactctccttaaggatgtctgacaatttctcttctagaaatgaatgctctcaactcttagaagatggaagtatggagtagaaaaatacagagatgamatgtttgcctaaataagtcagaggaatctaaagaaaataatgatcattagccaaggacttcagttagaaatagtagtttagttgcctaagcaaatatatt

SEQ ID NO: 47426 - DNA, 201 bp, Homo sapiens
atgaaatgtttgcctaaataagtcagaggaatctaaagaaaataatgatcattagccaaggacttcagttagaaatagtagtttagttgcctaagcaaatrtatttaaattatgtgtccttgttcaaaaaaattcctatgtattttatattgttgtctccagcaagatttttgagtgtgactttttcgtccttctgcgatc

SEQ ID NO: 47427 - DNA, 201 bp, Homo sapiens
tataaaataaatagaaaactatgacatgcttttggaaaagttctagatattaactatgtattatttgttgtaggcgaaaattttgaccagagtcctttgaraagaacattcaaatccaaagttctcgcccactatcctcagaatatagaatggaacccttttgatcaagatgcggtgaacatggtatgtgttttttttccc

SEQ ID NO: 47428 - DNA, 201 bp, Homo sapiens
cccaggctggagtgcagtggcacaatcttggctcactgcaacctccacctcctgggttcaggcaatcctcctgcctcagcctcccgagtagctgagattayaggcgcacaccactatgcccagctaatcttttgtatttttagtagagacagggtttcaccatattggccaggctggtgttgaactcctgacctcaagtga

SEQ ID NO: 47429 - DNA, 201 bp, Homo sapiens
gaggtaatctgcttattggcatccatgactatgtaatattctagttgatagatcttatctttaagcctgtgttgtacctaagaattcataggaagaaaacrtggtcaataacttttaagcaaactgtatgaaaatataaggattctattttttatgtctgtcctaatgaaacatcataaatatattttaggtaacaaaaga

SEQ ID NO: 47430 - DNA, 201 bp, Homo sapiens
tgcctagccatatctcacagtaaaattataggaatggggctttcattgctggaggaccattgctggaagacccttttgcccccgccacccccatcctctcscccgtttccttaacattgcagctagaatatttcactggcatctcaaatgcaacatatccaaaactgaattcattattcgtcccaccagtcttttgtcagt

SEQ ID NO: 47431 - DNA, 201 bp, Homo sapiens
ccccgccacccccatcctctcccccgtttccttaacattgcagctagaatatttcactggcatctcaaatgcaacatatccaaaactgaattcattattcrtcccaccagtcttttgtcagtgaatggtacaaccatccacctacttgccaagtccaacaatgtacacatcaccctgaaagttctcacttactcaccctct

SEQ ID NO: 47432 - DNA, 201 bp, Homo sapiens
agtttaagaccagcctgaccaacatagtgaaaccccgtctctactaaaaatacaaaaattggccaggtgtggtggcacatgcctgtaatcccagctactcrggaggctgaggcaggagaatcacttgaacccaggaggcggaggttgtggtgagccgtgatcacgccactgcactccagcctgggcaacagagcgagactc

SEQ ID NO: 47433 - DNA, 201 bp, Homo sapiens
taaacagtgatattactttattggcctgagaggagcctgatggaaagagcctgattacagttctcatgtttcaaggaatattgtatggtaggcctataatytgtcatttttacagacaatgtaaagatgaaaagcaacttaattgcgttatttaggtacagtagaaatctgaatttgtattattgttaccggtggatggag

SEQ ID NO: 47434 - DNA, 201 bp, Homo sapiens
tgtactagaatgtaaaatcttgtatattcttcatagtgaaggactgacaggacccgtttacagtgaaccacttgtaaatcatcttgtttctggtggatggrgccaatggggaaataattaaagtattgagtgtatggagaggatagaagttggtagaaaacaaaaacttaagaaccatactggtgattccaaaattccccc

SEQ ID NO: 47435 - DNA, 201 bp, Homo sapiens
atttgaaatggataatcccaaattacattcataggtttgacattagaatgaagataagccctcattttgagccaagtttaggttcaagctcacaataaaattttttttttttcttgagacaggttctgactctgtcatccagactggagtgcactggtgcaatcttggctcactgcagccttgacctcccatgctctagcg

SEQ ID NO: 47436 - DNA, 201 bp, Homo sapiens
catcctctcccccgtttccttaacattgcagctagaatatttcactggcatctcaaatgcaacatatccaaaactgaattcattattcgtcccaccagtcttttgtcagtgaatggtacaaccatccacctacttgccaagtccaacaatgtacacatcaccctgaaagttctcacttactcaccctctcccatatataat

SEQ ID NO: 47437 - DNA, 201 bp, Homo sapiens
cacagtggctcatgcctgtaatctcagcactttgggaggcggaggcaggcaggcagatcacttgaggtcaggagttcaagaccagcctggccaacatggcraaacccctttctacaaaaaacacaaaaaattagccaggcgtggtggtgcacagctgtaatccaagctactcgggaggctgaggcatgagaatcacttgaa

SEQ ID NO: 47438 - DNA, 201 bp, Homo sapiens
gtccactcggaaggatcacctgaagccaggaattcagaaacagcgtgtacaacaaagcgagacttcgtgtctctaaaaaaatttttaaagaattagccagrtatagtggcaggtgcctgtaccccgagctacccaggaggctaaggcaggaggatcacttgagctcaggggttcaaggctgctgtgagctatgatcgtacc

SEQ ID NO: 47439 - DNA, 201 bp, Homo sapiens
taaactcttgatctctatcttactggtccgatttgtgtgttgtcacgtagaatgaaaatatgtttagacggtataagaaacctctgatggaaaaatctggktgtctccctgcaggttgctaagaaagagtgatgtttcagggaggctgagtcttgaagcagcagcagcagatctgacacttgtccttcacagctcctttcc

SEQ ID NO: 47440 - DNA, 201 bp, Homo sapiens
ttatcctgatttttcactaaacatttgaaatatgtacttttcattattatatatccttttcattactacatacattttagaggctgtataatattacattytgggtatgccttaatttgcttaacattcttttgtcatttataatttttcactgttaaaaccatgctgtcaaataccacatgttcacatttgtaagtggaa

SEQ ID NO: 47441 - DNA, 201 bp, Homo sapiens
tcattaacttgttatgatgaaatcagccttaatgtgaacgtagaattattaaaagattctgccatagcctttccttatacagttattcctaagactaggartaagtggcttttaccccctaccaaatccaggtattcataggttttacctaagtctatatctcattctatccaaatatacatagtaatttaatatgtaaaa

SEQ ID NO: 47442 - DNA, 201 bp, Homo sapiens
ttttgggggcatgtgttcagggtgtaatttgaacgtggctccagcttcatttcactgcagctgtttaggcgcaacctttatgcactgttgacttctcttcwggtggcttccctcagagttattaagtggcagcagaagttaagagtttgtattcgcacatcacaccttccttagaagagatttaactttcctcctctagcc

SEQ ID NO: 47443 - DNA, 201 bp, Homo sapiens
tctagagaaatataagaacatttgctgactcaaactgggaaagttacacacttgtcattataagcctgctttggctaaagtaatctggttactagtagtartctgatcatcagtgacacctctaatttttagttgttttattgtgggatggtgagggggtattgttagtagatagcaaagttaagggttaattagaaatgt

SEQ ID NO: 47444 - DNA, 201 bp, Homo sapiens
ttcaggttttctgagatttcttgtagttcctgacagtttaacaattctgatgaaactcaggttttctgagaaagtatcttgtagttcctgatataaaacartactgtatatcttttaaaaatggaaaaataatagcattttgcagttcatgtttcccgattagatatatagttcttactttttttgatttgttggaagagc

SEQ ID NO: 47445 - DNA, 201 bp, Homo sapiens
tggcaatttttttcatgaagaaccaaataataagtagttgaggtattgtgggcatacagtttctgccacagtcacccagctctgctgttgtagtgtgaagrcatccatagacagtgcataagtggatggttgtgactgaatcccagtgaaactatttacagatcaggtggcagattgtatttgacctaagggtttttctta

SEQ ID NO: 47446 - DNA, 201 bp, Homo sapiens
gttgcattttacttgactaggccaggggtgggcatacatggcccccaggccaaatctgtccagctgactgtttttataaataaaattgtgttggaacaaarccatacttacgtgtttaaaggttggtacaaaagtaattgtggttttggacagaattttaaatcataactaggctcaagcacatccttattaatcaaaata

SEQ ID NO: 47447 - DNA, 201 bp, Homo sapiens
attgatgtaatcaatattatttttatgtgatgggctacacttttggcactccaccccccaatctagaagcacaaccttctttttaactaacaaccttgtcstgattaagagagtatggacagtagaggttaaatactgtttgaagtctactacagatacctgagggataatcagaactttatacatatgcttggcctcttg

SEQ ID NO: 47448 - DNA, 201 bp, Homo sapiens
ccatacttacgtgtttaaaggttggtacaaaagtaattgtggttttggacagaattttaaatcataactaggctcaagcacatccttattaatcaaaatargaaccattacaatcaacacatttttgccaatgagaaataagtttgtttattcctgtaacgtaaaatatccgtgctttgggatttgatgaactcttggaaa

SEQ ID NO: 47449 - DNA, 201 bp, Homo sapiens
ttgtggaagcgttttccctgcaaaaaattgtcgagatgcttgaagaagtggtcagttggcaagaggtcaggtgaacatggtggatgaggcatgactgcatrgcccaattcgttaaacttttgaagtatttgttgtgtgatgtgcggtcaggcattgttgtggaaaagaattgggccctttctgttgaccagtgcccgctgc

SEQ ID NO: 47450 - DNA, 201 bp, Homo sapiens
cttcagccttccaaagtgctaggataacaggcatgagccaccgcacctggctccaagatgacgattttttaaaatttccactcagctcatgaggcacccasttaccgagtttttccacctttccaatttgcttcacatgtcaaacggccatagaatggtcgacgttgagttcttcagcaacttttcatgttgctgaagagg

SEQ ID NO: 47451 - DNA, 201 bp, Homo sapiens
gttgagttcttcagcaacttttcatgttgctgaagagggtcagcttcagtgattactctcaattgatcattgtcaacttctgatggccagccactatgctyctcatctccaaggctgccatctccttttcaaaacttcttgaaccaccactgcactgtgcgttagttagcagtccctgggccaaatgcattgtcgatgttg

SEQ ID NO: 47452 - DNA, 201 bp, Homo sapiens
tccaacaaatgtttttcactcctccctgggtcttttagatgtggggttataatgttgcttttaaatgcagaataattttatactcttggaaataaaaattktttgagatggagtctcgctctgtctcccaggctggagtgcagtggcgtgatctcggctcactacaacatctgcctcctggttcaagcgattctcctgcct

SEQ ID NO: 47453 - DNA, 201 bp, Homo sapiens
ctgaagttttaaatgctgctctgttgttaacagttttttagttgtccatcgggattttacaatacagatggttagaggcagaaattgaatcagatctcaayattatcagtcagtagtaggactataaaataaatagaaaactatgacatgcttttggaaaagttctagatattaactatgtattatttgttgtaggcgaaa

SEQ ID NO: 47454 - DNA, 201 bp, Homo sapiens
caggagtttgagaccagaatgggcaccatagcaagaccctgtctcaaaataggtaggtaggtaggtaggtaggtaggtaggtagaggtaggtaggtaggtrggtggatggatggatggatggatagatagatagatagatagatagatagatagatagatagatagaagatagagagatagtcaaccttgagagggtctta

SEQ ID NO: 47455 - DNA, 201 bp, Homo sapiens
cagacaagaaaagagggtgacttagattagagtggtaagcgtaaagatcaaaacaattactttctgactcaggaggctgaggcgggaggattgcttttacycaggagtttgaggctgcagtaaactgtgattgtaccactgcacttcatcctgagtgatagagcaagacctcacctctaaaaaagaaaaaaaaaaagaagc

SEQ ID NO: 47456 - DNA, 201 bp, Homo sapiens
catattttgatttttagtatcagttgagtagccaggattttaaaattcagattctgaagttttaaatgctgctctgttgttaacagttttttagttgtccrtcgggattttacaatacagatggttagaggcagaaattgaatcagatctcaacattatcagtcagtagtaggactataaaataaatagaaaactatgaca

SEQ ID NO: 47457 - DNA, 201 bp, Homo sapiens
cggagaatgcttgcagtttcccttttcatgcagcagaatgataacagggacaatcttttgattgtcttattatgttttggcttttgttgcttttaaaattyccagtttgtgttgctgtaagggaggtaacatttctcaccctttctgtaaatgagtttcctgccaaaacctacctgtgagtttcaaatgtttagaccaatc

SEQ ID NO: 47458 - DNA, 201 bp, Homo sapiens
ttatataaaactaggtagcatagcctactacaaaccttgactatatgatacagcctgttgctcttattgttataaaagatttaaacattttatttataaamtggtattaccaaccttcccctatttctgaatatttaggtaagaagcaaaaataagttatcctggctttgtgtagtggctcatacctgtaatcacagcact

SEQ ID NO: 47459 - DNA, 201 bp, Homo sapiens
taatgagatcaacactgcttaataaatacgtatactcatctgttcatagagtagaataatatgaaataacctgaattagctgtgaaaatagcagtgcttcrgctgggcgtggtggctcacgcctgtaatcccagcactttgggaggctgaggcgggcggatcacgaggtgaggagatcgagaccatcctggataacacggt

SEQ ID NO: 47460 - DNA, 201 bp, Homo sapiens
agtgggagcaagacgtctcacatgattagaagcaggaggaagaggggcggagagctgctacacacttctaaacaaccagatcttgcgataactcactatcrggaggaacagtaccgaggggatggctctaaaccattcatcaaggaccaccctcatgatccagtcgcctcccaccaggccccacctccaacattggagatt

SEQ ID NO: 47461 - DNA, 201 bp, Homo sapiens
tttttaaatgatacagtcaagagtttattccagagttgagaacctaataaatgttcttttatattgtataccatgctttttttagaaggcaaaaaaaaacyccaaaagcttccattatcacacttcctcttttattttttatttttatttttttttattgagacggagtcttgctctgtcacccaggctggagtgcagtgg

SEQ ID NO: 47462 - DNA, 201 bp, Homo sapiens
tacattcatcaaaactaagaaattaacattggaataatactattaactaaactccaggcttcatttggatttcgtgaatttttccactaataccctttttstgttccactgtccaatccaggataccacattgcatttagttatgtctctttagtctcccctaatctctgcagagactacttcttaaaggattcttgtgga

SEQ ID NO: 47463 - DNA, 201 bp, Homo sapiens
caccatggctcctgtgccgccagccacaggtccagacctagacccctctgttgcccttgaggggctgaccttattctccacagtgatgctggtggacagcrtggcaggggctgaggcagcagaggccattgccaccttgggatctgtgccagagccatcactaggcacatttttgacagtatgtttttattgtataatata

SEQ ID NO: 47464 - DNA, 201 bp, Homo sapiens
tatatacatgtgtatgaggaatttataatatatttctaatttaaggctattgcgaatattaaatctggataaaacctgtctttttgaatcctgttatgttaaaaaaacaacatttatttctggcttgaagttatttgtgtactgcattctgatttttttttttctttctttcacagttgtgcatgcctaaagggctatctt

SEQ ID NO: 47465 - DNA, 201 bp, Homo sapiens
tgtgattcaggatcttgagatgcggagattatcctggttggctctaaatgctatcacatgcacccttctagagagaggcaaagggaagtttgacacacgcwggaggaagtgatgtgaagacaggcagagtttggagtgatgcagctgtaagccaaagaatgcgcatagcaaccagaacttggaagaaacaagaaatgaatt

SEQ ID NO: 47466 - DNA, 201 bp, Homo sapiens
ggtaacatggtgaaaccccgtctctacaaaaaaattaaaaataaggccgggcacagtgtatcacgcctgtaatcccagcactttgggaggccgaggtgggyggatcacctgaggttgtgagttcgagaccagcctgaccaacatggagaaacctcatctctactaaaaatacagagttacccaggcgtggtggtgcatgcc

SEQ ID NO: 47467 - DNA, 201 bp, Homo sapiens
atgctatgtcttaatggatagtgaattgaaggaaattataaaatagtacctgtacactgatagattcttcaaaaaaggttacacaaatatttggattcacttttttttttagacaagttctcactccgtcacccaggctggagtgcagtagtgcaatcatgggtcactgcaaccttgacatcccgtgctcaagctgtcttc

SEQ ID NO: 47468 - DNA, 201 bp, Homo sapiens
attcctttgattaatgtcagtcttctccccaaactggaaattccatgagagcaggcatttgttattttttgtcccctggtgtatttttttattttctattwtatttccagtacacagcacagtgaaatggctccataaacgttacctgagtaagtgaagtaattctctgtaaggtctggctgaagaccttcatgtctccaa

SEQ ID NO: 47469 - DNA, 201 bp, Homo sapiens
gcatttccttatatatccagtgaatcccactccctgggaggtggattcatctctaaattccattagttacttttaccttcagtaaatggtctcagcacagstactgctccatcccatgagtggccacccaggaattaaaggttcctaattccccaccctctcattgtccctcttcccaaaccacaggtttccatgagcctg

SEQ ID NO: 47470 - DNA, 201 bp, Homo sapiens
tctcttctacaccacttaaagccacctcagtgatttttccattgctgttatattgaggtctatgagcctaaatatgttagcaagccctgcccaccctcttktcttaaacctcccctctcttcctgtatctttgccctccagacacattgggcttattttgattttggaatgcttcttacctactccccctatcccccagtc

SEQ ID NO: 47471 - DNA, 201 bp, Homo sapiens
ctagctaggacttctagtaccgtgttgaataacagtggtgaaagtggatatccttgttgtattccagatctcagaggaaaggtttttttttttcctcatcrgtatgatactagctgagagtctgtcatatatggtgtaattatattaagatatgtttcttctataccaagtttttttaaggtttttattatgaagggatgt

SEQ ID NO: 47472 - DNA, 201 bp, Homo sapiens
  misc_feature (1)...(201): n = A,T,C or G, or insertion/deletion polymorphism (see Tables 1-2)
tcagttgcatatttcaactccagaatttctgcgtagttcttttttaattatttaaatctctttgttaaatttttctgatagaattctgaactccttctccntgttatcttgaattttgttgagttttctcaaaacagctatttgaattctctgtctgaaaggtcactgtattagtccattctcgcattgctataaatatct

SEQ ID NO: 47473 - DNA, 201 bp, Homo sapiens
ttgcagtctagactttttttttacccactcttcttaggaaggctttccaggtatttgaacttgggtattgagatctaagccgtgtctgccttagggggcaycccaagcccagtaacctgtggttcttgcggatttgtagagttaccaccttggtagtttcggataagacctggatgaattctctggattaccaggcagaga

SEQ ID NO: 47474 - DNA, 201 bp, Homo sapiens
catttatttcaagaaaattttcaataattccacttattattgatctctagttttattctattgtggtcagagaagatgctttatattatttcagttttttwaaatgttttaagacttgttttgtgacataacatatggtccatccttgagaatgatccatgtgctgaggaaaaagaatgtgtactctgcagctttgggatg

SEQ ID NO: 47475 - DNA, 201 bp, Homo sapiens
actgcgcctggcctgatttttattatttcttctactaatttggggtttggtttgctcttgcttttctagttctttaatatacatcattaaatagttgtttrtttgaggtttttttcttttttgatgtaggcacttatagctataaacttgcctctcagtactgcttttgttgtatcccatagcttttcgtatgttgtgttt

SEQ ID NO: 47476 - DNA, 201 bp, Homo sapiens
gggatcttcctgcctcagcctcctgggatagctgggactaatggcgtgcaccacggtgcctggccagaattctctttatctctttgatacctctatcaccytctctgccacttagaacacaaaatttgtggttagagtagaagtggtagagggatagccagcaaatgccctagaccccagagcttctgtagatttaattgt

SEQ ID NO: 47477 - DNA, 201 bp, Homo sapiens
actaatggcgtgcaccacggtgcctggccagaattctctttatctctttgatacctctatcaccctctctgccacttagaacacaaaatttgtggttagartagaagtggtagagggatagccagcaaatgccctagaccccagagcttctgtagatttaattgtccattgaagaatcatggagtcattataagagtctct

SEQ ID NO: 47478 - DNA, 201 bp, Homo sapiens
cgtcctcccgagtagctgggattacaggcatgcaccaccacgcccagctaattttgtatttttagtagagacgggttttcttcatgttggtcaggctggtstcaaactcccatcttcaggtgatctgcccgccccggcctcccaaaatgctgggattacaggcatgagccaccgtgcctggcctaattgttacttattgtt

SEQ ID NO: 47479 - DNA, 201 bp, Homo sapiens
aagtgctttttaagcatccattgaaatgatcatatggtttttgttcttcattttgttgatatgatgatatatcagattgattgatttgcatatgttgaacyatccttgcatccctgggataaatcctatttagtcatgatgaatgatctttttaatgtgttgttgaatttggtttgctagtattttgttgaggatttttgc

SEQ ID NO: 47480 - DNA, 201 bp, Homo sapiens
gtgggtgcagaactgctatgctttccttggacttacccagcaccttaatgtatttgccagtccagaagctcctctatatttcttcttcttcttcttcttcttttttttttttttttgagatggagtctgtctctgtcacccaggctggagtgcagtggcgtgatcttggctcactgcaacctttgcctccaggttcaggtg

SEQ ID NO: 47481 - DNA, 201 bp, Homo sapiens
gaatgttatcaagtgctttttaagcatccattgaaatgatcatatggtttttgttcttcattttgttgatatgatgatatatcagattgattgatttgcayatgttgaactatccttgcatccctgggataaatcctatttagtcatgatgaatgatctttttaatgtgttgttgaatttggtttgctagtattttgttga

SEQ ID NO: 47482 - DNA, 201 bp, Homo sapiens
cttgagaatgatccatgtgctgaggaaaaagaatgtgtactctgcagctttgggatgaaatgttatgtatgtatctattaggtccatttggtctgattagktccatttggtacagattaagtctgatgttcattgattttctctctggaagatctgtccaacgctgaaaatgggatgttgaagttaccagctattattata

SEQ ID NO: 47483 - DNA, 201 bp, Homo sapiens
  misc_feature (1)...(201): n = A,T,C or G, or insertion/deletion polymorphism (see Tables 1-2)
ctttcctgagatagctttctctattagatcttattttgtccttgtttttgaaaaatagttcattggatgttaaattctatgttaaaagttttttttttttncttagtactctgaggataatattctatcatcttaaatagttcattggatgttaaattatatgttaaaagtttttttctcttagaactctgaggataatat

SEQ ID NO: 47484 - DNA, 201 bp, Homo sapiens
tttttctacttttgtgaagaacattattggtatttttatagggattgcatgaaatctgtagattgctttggggagaatgggcattttaacaatattgagtyttccaacccatgaatatggaatgtctttccagttttttgtgtccttttcaatttcttgctccagtgttttagttttcattgtagggacttttcacttatt

SEQ ID NO: 47485 - DNA, 201 bp, Homo sapiens
gcaccattgactgaagagactgtcctttctccattgtatgttctcggcacctttgtctaaagtgagttcactgtaaatgtgtggatttatttctgcattcyttattagactgtttcactggtctaatgtgtctgtttttatgccagtatcatcctgttttggttactctaactgtagtataatttgaagtcaggtaataaa

SEQ ID NO: 47486 - DNA, 201 bp, Homo sapiens
tcacctaggaaattgggatcagcccagctttcaaagggaggtacatgaatttaggactgcagagtacagcaaattttagttcctgatatggccatgctttyctaagaagtttccaaaggttattgactctcagcttagccttttctactgcacaatgtgatagatgctgtaaatcagcgtttagaggtgtttatctaactc

SEQ ID NO: 47487 - DNA, 201 bp, Homo sapiens
agtcttgaagcagcagcagcagatctgacacttgtccttcacagctcctttcctgtctcccatagtaagggctatgtaaacatttcatgatcagtgctggyacttgcagccgagaatgcggagaatgcttgcagtttcccttttcatgcagcagaatgataacagggacaatcttttgattgtcttattatgttttggctt

SEQ ID NO: 47488 - DNA, 201 bp, Homo sapiens
catagcccgcttgcaggctctggccaagcgtactggtgtggctgtggaaaaaatggacctctctgcttctctgggtgaaaaagacaaggatttaaaactgmattgtgaagaggcagaactaagggactaccagctcaatgtacagctccgagaggtctttgctaaccgttttacacagatgtttgcagattacgaagcatt

SEQ ID NO: 47489 - DNA, 201 bp, Homo sapiens
attaacttccaccccatgtcttatgttcaaccattgatgtaatcaatattatttttatgtgatgggctacacttttggcactccaccccccaatctagaarcacaaccttctttttaactaacaaccttgtcctgattaagagagtatggacagtagaggttaaatactgtttgaagtctactacagatacctgagggata

SEQ ID NO: 47490 - DNA, 201 bp, Homo sapiens
ttgggtggcttaggtggtgtggtggctccacattgatgtcatactgaggacaggggtcaagtactccatgattagtctttgctcttacttcaggagctgcsagaggctgtgcctttcattttctagtgccgtaggtcattgttggcaatacctgagatgaatttctgtgaaactagggagataagccaaattatgcatgtg

SEQ ID NO: 47491 - DNA, 201 bp, Homo sapiens
cacctttttgtacttttttattctggtaacaatatgcagtttctgaggattctgtggatctccgtcatatttttcatgatctgcaagtgaaggctgaaacsctttatatggaattcttgacctggtaaatttgtgatgaatccaatctatgtaaacgagagacttcacaccttttgtcccagtctgtagttcattttgcct

SEQ ID NO: 47492 - DNA, 201 bp, Homo sapiens
agtacagtgtttgtacgatagtggttcatttaaaaattaagctatggaatttttaaaatattggaccataaaaatctgttctaatttgtagattttgtagygttatggaagaaactcctctcttctggacaggtcaagaaaggtttccccaggaggtctcttctgaatagaatctttgtttttttttgagacagggtctcc

SEQ ID NO: 47493 - DNA, 201 bp, Homo sapiens
tttgttctgcttgtggttcattatgtttcctgaaatttaagaattaatgtcctttacccattttggaaaattctcaactatctttgtaaatattgcattcrtgtatctttttttaatcctcctgaaattctagtgaaacttttttttgttgttgttgttgttttgtttttgagacagagtctcactttattgcccaggatg

SEQ ID NO: 47494 - DNA, 201 bp, Homo sapiens
atatctgtagttttgtcctccttttcattcctaatactgtttgtgcattctctttttcccccaattatttttacctgaagtttgtcaattatattacttcyttttgtttgtttggttttttgagacagggcctcaccctgtcgctcatcctggagtgcagtagcacgatctaggctcactgcagtcttgacctccctgggc

SEQ ID NO: 47495 - DNA, 201 bp, Homo sapiens
cacctctatttttttcttgaataaatttttgttccttgctattttctctaagaaaatttttattaagctttcaatatattagcaaaaagtcttaatatttycttgttttcttgacccctgttatatctgtagttttgtcctccttttcattcctaatactgtttgtgcattctctttttcccccaattatttttacctgaa

SEQ ID NO: 47496 - DNA, 201 bp, Homo sapiens
tggtggttgagataaaaattctaacacctagtttttatgccaccttaaagttatactttctgtgtgttgtactttcaaatgtttaaaaaaataggccaggmgtggtgggattacaagcgcttgtaatcccagcactttgggaggccaaggtgggcggatcacaaggtcaagagatccagaccatcctggctaacatgatga

SEQ ID NO: 47497 - DNA, 201 bp, Homo sapiens
ggaggcaaccgaggagattaaggagtgtggatagtgacatggcaggaaaacaggagaatgtcatatcatgttctcaactaagaattttcttgactatttcygtagagcaacatttggggatcatgaaactgtgttaggcaaattagccagaaggtagtttctgttttgctgcattaatttcaaagttaatgatagtcaagt

SEQ ID NO: 47498 - DNA, 201 bp, Homo sapiens
aaggttttgagcagagtaatgacaagatctgatgtgccttctaaaatgactgttgtggctgccatgttgggtagactatatcagggcaggggtagaggcargagaccagttagggagctctttcagtatttgaggtgagaggctggatgctgtggctcacgcctataatcctagcactttggaaggccgaggcaggtggat

SEQ ID NO: 47499 - DNA, 201 bp, Homo sapiens
aggcactggggacagctgtgaagaaagcagtcagaaatccctgccatcatggagcatacgttctagtgtaaagagataatgaaaatacaatcatctctccrtaaccatgggggatggattctagagtgtcccccacaccaaaatcctcggatgctgaagtctcttataataaaatgttgtagcatttgtatataacctatg

SEQ ID NO: 47500 - DNA, 201 bp, Homo sapiens
  misc_feature (1)...(201): n = A,T,C or G, or insertion/deletion polymorphism (see Tables 1-2)
aacagttttgaaagcatctatctgtagtcggttttttaggcactggggacagctgtgaagaaagcagtcagaaatccctgccatcatggagcatacgttcnagtgtaaagagataatgaaaatacaatcatctctccgtaaccatgggggatggattctagagtgtcccccacaccaaaatcctcggatgctgaagtctct

SEQ ID NO: 47501 - DNA, 201 bp, Homo sapiens
gtaaatttttcgcttttcctttggtgggggtggggagactgggaagaatatattaaataataaacaatagtaaacaaaactgttcagccttaaaatacagyccccatcaacccacgtcttggctatcttcttcttaactcagcttcagagcaaaacattttctttttttcatattcttcggaggtagaaacacaaaacatt

SEQ ID NO: 47502 - DNA, 201 bp, Homo sapiens
caggcgcgggggtggccccaagggcacggaccccgcctggcgcgccggccccttcgcttgcagccgcactcggaggcggccggtgagtcaccgggcgcgcrggctgccccccgaccgccgtgcctgcctcccacccgccagccacccggccccggccgcgaagtttcggccccgcacgtgacgcggctttcgggcctcttc

SEQ ID NO: 47503 - DNA, 201 bp, Homo sapiens
ggtgatctgcccgccccggcctcccaaaatgctgggattacaggcatgagccaccgtgcctggcctaattgttacttattgttaatggtactgaggattamcatgtaaggtctttgaaatgaaatatggataagagtgtgccacagccttttacaaaacataagatgattaattacattatatcactagctatttaattca

SEQ ID NO: 47504 - DNA, 201 bp, Homo sapiens
cgcccaccggggctttcgcctccaggcgctgggttattaataacaggcgcgggggtggccccaagggcacggaccccgcctggcgcgccggccccttcgcytgcagccgcactcggaggcggccggtgagtcaccgggcgcgcgggctgccccccgaccgccgtgcctgcctcccacccgccagccacccggccccggccg

SEQ ID NO: 47505 - DNA, 201 bp, Homo sapiens
  misc_feature (1)...(201): n = A,T,C or G, or insertion/deletion polymorphism (see Tables 1-2)
tttcatggaaagtaagagtgaaaaactactcactcacaaccatgagaatggcacaaagccattcatgagagatccacccccaggacccaaacacctcaccnccaacattggggccaacaaaccatgtccaaaccgtagcaccaggccacatacattttttcttggatgactacaaaatcaggggttccccaacaccatccc

SEQ ID NO: 47506 - DNA, 201 bp, Homo sapiens
cagactccacaggtttaagagttcattctcacaagactgtcctcacttctgatgccagccacaaatgaggtatcaggtgtcttggtttatttgtgttactrtaaaatacctgaggctggttaatttataaagaaaagaagtttggcctggtgcagtggcttacacctgtaatcccagcactctgggaagctgagacaggca

SEQ ID NO: 47507 - DNA, 201 bp, Homo sapiens
acaggtttccatgagcctgggctgttataacaaatctcagtttttctgacaccaagtgagagagtctttcctccccaacacctgtcaatttgtgataccarctggatgcccaacagttcaattcattcctaactgaatgtcagactccacaggtttaagagttcattctcacaagactgtcctcacttctgatgccagcca

SEQ ID NO: 47508 - DNA, 201 bp, Homo sapiens
tttatttcttaaattatattttagtttatatatagtcaaggctttgaaatgaatcattttcaaagctaccaatattttaaataagtgtcttaaaaattttrgagtatataattcagacctaagagtacagtttttattcatctatccatttactcaacgaacatttttattgccaggcacaatattaagtaggtgttgagg

SEQ ID NO: 47509 - DNA, 201 bp, Homo sapiens
tggggtgttccacttggaatttatagggggaattgggcagtctcccttctcaaggtaaacagacttcgagtagcttttatccagtccttgagactggctgktccctcaaggattggataaaacagttcaattcatttctgactgaatcatcacctttgtgtctggatcacatatagccatctgtgattgttccatagtgag

SEQ ID NO: 47510 - DNA, 201 bp, Homo sapiens
tctcagctcactgcaacctctgcctccctgaatcagattcaagtgattctcctgccctagcctcccgagtagctgggattacaggcacgcgccaccacacytggcaaattttttgtatttttagtagagatgggtttttaccatgttggccaggctggtctcaaactcctaatgtcaagtgatccacccaccttggcctcc

SEQ ID NO: 47511 - DNA, 201 bp, Homo sapiens
gccactgcactccagggtgacagagcgagattccgtctcaaaaataaataaataaacaagaattattgaaagcatatttctgatctataaagtaagaatartaacacctcctaggtgttgtttttacttttttttttcttttcttttgagatggagtttcgctcttgttgcccaggctggagtgcaatggcgggatcttgg

SEQ ID NO: 47512 - DNA, 201 bp, Homo sapiens
tcagtccaagggaaaaagaggctccctatatgtgagaatctcttccttgcattcctctggtaacaagatccagtataaaccatttctttttcaatagggawctcttttgggcactgtcctctcccattagagtgtttttccaaaatcgccttagataccgtggatatttcaagtttcagcattgttttatgtccttcagtc

SEQ ID NO: 47513 - DNA, 201 bp, Homo sapiens
taattatttctgttttacttctctatatgctctaatttcttctttttaatttttttgagatagggtctcactctgttgcccaggctggagtgcagtggcaygatcagggctcactgcagcctcaacatcctggactcaagcagccctcccacttcagtctcccaaagtgctgggattagaaggtgtgagccacagggccca

SEQ ID NO: 47514 - DNA, 201 bp, Homo sapiens
aactaagggactaccagctcaatgtacagctccgagaggtctttgctaaccgttttacacagatgtttgcagattacgaagcatttgtcattcagactgcscaggacatggaatcctggctgaccaaccgggaacagatgcagaactttgacaaagtaaaaagaaccatagttttccttttgtggttattagtggctttat

SEQ ID NO: 47515 - DNA, 201 bp, Homo sapiens
attttgcctcttgagctactgacagcaaagtccctgccataagtgtggtggctgttctctttagagagagcgcctgctaaatattcagcatgaaccttccsaccagcagaagctgaggactcactgcttccattattacttacagatcacctttttgtatctgaaaaattttaccttaagtaattctctcttcctttcttc

SEQ ID NO: 47516 - DNA, 201 bp, Homo sapiens
ttaatctcagaaggaagttatctttgtggtatctttcattcaaagttcttccaacacatattaagaaaataacaaactatggattttattttaccagtacrtttgtgaagactaatgctgagcctagactaggatactagttgtcatctgaatatgaatgtgtagagaaaatagagatgctatgtcttaatggatagtgaa

SEQ ID NO: 47517 - DNA, 201 bp, Homo sapiens
ctgagacattcctgctgcctctttggaacccctttgaaaaccactccccttagtgttccaagatggatgtgctaagaggcacgtctaattctgtccctctyctaaaaacccttcagaggtttcccattgtcctccccacagttctaacatggcctaccaaggcccttcatgggctagcccctgattatttctcttgctttc

SEQ ID NO: 47518 - DNA, 201 bp, Homo sapiens
tcactcccttccaaggccctgagacattcctgctgcctctttggaacccctttgaaaaccactccccttagtgttccaagatggatgtgctaagaggcacrtctaattctgtccctctcctaaaaacccttcagaggtttcccattgtcctccccacagttctaacatggcctaccaaggcccttcatgggctagcccctg

SEQ ID NO: 47519 - DNA, 201 bp, Homo sapiens
tgagggcagagaggttgttgggggctgagtcatgcagggcttccctgcaggccattataaggacatcagcttttagtgagataagagtccattggagaatkttggcaagagtgacaagatctaacatattttttaaggattgctttggctcttataagggaaatagattatgggggacaagggcagaaacaggctgttaca

SEQ ID NO: 47520 - DNA, 201 bp, Homo sapiens
tgctctaatttgcttttttgtctaacattttcagtctaaaatctaaaataaacagcaagtaataagtcattagcaaaaaaacataaagcgagaaatgcccmttaaaatgatggtccaggctcagtggctcaagcctgtaatcccagcactttgagaggacgaagcaggcggatcatgaggtcaggagtttgagaccagcct

SEQ ID NO: 47521 - DNA, 201 bp, Homo sapiens
tggtggtcactatgtttctgtattgcctacttgatggaaaaagaattacaagctgaagtccaggcactgtggctcacactgtaatcccagcactttgggargctgaggcgagtggatcacttgagaccagaagttcaagaccagcctggccaacatggtgaaacctcgtctctactaaaagtacaaaaaaaaaaaaaaaat

SEQ ID NO: 47522 - DNA, 201 bp, Homo sapiens
cttatattttcaaaggttaagtaatttgcccaaagttaggcagtaagactcagaaattaaatccagatcatttttactctctagctcactttttttctcawctgccttgctgccttcccaaaagaaaaactgtgtaactgagttttgatctacactggaaatgttatgggtcacactggaccctttgtgatatttttgtat

SEQ ID NO: 47523 - DNA, 201 bp, Homo sapiens
ctgctggggaggctgaggcaggagaaccacttgaactcaggaggcggaggttgcagtgagccaagttcatgccactgcactccagcctgggcaacagagcragattccatctcaaaaataaaaaataatcagtcacagcatccaggatcataggtgtataatcctccagctacatcaggaagtccaccagaggcatgctgg

SEQ ID NO: 47524 - DNA, 201 bp, Homo sapiens
cagcggctgagatgagactgctgtttctctttgaggtggcagtcagtgactgcagagagaaataggaaggaacacaagtgttaacttggctgatttgggtrtatttatttattaatggaaatagcccttttttcctgataatatataatcgtcattaagaaaacattttttcttcatcataatgagagtgagagaactctg

SEQ ID NO: 47525 - DNA, 201 bp, Homo sapiens
gtctgtactaataacatcagcatgtatgagttactgaagggcaatgaaaccatagcccgcttgcaggctctggccaagcgtactggtgtggctgtggaaaraatggacctctctgcttctctgggtgaaaaagacaaggatttaaaactgcattgtgaagaggcagaactaagggactaccagctcaatgtacagctccga

SEQ ID NO: 47526 - DNA, 201 bp, Homo sapiens
agatctgagaacgggcagactgcctcctcaagtgggtccctgacccccgagtagcctaactgggaggcaccccccagtaggggtggactgacacctcacayggccaggtactcctctgagacaaaacttccagaagaacgatcaggcagcagcatctgcggttcaccaatatccgctgttctgcagccactgctgctgata

SEQ ID NO: 47527 - DNA, 201 bp, Homo sapiens
actgggaggcaccccccagtaggggtggactgacacctcacacggccaggtactcctctgagacaaaacttccagaagaacgatcaggcagcagcatctgyggttcaccaatatccgctgttctgcagccactgctgctgatacccaggcaaacagggtctggagtggacctccagcaaactccaacagacctgcagctga

SEQ ID NO: 47528 - DNA, 201 bp, Homo sapiens
ccgctgttctgcagccactgctgctgatacccaggcaaacagggtctggagtggacctccagcaaactccaacagacctgcagctgagggtcctgtctgtwagaaggaaaactagcaaacagaaaggacatccacaccaaaaacccatctgtacgtcaccatcatcaaagtccaaaggtagataaaaccacaaagatggga

SEQ ID NO: 47529 - DNA, 201 bp, Homo sapiens
tagcaaacagaaaggacatccacaccaaaaacccatctgtacgtcaccatcatcaaagtccaaaggtagataaaaccacaaagatgggaaaaaaacagcasaaaaactggaaactctaaaaatcagagtgcctctcctcctccaaaggaacgcagctcctcaccagcaacggaacaaagctggacaaagaatgactgacga

SEQ ID NO: 47530 - DNA, 201 bp, Homo sapiens
gatcaactggcagaaagggtatcagtgatggaagacgaaatgaatgaagtgaagcgagaagagaagtttagagcaaaaagaataaaaagaagtgaacaaarcctccaagaaatatgggactatgtgaaaagaccaaatctacatctgattggtgtacctgaaagtgacggggagaatggaaccaagttggaaaacactctg

SEQ ID NO: 47531 - DNA, 201 bp, Homo sapiens
cctataggtctgcttatatcaaatattatttctgctagtttttgctaacaggtgatatcttatctctttgtgtgcccagttacctttgcttgagtactggrtgtgaaaacatataatatttgagacatcatgtatggaagacagtttgaaggctaacatgatgtcatccttcagagatttgatgaatgtttcttgggcatt

SEQ ID NO: 47532 - DNA, 201 bp, Homo sapiens
tcctattttttttttctctggtggttctttctctggccgtagttaatcacacacatgcacagatcagtactcagccaaaaccttgagaggactctctgcakctcccttcttttctggttttctggtttgtaacttttagctgtcttggactctccaactctaaactttctcctcaccttaggattgatggaccactgagac

SEQ ID NO: 47533 - DNA, 201 bp, Homo sapiens
ttaagtggaaaattccagaaataacttttaatttttaaattgcgtgccattctgagtagcatgatgaaatctcactgtcctgctccatcctgctagggacrtgagttcagtttatctgcactatatacactacccatctggtagttcagttagtaaccttcttggttgtcagatcgactgttggtgataccacagcgcctg

SEQ ID NO: 47534 - DNA, 201 bp, Homo sapiens
cattaaatttatgggtggaagatatgaacaaaaatgtgttccaattgatggcaacatattgtgctgggttaacttaatctcaattaaattaaactttatcrtagttatgtatgtataggaaaaaacctggtatatatagggtttgttactgtctgaggtttcaggcatccactggaggtcttggaacataactcctaagga

SEQ ID NO: 47535 - DNA, 201 bp, Homo sapiens
catttttagaagatattacacagctgtatacatttttagacttaacatctaacaccttattaacaactgatattttttcctttgacttaagttaatggacygttataatagtatacagttctgctttatggtgctattttggaattgaagttacttctttaatgttaagtaaacataggatatataaggctagttatattg

SEQ ID NO: 47536 - DNA, 201 bp, Homo sapiens
aagtgatcagcctgccttgacttcccaaagtgctggaattataggtgtgagccactgcaccctaccgtgatgtgttttttgagggtttttttttttcaagrcgaggtctcactctgttgcccaggctggggtgtagtggcgagatcaaggctcaccgcaaccccgacctccctgggctcaggtgatcctcctgcctcagcc

SEQ ID NO: 47537 - DNA, 201 bp, Homo sapiens
tagtgagaccccatctctatttttttaatctgaaatgtttaaatatataccaacttatatacacatgacatagaactacacacacacacacacaccacacatattaacaacctggattctgattctgttctaaaatgcacagttcttttcagcctttcacttccttaatgtatgaaatgaggttagtttagaaattctttg

SEQ ID NO: 47538 - DNA, 201 bp, Homo sapiens
agtgctggaattataggtgtgagccactgcaccctaccgtgatgtgttttttgagggtttttttttttcaagacgaggtctcactctgttgcccaggctgsggtgtagtggcgagatcaaggctcaccgcaaccccgacctccctgggctcaggtgatcctcctgcctcagcctcctgagtagctgggactacaggtatgt

SEQ ID NO: 47539 - DNA, 201 bp, Homo sapiens
atagtgagaccccatctctatttttttaatctgaaatgtttaaatatataccaacttatatacacatgacatagaactacacacacacacacacaccacacatattaacaacctggattctgattctgttctaaaatgcacagttcttttcagcctttcacttccttaatgtatgaaatgaggttagtttagaaattcttt

SEQ ID NO: 47540 - DNA, 201 bp, Homo sapiens
gtttgtacattgggaatttgttgaatattggcacagtgtgacatattatctgaggcactttacataagtaattgcatttgagtcttagaacttttataagrtgtatgtatttttactcccatttatcttataaggaaactcaaggtcagagaggttaagtgatttgcccaaggttatacatttaattaatggttaaactag

SEQ ID NO: 47541 - DNA, 201 bp, Homo sapiens
ggagccaccataatggctgacttgttgttagtctttatgtcttattttactgcctatgtcttgaaaagctgtttcaggtattattttttattggttcatcktttaatctttctacttaagagtaggctgggcacagtggcttacgactgtaatcccagcactttggaaggctgaggcaggtgaatcacttgaggtcaggag

SEQ ID NO: 47542 - DNA, 201 bp, Homo sapiens
aaaactttacacttcaacctcatcctcctgcttttttgttgtttcacttttttaaaaaaactttttgttgtttcttttttttaacttctgttgtttctctyttttttttttttttttttgagacaaggtcttgctctgtcaccccagctggagtgcagtggtacagtcatcgctgactgtggcctctatctcctgcgatca

SEQ ID NO: 47543 - DNA, 201 bp, Homo sapiens
ttcttttcaaaaaaaccaactttttgttttgttgatcttttgtattgttttctttcaatttcatttatttgtgctctttttcttttttcttcttcttcttyttttttttttttttttttgttattgttgaacatggtctcactttgtcacccaggctggagtacattggcatgaatatgacttactgcagccttgacctcc

SEQ ID NO: 47544 - DNA, 201 bp, Homo sapiens
gttctaccaggttaagggaaggataggtacctgtccctaaaggataggggaggggatttgctccttatacagactttcacccaatcctatttttagctctmtttctccatttcacaggtacctgacaacttcagcttctgagccttcagggttttacagctgaattggcttgctgattattggcttcctcctctgtagata

SEQ ID NO: 47545 - DNA, 201 bp, Homo sapiens
tctttgcccagtccagtgtcctggagagtttccccagtgttttcttctggtagtttcatagtttgagatcttacagttaagtctttaatgtattttgatttgatttttgtacgtggtgagagataggggtctagttttattcttctgcacatgataatccaaatttcccagtatcatttattgaagagactgttttttctc

SEQ ID NO: 47546 - DNA, 201 bp, Homo sapiens
ttatagagaaagttagatttgagcaaagagtctttaaactctcttactcaggtattctgtgaatgaattgtaagaacaccttgtatccccttcacatgttwaagttgaagtttaaagtttttcatcgtaagtttacttgtaaataatttaattttttagcactggttaaatgttgacatcttatagttttctaaaaatgtc

SEQ ID NO: 47547 - DNA, 201 bp, Homo sapiens
ttagcacttttaatttccttcaagaactttaccattacattctccacttgcctaactggctgaagaggccaagttttggcctatcttggcttttttttttwaatttcatttttattctgtgtgggtacgtagtagataaatatatttatgggataaatgagatactttgatacaggcatgcaagtgcataataatcacatc

SEQ ID NO: 47548 - DNA, 201 bp, Homo sapiens
attagcacttttaatttccttcaagaactttaccattacattctccacttgcctaactggctgaagaggccaagttttggcctatcttggcttttttttttaaatttcatttttattctgtgtgggtacgtagtagataaatatatttatgggataaatgagatactttgatacaggcatgcaagtgcataataatcacat

SEQ ID NO: 47549 - DNA, 201 bp, Homo sapiens
ttttgagtagtgctgtaatgaacatgggagtgcaggtatctttttgatataccgatttcaagtcttttgggtaatagccagaagtgagattgctggaccayatagtaattctatttttagttttttttgaagaacttccatacagttttctataatagctgtactaatttacattcctataaacagtgtgcaagttttttt

SEQ ID NO: 47550 - DNA, 201 bp, Homo sapiens
cattcatctttttgtacatctccatcagagctctttggtaactaggtgcatcgttaataagcagtgttgctttgaaaggaatcttttttttttttttttttgtgagcagtgggactcatcaatagtcttaaaatattcatttaaccgtgctgtaaacatgtcctgtcatccaggctttattgagcacaggtagagtagatt

SEQ ID NO: 47551 - DNA, 201 bp, Homo sapiens
ctccctaatgttgaaaaaccacaccatatgaacaagaaattagggagatttcgtaatcattaggggctctctgtatttacctttgctgggaaggaaaaaakaaatcttggttaattctactttgtaatgtcactgtaatttttcaggagtacaataaaataaactatatagatttattattgtaagtccattttgactaaa

SEQ ID NO: 47552 - DNA, 201 bp, Homo sapiens
cctaaattcccatttgtctccgaagatctcatgtttctttttttttttttaatttattattattatactttaagttttagggtacatgtgcacaatgtgcmggttagttacatatgtatacatgtgccatgctggtgcgctgagatctcatgtttctgattctgtatttttattatttccagcatatattttatgctttgg

SEQ ID NO: 47553 - DNA, 201 bp, Homo sapiens
cccaggctggtctcgaacttttgggttcaagcaatctgcctgccttggcctctcaaagtgctaggattacaggtgtgagccacctgcctggtgcaatgtgwtgttttggtatatgtttacattatggaatgattaaatcaagctaattaacacatccatcagctcacgtatttctcagtattttgtggtaaaacatttaaa

SEQ ID NO: 47554 - DNA, 201 bp, Homo sapiens
acatttaaaatctgctcatttagcaattttgaaacatacagttcattattatttattatagtcaccattctatgtaataggtcactaacacttatttcttstaacggaagtttgtaccctttgatcaacatctcacctttctccattcactttactccccgctccccggccataaccaccattctaccccctacttttatg

SEQ ID NO: 47555 - DNA, 201 bp, Homo sapiens
gtggttgtgcttcatagtgtttaatcgtttgtttcagtggtctttattaaaatgcagtttggtgtttagaattttatcccaactttttaagccaaagtagsgcttttactaaggaaagccttttttctaatctcccagataagcctctcctttttttccccaataactttagtttttttaaaaaatggtattgtatttgtg

SEQ ID NO: 47556 - DNA, 201 bp, Homo sapiens
cctcccacctcaacctctcgagtaactgggactatagacgcatgccaccatgcctggctaatttttatactttttgtggaaatggggttttgccatgttasacagggtaatctccagttcctgaggtcaagtgatccacctgcttcattcagcctcccaaagtgctggaattacaggtgtaagccaccatgcctggcctgt

SEQ ID NO: 47557 - DNA, 201 bp, Homo sapiens
cacagctaatttttgtatttttagtagagacgggatttcaccatgttggccaggatggtctctatctcttgacctcgtgatctacctgccttggcctcccraagtgctgggattacaggcatgagccatcatgcccggcctctccttcattcttgaaggatagttttgttggatatggaatttttggtggacaattttttt

SEQ ID NO: 47558 - DNA, 201 bp, Homo sapiens
ggcgcccgccaccatgcctggctaattttttgtatttttagtagagatggggtttcaccatgttagccaggaaggtctcgatttcctgactttgtgatccmcttgccttggcctcccaaagtgagttatttcttcacgtattttttctgcctctttgtctttcccttctccttggtcttttatggtacgtagttggtacac

SEQ ID NO: 47559 - DNA, 201 bp, Homo sapiens
atttctttgaggtggggaggagtagtgagagagagaatggggtaataagtacattttagttaatcaattaactggaatttaagcctttaacttccagaccrtgagttatttcatgaaggttgccactgtagcactttgatgaactagtgcagttgtttgtagcttttggtatattcaaaatcacctgaaagcacccagata

SEQ ID NO: 47560 - DNA, 201 bp, Homo sapiens
tactttttttgagacagagtcttgctctgtctcccaggctggagtacagtggtgcgatctcagctcactgcaacctccgcctcctgggttcaagcaattcwcctgtctcagcctcctgagtagctgggattacaggtttgcgccaccatgcctggctaatttttgtatttttagtggagacagggtttcgccatgttgccc

SEQ ID NO: 47561 - DNA, 201 bp, Homo sapiens
cccgctaccacgcccggctaatttttttacttttagtagagatggggtttcgccatgttggccaggctggtctcgaactcctgacctcaggtggtctgccygcctcagcctcccaaagtgctgggattacaggtgtgagccactgtgcctggcctcattcaccattttttaactttctcaatctctaaggcttctattaaa

SEQ ID NO: 47562 - DNA, 201 bp, Homo sapiens
tccgtctccaatttttaaaaattttactacaaacatttaggttgttgggggggtggtgaggggaggcggtatgtgtgtacgggtgtggttgtgaaagagaraaggaagtcattttgtagagctgtttatttgctgtgcttgcatagcgtctaaatccattcaagtggtttgggaattcttgaaattagaagtggttgtgct

SEQ ID NO: 47563 - DNA, 201 bp, Homo sapiens
cccaaagtgctgggattacaggtgtgagccactgtgcctggcctcattcaccattttttaactttctcaatctctaaggcttctattaaaaaacttggggrgtctgcttgtcttagcctgtgtatgaatttttctctgttttatcagtggtacagttaaatcagctctgactgagggcccggatcataaactacaaaaata

SEQ ID NO: 47564 - DNA, 201 bp, Homo sapiens
aatattctgttattttctgcttatacttggtagtgttttctagttgtaatggcttatctgtcattttcttcctctctcctgtgtttgtctaaattctcccytcgttcattcagtaagcatatttgagcaccacctatattccaacgaaagaaggagctagaataaggcctttctgttgaaaccagtgatggaaacataaat

SEQ ID NO: 47565 - DNA, 201 bp, Homo sapiens
agggagcatgagatggagtgttttaaattctttgaaaataaagaatagcccttcagcaacagaaagagacacaaaatggaataaggatttcattacaggcyctgggagtacctggcatgtctgaaggccacatggagatgggtcagtgctgggaaggatagaggggacccatgggccaaagcttttattggcatccagggc

SEQ ID NO: 47566 - DNA, 201 bp, Homo sapiens
tccagggcatatcgaagcagatttcctgtgggggaattctaattaatgggtttaaagtaaactggtaagagttctagaaggtcactgtggcatgtctgcayaattcacgcagggtttggcagtcaatggggccaggtaagtaggttgtattcagctgtcccatagggaggtgatcaacaggaggtccaccttgaggaaatg

SEQ ID NO: 47567 - DNA, 201 bp, Homo sapiens
ataaagatttatggttttccctttagttcacaactatcaataatcttcttggcattcaaatatcaaaaacttctgggattctacttggcagtggataatawgtatatacaagaaaaaagaaaatagtcaattatgaaaaggcttcacttttatacagaaaacataaatactggaggaaggctaaaagtttcttttcctcct

SEQ ID NO: 47568 - DNA, 201 bp, Homo sapiens
gaattttctgatctgtagttattactttcctttggtataacttcatcttatatttgtggttttctccgtctgctgctatgtctgttttctcagccaggtcrcattatttgaagctatgcttcactaagttaaaaaatatgcttaagcccttctattttatggtgtctctgctttaataatttatacatgtaactctgcatt

SEQ ID NO: 47569 - DNA, 201 bp, Homo sapiens
agggagctgaacatatgagctcaggtctcttttccttttcttataaagctaccagtcccactctcatgataatatgttaatccatgaacagattaatccawtcatgagggcagagccctcctgaccaaattacctcttaaaggctcccccacccctgcccagtactatcacactggggattaaatttcaacaccagttttg

SEQ ID NO: 47570 - DNA, 201 bp, Homo sapiens
gatagatgttattacgtttggaatcagaaaccgaaagtgaatatagtatcagtaaagccatgaagaatgttaggacacttctgtcatgttttgggataggktcttaagctgttaaggctttaggaaatgaagaggtagctggtaatttaggtgtgaaaaactgcttggagaaatgatgcctcacttgctttttgaatggta

SEQ ID NO: 47571 - DNA, 201 bp, Homo sapiens
attaatggccatagtggtgcttacctgtaatctcatctacttgggaggctgaggcagaagaatcacttgaacctgggaggtagaggttgcagtgagccgasgtcgtgccactgcactctagcctgagctgtttcaaaaaaaaaaaaaaaaaaaccttttttatgtattattagtgacacaaataacacatgattatattct

SEQ ID NO: 47572 - DNA, 201 bp, Homo sapiens
gctgggattacaggcgtgagccaccgcgcccggccgcaagtttttttttccaacaacctcaccaacacttatgttttgtctttttggtaatagccatatamagcagtccccgcttatcctcaggggatatattccaagacaccaagtggaatatataggtttggtttttttgttttgttttgtttttgtttttgagacggg

SEQ ID NO: 47573 - DNA, 201 bp, Homo sapiens
gggaggcagaggcaggggcagaccatgaggtcaaaagattgagaccatcctggccagcatgatgaaaccccatccctactaaaatatgaaaattagctggscatggtggtgtgcacctgtagtcccagctgctatttggggagtctcttatgtgtagctgaatgtaattgcttaatcatataccaataaatcaatgatggt

SEQ ID NO: 47574 - DNA, 201 bp, Homo sapiens
aagatgtttactcatatataaatatttaatacaattaataatttttactgttttgtcatagacatacttaaatgaatctggccactccccctcttttttttaaaccttcaatgcatgtcctgaataatacagtcatcacagtgctattgctttgatttgtgatagggcactgacagtttttgtttttgagacagggtctct

SEQ ID NO: 47575 - DNA, 201 bp, Homo sapiens
acgcagaatgttaagatgtttactcatatataaatatttaatacaattaataatttttactgttttgtcatagacatacttaaatgaatctggccactccmcctcttttttttaaaccttcaatgcatgtcctgaataatacagtcatcacagtgctattgctttgatttgtgatagggcactgacagtttttgtttttga

SEQ ID NO: 47576 - DNA, 201 bp, Homo sapiens
acttcagaaagcaaaactggggaaagtggaggactactgtattttatttcatttctctcacagaattttattctaatgtaacacttttctgcccaaaagtmttttagtaatctcattatacttctgctacaaatatataaattaattaaaaattagctttatttctgatatacataatattctaaatattaaacgtttttt

SEQ ID NO: 47577 - DNA, 201 bp, Homo sapiens
acgtacatgcatacatacatatatacacatacatgtatgtatatacatatatacgcatatatacatatatacgtatatatgcgtatatatgtatatacgcrtatgtatgtatatacatgtatgtgtatatatacacatatatatgaagtttttatctgactttattagccactagagcttgtttgcagttaatattttgca

SEQ ID NO: 47578 - DNA, 201 bp, Homo sapiens
ttgcaaggcaagtctcctggcaaacaaatgccttaataattgtcccagaaagtttttttccttcacttttgaaggataactttgtagggtacagaattctrggtttgcaattttttttctcttggcactttaaatatttcactccactctttacttgcatttctgaggataagttcatatctttgctcctataggtagcat

SEQ ID NO: 47579 - DNA, 201 bp, Homo sapiens
catacatacatatacgcatacatacacatatacgtatacgcatacatatatacgtacatgcatacatacatatatacacatacatgtatgtatatacatayatacgcatatatacatatatacgtatatatgcgtatatatgtatatacgcgtatgtatgtatatacatgtatgtgtatatatacacatatatatgaagtt

SEQ ID NO: 47580 - DNA, 201 bp, Homo sapiens
gggaggtggaggttacagtgagccaagatcatgccactgcactccagcctgggcgacagagcaagactcttgcctaaaaaaaaaaatatatatatatatawgtgtgtgtgtgtgtgtgtgtgtgtgtacatatatacgtatacgtatacatacatacatacatacgtatacatacatacatatgtatacatacatacgtat

SEQ ID NO: 47581 - DNA, 201 bp, Homo sapiens
ttacggatatgttttcataaatgattaatatggatggtcagtgtctcagtccattttccgttgcttataacagaatattggaaactgagtgatttataaaraaagggaatttatttcttacagttacagaggatgaaaagtccaaggtcgaggggcttcatctggtaagagtcctcttactggttggaactctgcagagtc

SEQ ID NO: 47582 - DNA, 201 bp, Homo sapiens
tagctgcctaccccctggagttctaacactcagacttgtccacactcagcctctatcagtttgtcaattacagtttatgttttcctactgcagcactgccagaggtttcagcttctgggtttctgctctgctaagttgtgattcttctttatgtgtttgtttctgcagttttggggcagtggtttgctctgtggcttcatg

SEQ ID NO: 47583 - DNA, 201 bp, Homo sapiens
tccatctggagttgttcgtaccttccatctggagttgttcgtccctccccatgggttcatggtcttgctgccttcaggagtgaagctgcagacctttgcaktgagtgttacagctcataaaggcagcgcagacccaaagaatgagcagcagcaagatttattgcgaagagtgaaaaaacaaagcttccacagcgtggaagg

SEQ ID NO: 47584 - DNA, 201 bp, Homo sapiens
aatctcatgtgcaggattttacatataaagagccttcttttacaaatttagaaacttccaaatttttgtggggacgcatttgattaagagcatggactcgrctgggtgtggtggctcatgtctgtaatccgagcactttgggaggccgaggtgggcggatcacctgaggtcaggagttcaagaccagcctgtcccacatgg

SEQ ID NO: 47585 - DNA, 201 bp, Homo sapiens
agaccttcatggtgagtgttatagctcttaaaggtggtgcgtctggagttgttcgttccttccatctggagttgttcgtaccttccatctggagttgttcrtccctccccatgggttcatggtcttgctgccttcaggagtgaagctgcagacctttgcagtgagtgttacagctcataaaggcagcgcagacccaaagaa

SEQ ID NO: 47586 - DNA, 201 bp, Homo sapiens
agaggctcgcgggctggcgcgcgccggcggccgggagtcgcgccgccgccgcccctacggccgccttcgcctggaggggcctggcgacgaggacgcggacsgcgcgggaagcccgtccgattgggcctctccgcttgaggacccgctgcggagctgctgcctggtggccgcggacgcccaggagcccgagggcgcgggcag

SEQ ID NO: 47587 - DNA, 201 bp, Homo sapiens
ggtgtgtccggaatttgctccttctgatgtttggatgtgtctgagtttcttccttttggtgggttcgcggtctcgctggcttcaggggtgaagctgtagascttcatggtgagtgttatagctcttaaaggtggtgcgtctggagttgttcgttccttccatctggagttgttcgtaccttccatctggagttgttcgtcc

SEQ ID NO: 47588 - DNA, 201 bp, Homo sapiens
tagcccctcaccgcatgatgctctgcaccacctcaggattctatagagcgtccccatcagcaagagggctctcattagatgtagccccttgaccttgttcytctcatcctctgtaactgtaagaaataaattcttttgaattttaggtattctgttataagcaacagaaaatagactaagaaaactttttttctgttagat

SEQ ID NO: 47589 - DNA, 201 bp, Homo sapiens
actgttgctatggtttgattgtttatcccctctaaaatttatggtgaaaggcaatccccactgtggcaatattgagagagggggcctttaagaggtgattrattctttaagaggattaatctattttataggattaatccattaatggattaatggattattggattatcataggaatgggcctagtgactttataagaag

SEQ ID NO: 47590 - DNA, 201 bp, Homo sapiens
agcatacataattgaacacattattgatgttattattttgagtaaactgttgctatggtttgattgtttatcccctctaaaatttatggtgaaaggcaatycccactgtggcaatattgagagagggggcctttaagaggtgattaattctttaagaggattaatctattttataggattaatccattaatggattaatgg

SEQ ID NO: 47591 - DNA, 201 bp, Homo sapiens
caggtgcatgccaccatgcctggctaatttttttatatttttagtagagacagggtctcactgtgtttcccaggctggtcttgaactcctgggcttaagtkatcctcctgcctaggcctcccaaagtgttgggattacaggcatgtgccaccatgcctggcccgaaaagtttaaaaaattgttacactcttgcatgttttg

SEQ ID NO: 47592 - DNA, 201 bp, Homo sapiens
aatacactttggcagtctctgtttcttcatttgtttgtttgttttgttttatttttgagacagaatcttgctctgttgcctaggctggaatgcagtggtgyaatcatagctcactgcatcctcaaactcttggcctcaaatggtcctcctgctatggcctccaaaagtgctgggattacaggcatgagccaccatgcttgg

SEQ ID NO: 47593 - DNA, 201 bp, Homo sapiens
tttcttcttgtcagtccccatattttatttatttaggcagctattcaaagattcttgccaccctccctttgaatccagtctgatcttttcacatatttccrtcctggtacacttctttggtaaatcgctttcgctacaaaacgcaaggcatcaaagtgtggtagaataccattctgctgccaattcaatgtgtgacctgat

SEQ ID NO: 47594 - DNA, 201 bp, Homo sapiens
tgcatacctaggataaatcccacttggtcatggtatagaattctttttatacattgttggattagatttgctaatattttcttgaggaatttttgcatttmtgtttataagagatattggtctgtacgtttcttttttagtaatgcctttgtctagttttggtattagagtaatgctggcttcagataatgagtgaggaag

SEQ ID NO: 47595 - DNA, 201 bp, Homo sapiens
aacctggggaataagagctagacttctctcaaaaaaaaaaaaaaaaaggcagttttccttgagttagattttgacacgcctttttcttcttcttcttcttyttttttcttaagtccccaggcaaataggaaaatattcccaacttgtaaaactttcctttacagagttctccctactttgtttttctaccttttcggggat

SEQ ID NO: 47596 - DNA, 201 bp, Homo sapiens
ctcctccttgggttctctggatcaattctttttttttactaggattgtctctctgtccctctctttctttttaatttaatttaatttgtagaggcagagtyttgctctgacatccaggctggagtgcagtggcacaatcatagcttactgcagcctcgaactcctggcctcagacaatcctgccacttcagcctcctgagt

SEQ ID NO: 47597 - DNA, 201 bp, Homo sapiens
aagaattgtggtcccaatgctcctcttttaggatttgatgaatatgtttataattgtcttttcattgtttaaaaaaagcgttttagaaacttagttatgasaacatgtgaaattttatttcagacttgctgccagggatgaaaatgaaccaggccaattcaaagattcctttcttggtggagacatttataggaaaacaag

SEQ ID NO: 47598 - DNA, 201 bp, Homo sapiens
atgttaagtaaacataggatatataaggctagttatattgttctagaaggtatttaaacattagttgagtgtattttactatacagaattcgaaatatttytgacatatccaattaagtatttatctatttattacttatttttatttttttgagacagggtcttgctctgtcacccaggctagagtgcagtgatgcgaac

SEQ ID NO: 47599 - DNA, 201 bp, Homo sapiens
tctctactaaatatacaaaaacttagtcttggccaggcacggtggctcatgcctgtaatcttagcactttggtgggtggatcacgaggtcaggagttcgaraccagcctgactaacatggtgaaaccctgtctctactaaaagtacaaaaattagccaggtatagtggcatgcacctgtaatcccagctacttgggaggct

SEQ ID NO: 47600 - DNA, 201 bp, Homo sapiens
cagtttgctagtattttgttgaggatttttgcatccatgtttctcagggatattggcctgtagttttccttttttttttttttttttagtgtgtctttgtmttgtttgagtatcaaggtaatactggcctcatacaatgagttcataagaattccctcctctattttttgcagtaatttgagtaggattgttgtcagttca

SEQ ID NO: 47601 - DNA, 201 bp, Homo sapiens
ggcagaagaatcacttgaacctgggaggtagaggttgcagtgagccgaggtcgtgccactgcactctagcctgagctgtttcaaaaaaaaaaaaaaaaaaaccttttttatgtattattagtgacacaaataacacatgattatattctctttataaaatataaaacatagaatgatatatctcagttcactttcctttca

SEQ ID NO: 47602 - DNA, 201 bp, Homo sapiens
ttgtctctgtggctagctggtgacctgacaaagattttcttagatatctggctccaaaaaaggagatcaaaaaggttttaccttttttattgttctaataatacttacagtgaaagccactgctgtggagagtagtgaaactgatgcatgtgcctgcatcactcccttagggccagaccaaccaaaatgtacaaccctaaa

SEQ ID NO: 47603 - DNA, 201 bp, Homo sapiens
tattaagactaatgatattaatggtgttcctaataggcatacagctctcctacaacctgtaattcaggcaccaacgttccttccattttttacttccaccrtctttaacaaggcattttcagggttttcacagaaggggagagaacaaggagactcacaaggggagattttgggaagctaagcctagaggtattacgcatc

SEQ ID NO: 47604 - DNA, 201 bp, Homo sapiens
acagataattcttgttaattaacttagggagcattgacatctttatgatgttgaatctttcagttcttcagcacagtatatctagccatttatttgggtcrttttttatttccttcatcaatgttttgacattttcagcatacacatcctgtaatattttgttaaatttataattaaatatttagttttttgtgttattat

SEQ ID NO: 47605 - DNA, 201 bp, Homo sapiens
gggaagctaagcctagaggtattacgcatctcctcctctcacattccactggccaggactcagtcatgtggccacaactaactgcaagtgaagatgcaaartgtggtttagctgtttgcccagaaagaaaaagaaatggtttggtaaacagccagtttctaccacacatactttttttctgtttaatcagaacaaccacat

SEQ ID NO: 47606 - DNA, 201 bp, Homo sapiens
tgtcgcccaggctggagtgcagtggcgcagtcttggctcactgcaagctccacctcccgggttcacgccattctcctgcctcacgcctcccgagtagctggactacaggcgcccgccaccacggctgcctaattatttttttttgagtttttagtagaggtggggtttcaccgtgttagccaggatggtcttgatctcctg

SEQ ID NO: 47607 - DNA, 201 bp, Homo sapiens
agctcaggagttccagaccagcctggccaacatggtgaaaccctgtttctactaaaaatacgccggatgtggtggcctgtgcctgtagtcccagccactcrggaggctgaggcacgagaattgcttgaacccaggaggccaaggttgcagtaagtcaggaggctgaggcacgagaatcgcttgaacccaggaggccaaggt

SEQ ID NO: 47608 - DNA, 201 bp, Homo sapiens
cttatcagccatttttgaggattgaaagagattaaaaaaaattgagacttccataattacctctatgtatatgtgtctcttcttcttttttttttttttttgctacggagtctcgctctgtcgcccaggctggagtgcagtggcgcagtcttggctcactgcaagctccacctcccgggttcacgccattctcctgcctca

SEQ ID NO: 47609 - DNA, 201 bp, Homo sapiens
tttctgaaatttgaatatgatatggctagaagtagttttttttttttttaatgtttatcctatttgatgttctctgagcttcctggatctttgatttggtrttgacattaatttgggggaaattctcagtccatattgctttagatatttcttcttccttctctctgtctctcttttcctcccctctctcttgtccgttat

SEQ ID NO: 47610 - DNA, 201 bp, Homo sapiens
taggagaattgctagaaccctggggggaggttgcagtgagctgagatcgtggcactgcactccagcctgggtgacagattccgtctcaaaaaaaaaaaaaagttgaaatgctagatgggtaccactcagcagtaaggaggagtgaaagcttttttgaagtcttttgtgtttccaagcttgccttaattccccaaagatcca

SEQ ID NO: 47611 - DNA, 201 bp, Homo sapiens
agcattttttagcttctgcatatgaatgagaacatgcagtatttcacttaacataatgtcctctggttctatccatgttgccacaaatgacaggatttcaytcttttttgtggcttagtagcattccattgtgtgtatgtaccacattttctttatccattcatctgttgttggatactcaggttgattccatatcttggc

SEQ ID NO: 47612 - DNA, 201 bp, Homo sapiens
cctatttatcctccatgctttccttcttcttcccttcccacttcgttcttctctttcccttaattaggcaaaaatctatacgagaaaccttaaaaaaaaaacagttttatgtttacttaagtaaagaggggggagcattttacacaatgtatctattactacatagtattatgttaagacacatcattttggtagatatat

SEQ ID NO: 47613 - DNA, 201 bp, Homo sapiens
accttcacggttcaagtgattctcgtgcctcagccactcgagtagctgggactacaggtgtgcaccagacctggctaatttttgtatttttagtagagacrgggtctcaccatgttggccaggctggtctggaactcctgacctcaagtgatccaccgtctcagcttcccaaaatgctgggattacaggcatgagccatgg

SEQ ID NO: 47614 - DNA, 201 bp, Homo sapiens
gtagtcacagctactcgggaggctgaggcaggagaatcgcttgaaccccggaggtggaggttgcggtgaggtgagattttgccattgcactccagcctgarcaacaagagcaaaactccattaaaaaaaaaattatttttcaatgtattctcttcccgtcccccaagagcattagagttactcagggaaggacccaagaaa

SEQ ID NO: 47615 - DNA, 201 bp, Homo sapiens
aagctattttcacaaagtatgtattccatattgtgtatggtcacaagtttttgttctgttgtctctgtggctagctggtgacctgacaaagattttcttaratatctggctccaaaaaaggagatcaaaaaggttttaccttttttattgttctaataatacttacagtgaaagccactgctgtggagagtagtgaaactg

SEQ ID NO: 47616 - DNA, 201 bp, Homo sapiens
agcaaaactccattaaaaaaaaaattatttttcaatgtattctcttcccgtcccccaagagcattagagttactcagggaaggacccaagaaaatgggagragggttttttaatattatgggactgagatccaagtttaaatactaattccattaagaaggaaaaaaaaatcctccattgtcagtcttgagaagtgtgagc

SEQ ID NO: 47617 - DNA, 201 bp, Homo sapiens
attaggggctctctgtatttacctttgctgggaaggaaaaaagaaatcttggttaattctactttgtaatgtcactgtaatttttcaggagtacaataaamtaaactatatagatttattattgtaagtccattttgactaaatttttctccctttgaaggtccaagggatgtccttcattgcagcagtactcattctcaa

SEQ ID NO: 47618 - DNA, 201 bp, Homo sapiens
ttgtagagggaatatgacttgatgagaactgtctggcctgtgtggggcttgcagaggaaattggcacactgttgctggcaggaagcctttggtggagtcawtttttttgttgagcaggctgcaggaacgccatctccaggttgaggctgcaggttcagcaaggctgcaggtttgctgaggggctgcagtctgggcatcgag

SEQ ID NO: 47619 - DNA, 201 bp, Homo sapiens
gtgccaccacacccagctgattcaagtctttatacatggaattcttctatctttagattgataaaaataaaatgagataaaaatttttaccattaagattraaattattaacacagtttagtttagcttgatggttttttttctgctgatggtgtattacataaaatgaaacagtgtgtattcatcatacccttataccaa

SEQ ID NO: 47620 - DNA, 201 bp, Homo sapiens
attgggcctctccgcttgaggacccgctgcggagctgctgcctggtggccgcggacgcccaggagcccgagggcgcgggcagcgactcgggggacagcccsgccagcagctgcagcagtagcgaggactcagagcagcggggagtcggcgccgggggtcccgaggagggcgcgccccctgccacctcggccgagaggacta

SEQ ID NO: 47621 - DNA, 201 bp, Homo sapiens
cttgtagctcctcaggttattgttcttttcccaaaagttcttctttgcccagctttgtagggttttattgtacacgtgtagatcagtattcagctgaagaytcaagaatactgctatgctggtttctggagttttttccttttttttttttttttttttgagatggagtctcattctgtcactcacgctggagtgcagtgg

SEQ ID NO: 47622 - DNA, 201 bp, Homo sapiens
ctgggaggcagaggttgcagtgagatgatatgccactgcattccagcctaggtgacttgagtgagaccctgcttcaaaaaaaagaaaccaaaaaaaaaaamaaaacaaaaaaaaaacaggagaagaagtatatgatagctgccaataacttacaagcaagaagcaaacatctatacagcttagccttttactcaaggtctt

SEQ ID NO: 47623 - DNA, 201 bp, Homo sapiens
tgacaaattatatagcttgtatccatcaagtaagtttatttggctttttgttgttgttgttatttagtagtaaatatttctttttttttttttttttttttgagagattctcactctgttgcccaggctggagtgcagtggcacagtcctggctcagtgcaaccactgcctcctgagttcaagcgattcttgtgcctcagc

SEQ ID NO: 47624 - DNA, 201 bp, Homo sapiens
aacgtatcaaacattgtttaaattaatagaccatcctttgaggcttcaaatttttttcttagaagtattcctagtcctcagcatattcattattgaaaackttcacctatttagtgatcttatgaagtagagaattaagtcactgtacatggtctctgaggtgaaacctccagagtatcttaaagtagaaattactctagt

SEQ ID NO: 47625 - DNA, 201 bp, Homo sapiens
gtctctgaggtgaaacctccagagtatcttaaagtagaaattactctagtgtcatatgtttatttctgttatacacctgaggaaataagagtgtttatttycttttcctttctttttttttttggaggcagggtcttgctctgttgcccaggctgcagtatagtggcagtatcatagctcactgcatccttaactcctggg

SEQ ID NO: 47626 - DNA, 201 bp, Homo sapiens
ttactcagggaaggacccaagaaaatgggaggagggttttttaatattatgggactgagatccaagtttaaatactaattccattaagaaggaaaaaaaartcctccattgtcagtcttgagaagtgtgagcatgggggatagcaggatcacaattgatgtgggggacaggagagaactaataaagagtaagtactgtata

SEQ ID NO: 47627 - DNA, 201 bp, Homo sapiens
ctaactaccttaaatcttgcaaatcgattctgtccaaagctgctttctacctatgtcatagcacctgctcaggaggctgaggcaggagaatcgcttgaacrcggaaggtggaggttgcagtgagcggagattgtgcactgcactccagtctggtgacaaagcgagactctgtctcaaaaaaaaaaagtggaaatgtgattt

SEQ ID NO: 47628 - DNA, 201 bp, Homo sapiens
aaaggatttaatttttacaaaatttaatccctgttgtctatcctaaaactatttggggagaatatatttttcttgggtttttggtttgtttagagacaggrtcttgctatgttgcccaggctgttctcaaactcaagtgatcctcctgcctcagtctccccttccaggattgtaggcatgcactgctggccctagtagaga

SEQ ID NO: 47629 - DNA, 201 bp, Homo sapiens
cttctgggagaagggagaagtatgatcctcaagagagaagcctaaattattaaagaaaattaaaagaataaagataagttttcacaaattaaacggtagartttgaggggacgttttttcattttatcagaaacagagacttggaaagggttatgtttgaaaatactctgaatatctatatttgattacaggaatactgtt

SEQ ID NO: 47630 - DNA, 201 bp, Homo sapiens
gcttctgggagaagggagaagtatgatcctcaagagagaagcctaaattattaaagaaaattaaaagaataaagataagttttcacaaattaaacggtagratttgaggggacgttttttcattttatcagaaacagagacttggaaagggttatgtttgaaaatactctgaatatctatatttgattacaggaatactgt

SEQ ID NO: 47631 - DNA, 201 bp, Homo sapiens
tagtcccagctacttgggaggctgaggcaggagagtcacttgaacccgggaggcggaggttgcagtgagccgacgttgtgccactgcactccagcctggcraaagagcgagaatacgtctcaaaaaacagcaacaacagcaatagaacttcatgagtggtcaggaaaagaacagctctttttcatttgagaagaaggggta

SEQ ID NO: 47632 - DNA, 201 bp, Homo sapiens
gggaggcggaggttgcagtgagtcaagattgtgccattgcactccagcctgggtgacaaagtgagaccctgtctcccaaaaaaaaaaaaaaaaaaaaaaaaggaaagaaaagaaagaagacctctatcagtaaggcattgcctgtaatttatttaccataagaaataagacataaggtgacttgctaacatgagtacactt

SEQ ID NO: 47633 - DNA, 201 bp, Homo sapiens
agtatttttggtataaaaagtaactttctccttttttctcctcctttaattctaggcgtagtacaagaagagttcgagaattgtggtggcagggattgccycctagtgtccgtgggaaagtttggagtctagctgtaggaaatgaactaaatatcactcctggtttgtattctacgttcagttattcccacatgtacaaat

SEQ ID NO: 47634 - DNA, 201 bp, Homo sapiens
ccaaaacaatctaatctaatataaacttatcattatattatagtttattaatgaatgtttgctgagaagactcagaaaaagatgagattcttaatgagcamgatttcctgttagtgtttaagcgtttaatttctttatttctagactatatactttcataattttattgattttttaatctttagatgttgaaatattttg

SEQ ID NO: 47635 - DNA, 201 bp, Homo sapiens
cttccataattacctctatgtatatgtgtctcttcttcttttttttttttttttgctacggagtctcgctctgtcgcccaggctggagtgcagtggcgcartcttggctcactgcaagctccacctcccgggttcacgccattctcctgcctcacgcctcccgagtagctggactacaggcgcccgccaccacggctgcct

SEQ ID NO: 47636 - DNA, 201 bp, Homo sapiens
agtggtttttggataaaggttttttgtttcctatgtaaaaggcgtggaagaaaatgttggagatacctaaaagaatcaagaggtggaaaactgctgatttwacattttatggctgaagtaaatgaaataagtaacttattgacagtattaataaactattattttgtaggtagagtcatttttcaaaggaaaaagtttaag

SEQ ID NO: 47637 - DNA, 201 bp, Homo sapiens
gtccagggaacatgtttcccttgggaggtctgaacagagtgacctggcttgatgtatttcctgagctctagtaccatatcatagaattagttaaatgtagycaacagcaatgtcagaacaattgacattgtctttccaagagtgaatgcattggctttcggaactgctactagagacatacatgaggcagcgaacacatct

SEQ ID NO: 47638 - DNA, 201 bp, Homo sapiens
tctgttggtcatttgtgtgtcttcttttgagcaatgtctgttcagatcatttgcccattttttagctggattgattgtgtgtgtgtgtgtgtgtgtgtgtgacggagtcattctctgcactctgttgcccaggctggagtgcagtggcgtgatcttggctcattgcaacctccaccttcacggttcaagtgattctcgtgc

SEQ ID NO: 47639 - DNA, 201 bp, Homo sapiens
atctgttggtcatttgtgtgtcttcttttgagcaatgtctgttcagatcatttgcccattttttagctggattgattgtgtgtgtgtgtgtgtgtgtgtgtgacggagtcattctctgcactctgttgcccaggctggagtgcagtggcgtgatcttggctcattgcaacctccaccttcacggttcaagtgattctcgtg

SEQ ID NO: 47640 - DNA, 201 bp, Homo sapiens
tatctgttggtcatttgtgtgtcttcttttgagcaatgtctgttcagatcatttgcccattttttagctggattgattgtgtgtgtgtgtgtgtgtgtgtktgacggagtcattctctgcactctgttgcccaggctggagtgcagtggcgtgatcttggctcattgcaacctccaccttcacggttcaagtgattctcgt

SEQ ID NO: 47641 - DNA, 201 bp, Homo sapiens
tgaacccaggaggccaaggttgcagtgagccgggatcacgccactgcactccagcctgggctacagagcaagactccgtctcaaaaaaaaaaaaaaaaaaagctaaacaaaaaaaccgtaattgcaacaatgtaacaatgtatattacattttctaaaagttaatttcttaagctatgtggtttaatggaattaagatttc

SEQ ID NO: 47642 - DNA, 201 bp, Homo sapiens
gaacccaggaggcgggaggttgcagtgagccaagattgcgatactgcactccagcctggtgacagatcgagactccagctcaaaaaaaaaaaaaaaaaaaagaacttagctgggtgtagtcgctgtaggctgcagcaggacaattgttggaacctgagaggcagatgttgcagtgaaccgagatcacaccccagcactgca

SEQ ID NO: 47643 - DNA, 201 bp, Homo sapiens
tatgtttacttaagtaaagaggggggagcattttacacaatgtatctattactacatagtattatgttaagacacatcattttggtagatatataggaaawacaggaattcatttagaatatgactgctttcatttggagggccttagtggtcatctcccactttccttcccttccacatgaggtgagttctatttcagtc

SEQ ID NO: 47644 - DNA, 201 bp, Homo sapiens
ttagcttttggtgtagtgaaaatacaatgcctgagagataagtaacttggtttttgtcctaggtaacaacttctgccattaaataattctgttaccttggrcaaatcactaaatttctggacttcggtttccttatctatgaaattgggagattcagagtcccttcagttctaatatcatggtattataatacacaattct

SEQ ID NO: 47645 - DNA, 201 bp, Homo sapiens
tataaaacatagaatgatatatctcagttcactttcctttcacatttttaggccttttaaaattcatttttttgtgtggaaaaaacacgtaattatttttrcatgtatatattttgcatatgtggaattatatgtttttttctatttcaagaatgaaatgtcaccatatttaattatatagatgtgtatatatatacacac

SEQ ID NO: 47646 - DNA, 201 bp, Homo sapiens
attttgaacagggagttttatactaccaaaagtggtttttgtcatatgattaaatacgtgtttgtaatttaagagatagggatggacttttgtttcatgtytctgttgagtttattatatacaaatcccagagacatttttgtgggataggaatgaataagtggcagtgcaaaaggatttttttaaaaattattttggcga

SEQ ID NO: 47647 - DNA, 201 bp, Homo sapiens
caacttgaatttgattattttttcatgattagattcaggttagacagttttgtcagcaatactacataaacaatgtatcttttttagtgcatcacaccatragtcaataaataatgcaaaatatttagaagaattggactctgaagaaattatagaaataactttttcttattttcttttcatatatgcacaagagtgata

SEQ ID NO: 47648 - DNA, 201 bp, Homo sapiens
gtctctagaaatgtcatccaggagctaggacctgagatgggggcctcaccactgcctggtgccctatcctactgtggctgagctggtatctaagatgcaakacaaagtcctctttacccttctttctcctctcctcaagtggaagaagaaaggagttactttagttgctgcaagcttcactacctgggattgagaggggag

SEQ ID NO: 47649 - DNA, 201 bp, Homo sapiens
tagtactcttatctatcaggaggcctttccactctggctggtcttgtgtgaactttaagaatgtcctattttttttttctctggtggttctttctctggcygtagttaatcacacacatgcacagatcagtactcagccaaaaccttgagaggactctctgcagctcccttcttttctggttttctggtttgtaactttta

SEQ ID NO: 47650 - DNA, 201 bp, Homo sapiens
aatttaggtgaaagaagcattactcaaacacaagctctacaataccacaacagttgatcttataaccgagatggctactaggcaggtgggtagcatatacvtggttacactggatagagggatgattcccctccttggcaggaaggagcaggaccactccagattttaccaccctatttagaacagcatgcaatttaaaac

SEQ ID NO: 47651 - DNA, 201 bp, Homo sapiens
gatttactctctgagtgactgtgaaatgtacagaactcagttattagttgtatttgccatgttgtgtaataaatctcaaaaaaaaaacaaaaaaaaaaaaacaggccaggcatggtggctcatgcctgtaatcccaggcatgtaatcccaggcatgtaatcccagcatttgggaggccaaggtgggaagatcgcttgagcc

SEQ ID NO: 47652 - DNA, 201 bp, Homo sapiens
ttgaatctgggaggcggaggttgcagtgagccaagatcgtgccactgcactccagcctgggcaacaagagcaaaactctgtctcaaaaaaaaaaaaaaaaagtgtccccaggctgggcacagtgtctcatacctgtaaatcccagcactttgggaggttgaggcaggaagatcgcttgagcccaggactcccagacagcag

SEQ ID NO: 47653 - DNA, 201 bp, Homo sapiens
tggccaacatggagaaaccgtgtctctactaaaaatacaaaaattagctgagtgtggtggcacgcacctgtaatcccagctacttgggagactaaggcacragaatcgcttgaacccaggaggtggagtttgcagtgagccaagattgcaccattgcactccagcctgggtgatagagcaagactcttaaaaaaaaaaaaa

SEQ ID NO: 47654 - DNA, 201 bp, Homo sapiens
acattctacacttatttaatttacaatttctaaaatactattaactatctactgtataatttttcattcttgtagtccttgtgggttaatatttattttttctttactgtatttttagttggattttgcaggagaacaaagaaagatgtgatgttcaattgccatttttaactagaagttatagaactttcatcttctcac

SEQ ID NO: 47655 - DNA, 201 bp, Homo sapiens
tttgaagtattctttgaagaaaatctttccaaattatttcttcacttcaaatcttacagtcttacaccagatatatacttgatagactggtaagtcataayatacgtaatatataataatgaaaaggaaataaagtataactttttgtgtgttttaggaactagagtaaatctcatgtgcaggattttacatataaagagc

SEQ ID NO: 47656 - DNA, 201 bp, Homo sapiens
gaattgcttgaacccgggaggcagaggttgcggtgagctgagatcaagccactgcactccagcctgggctacagagcgagactctgtctcaaaaaaagaamaaaaaaacctttaaagaacagaagaagaaataagactttcaaagagttatattattttcttaagtttcttaaactttggtggataggagcaaaatgtaga

SEQ ID NO: 47657 - DNA, 201 bp, Homo sapiens
ctgtgcactccagcctgggcaaaagagcgagactctatctcaaatgaatgaatgaataaatgaatgaatgaatgaatgaatgaataaataaataaataaawaaaataattttaaagtttataacttgattagctgcataaagaaaaaactttagccgggcatggtggctcatgcgtgtaatcccagcactttgggaggcca

SEQ ID NO: 47658 - DNA, 201 bp, Homo sapiens
actctgaacaggcctgatgttagttttctcatgcgtaacatgtgagaggcaggtcagcttaatcagggctttgaagcttctctttcatcattttttttttkttgttggtaaagcagtggaacattctcccaagaaatcttatatagaatatgaatacataaaacaaataaaagaaagtagagattgtcggccagatgcggt

SEQ ID NO: 47659 - DNA, 201 bp, Homo sapiens
agcctcgaattcctgggctcaagcaatcctcctgcctcagcttccctggtagctgggattgcaggtgcatgccaccacacccagctcttttttttttttttgagacaaaatctcactctgtcacccaggctggagtgcagtggcgcaatctcggctcactgtgacctccgctgcctgggttcaagtgattctcctacctca

SEQ ID NO: 47660 - DNA, 201 bp, Homo sapiens
gagaaggaatataaaataaagctaaagataatacattgtttccacgttattcttgttaaggtggtaagaagatgataaagaagatttgagggtttggaagraagtatggtaaagataatacattgtttccacgttattcttgttaaggtggtaagaagatgataaagaaaatttgagagtttggaaggaagtatagtacga

SEQ ID NO: 47661 - DNA, 201 bp, Homo sapiens
gcagagtacatttataatattttttattaaatatgctaaaactagtcatttaggaaatgctacagtttattaacatgttatatgaaaattaacttagagamaattatttgtacagtttcaaatttcatttttctctcctaagggtggtccatatcatgatgtcttgcatagtattttaggggcatacacatgctacaggcc

SEQ ID NO: 47662 - DNA, 201 bp, Homo sapiens
gctatttgtaattcttttccgtgcctttaagaagaaatcctgcacactgcacatggttttctcccctccaacatttgctgcttcagcctttcttatgcttyttatttctgtggccaaaataagaaagagagggaaacccatgtgactgtctgggttttcagcatgctctttcctgcaattaagagaagtttaccttaggaa

SEQ ID NO: 47663 - DNA, 201 bp, Homo sapiens
ttttgaagacttccttttccttcccttccccctgaaagcagccaccgctggagggaaacattttaagacagctgttcaccggaataacacaagagcaacartaataatgtactcatttactaaaccaagttgaataaatacatttttccaggttgtgagtgaaaatagcttaaggtctgccaggtttttagagattttgtc

SEQ ID NO: 47664 - DNA, 201 bp, Homo sapiens
tcccgtcatccaccccgccccaggtctccactctgtccatcagtcttgtatccaccccaccctgggttgtctctgccctgtccatcagtcctcccgtcatyccccctgccctgggtcatctctgccctgtccatcacccaccccgccccgggtctctgccatgtctctcagtcctcccgtcacccacccctccccgggtct

SEQ ID NO: 47665 - DNA, 201 bp, Homo sapiens
cctcagccagctctgtttgaagtccctgcacgcatctgagccgcgtgcactcagccaccctcaaccagctctgtttgaagtccctgcacgcatctgagccrggtgcactcagccaccctcagccagctgtttgaagtccatgcacacatctgagccgcgtgcactcagccaccctcagccagccctacttgaagtccctgc

SEQ ID NO: 47666 - DNA, 201 bp, Homo sapiens
accaaggcggagcaaagtcgccgggggtgtggggtgttccacgctatgttgggagtgttcgctttcgaggtacatgactacgttctaaattttttttttttgagacagtttcattcttgttgcccaggcttgagtgcaatggtgcagtctccgctcacagcaacctccgccgcccgggttcaggcaattgtcccgtctcag

SEQ ID NO: 47667 - DNA, 201 bp, Homo sapiens
gttctgaatgcaaaggaaaagttctggaaggaaagtaaaactgctactccagtgaacacacgaatgataagaacacaatcctaatgctgatatgaaggaastttgagtggtctgcattgattaaaccagccacaacattccctttagccaaagcctaatccagagcagggccctgactcttcaattctgtgagggcttaga

SEQ ID NO: 47668 - DNA, 201 bp, Homo sapiens
tcgataaatcgtgtgtgttccgactgccccactaactggccgttccttcgtctctcaccttctcctaatgcctctgacttcatgagtgagacacaacactrttgaaattaggccaattaacatccctatagcagcctctcagtgttgaaatgaagagttgcgtgtccctcacttgaaagctggaaatgacgaagcttagtg

SEQ ID NO: 47669 - DNA, 201 bp, Homo sapiens
ggcactgtgttttttgagtattagcgagcatagacacctgcactttgttggtgttggtggttgtgatccctgtggttgctttggttttggcttctgtgatscccccccccccgtggaacctgcagggccctgagtgccaccatcctggcacagctccctgccccaggctgggaagacccagcagctctcactgcattgact

SEQ ID NO: 47670 - DNA, 201 bp, Homo sapiens
ctggttagttggcactgtgttttttgagtattagcgagcatagacacctgcactttgttggtgttggtggttgtgatccctgtggttgctttggttttggyttctgtgatgcccccccccccgtggaacctgcagggccctgagtgccaccatcctggcacagctccctgccccaggctgggaagacccagcagctctcac

SEQ ID NO: 47671 - DNA, 201 bp, Homo sapiens
catgttagaaggacaagtaagctacgattgattagggccttattgattgattgatttttgagacagagtttcgctcgtttccccggctggagtgcgatggygcgatctccgctcacaacctccacctcctgggtggaagtgattctcctgcctcagcctactgagtagctgggattagaggcatgtgccaccatgcccggc

SEQ ID NO: 47672 - DNA, 201 bp, Homo sapiens
actgctgtctctctttacacatgtgtacacaccgctgtctgtaacacacaacacgcactaccctgtcacctaggttcgcctgttgtattgcagcactgctrtctctctttacacatgtgtacacgcctctctctgaaacacacgcccacttccccttcacctaggtttgcctgttgttgtattgcagcactgctgtctcta

SEQ ID NO: 47673 - DNA, 201 bp, Homo sapiens
gtacacacctctctctgaaacacacgcccactaacccttcacctaggttcacctgttgtattgcggcactgctgtctctctttacacatgtgtacacaccrctgtctgtaacacacaacacgcactaccctgtcacctaggttcgcctgttgtattgcagcactgctatctctctttacacatgtgtacacgcctctctct

SEQ ID NO: 47674 - DNA, 201 bp, Homo sapiens
taacccttcacctaggttcacctgttgtattgcagcaccgctgtctctttacacatgtgtacacacctctctctgaaacacacgcccactaacccttcacmtaggttcacctgttgtattgcggcactgctgtctctctttacacatgtgtacacaccgctgtctgtaacacacaacacgcactaccctgtcacctaggtt

SEQ ID NO: 47675 - DNA, 201 bp, Homo sapiens
ttcaaccttcccgtgttcactcactcaccgtcaccatctgctcttctggcctccagtattcggtgtcgtctcttcgctcatcgtctctttagttctttctytgtgggtctgttcctgtttcttccaggatgccttctgcatttagagaggtgtcagagaggggagaagacgcctgtgtttctggcacgttgtcgtgttgcg

SEQ ID NO: 47676 - DNA, 201 bp, Homo sapiens
tccatttgagccttacagcaattctttgtagtagctcttcagcctctggtagatctgccagtccaccaactttcttccagtatctctccattaattctttytgttttcacttcccttcctgtctattttagattccatggtataccatttcagtagttttacaaacacctgccacttccttgtccctcttcccatgatacc

SEQ ID NO: 47677 - DNA, 201 bp, Homo sapiens
acccacaattcaaccttcccatgctcacccacatttcagccttcccgtgctcacccgcagttcggccttcccgtgctcacccgcattcacttcaaccttcccgtgttcactcactcaccgtcaccatctgctcttctggcctccagtattcggtgtcgtctcttcgctcatcgtctctttagttctttctttgtgggtctg

SEQ ID NO: 47678 - DNA, 201 bp, Homo sapiens
cacccacaattcaaccttcccatgctcacccacatttcagccttcccgtgctcacccgcagttcggccttcccgtgctcacccgcattcacttcaaccttcccgtgttcactcactcaccgtcaccatctgctcttctggcctccagtattcggtgtcgtctcttcgctcatcgtctctttagttctttctttgtgggtct

SEQ ID NO: 47679 - DNA, 201 bp, Homo sapiens
ccatgcacggtggtccatgatctgtggtccatgcttggtggtccgtgctcggtggtccatgggactgatcctgcacaccatgttgttttcctataacttaygtactttgagtgatgtggttattcatttcgctgaggtcttgtaatcttactttcgggaataatgcactgattttggtttgtttgatcatcactagggcca

SEQ ID NO: 47680 - DNA, 201 bp, Homo sapiens
gggtcagggttcctgtgaagagcaggctcattgggcgtgagggtccctgcgcaagggtctctgtgacgtggaggctcacggagtgtgagggtccctgtgaygtggaggcccgtggggccccgtgctgagcgtcctggagcacatcacgtgcactggggctcatgacggcatggggcgtcttccgggtgcatctgcttcctg

SEQ ID NO: 47681 - DNA, 201 bp, Homo sapiens
ctgccctgggtcatctctgccctgtccatcacccaccccgccccgggtctctgccatgtctctcagtcctcccgtcacccacccctccccgggtctctgtyctgtctctcagtcctcccgtcacccacctcaccctgggtctccaccctgtctgtcagtcctccgctgtccctgtgtgcacgtagttttgctcccacttgc

SEQ ID NO: 47682 - DNA, 201 bp, Homo sapiens
ctcagccagctctgtttgaagtccctgcacgcatctgagccgcgtgcactcagccaccctcaaccagctctgtttgaagtccctgcacgcatctgagccasgtgcactcagccaccctcagccagctgtttgaagtccatgcacacatctgagccgcgtgcactcagccaccctcagccagccctacttgaagtccctgca

SEQ ID NO: 47683 - DNA, 201 bp, Homo sapiens
gagaaatgtgtggtcgtattttttacttttgtcttgtatatgtatgtatattgggtcctctgggcagtagaggcaaagctcacctcccatgtagcacatgraatgcttgtgagttgttgacattggacaggtgaacagtagggcattacatttgtgtgaattaaatgtgaacttctgtattacgttgcggcgtcggcagtc

SEQ ID NO: 47684 - DNA, 201 bp, Homo sapiens
tagaatattgtttttaaaagtgagaggagatttagtgtatctctgttttacccttttaaagttcctcatttaagaagggctactcaggaactcataaatarggacttaaggaaatgattgcgtttgaatcgctctactggacagctttgtttcggcctgtcagattctgtcacttttctttgagatgactgtaagacagcc

SEQ ID NO: 47685 - DNA, 201 bp, Homo sapiens
tctgtgtcctcatctcttcttacaaggatgtcagtcctattggaataggatccactctcctggtctcattttaccttaattatctctttaaagcccctttytccaaacagccccattctgaggtcctggggtgaggacttcgacacaggaatttgggtccacagttctgcccatagcagccccttccactgttccctccgc

SEQ ID NO: 47686 - DNA, 201 bp, Homo sapiens
acttttctttgagatgactgtaagacagccatcaggctattgacacatactcaaaacttcctaactgtgaggtacttcaggacagactccggagacaggtrggggtgtctgagtccacaagtcagcagaaaccagcatgatacgcagagcgggcagcatggggaggggtggctgcctaaagcgtcagctgacgtttggaaa

SEQ ID NO: 47687 - DNA, 201 bp, Homo sapiens
gataataacagggaatgagtagaaaatgcccaaagtgggtaaatcataatatttaaattagagatttgaataacttaatcacatgtggttagtttgaattsagatatgctgtaaatatacacgctgaatttcaaagaggtaatcataaaatatcccattgttttttatgttgactataaaatattttaaacgtattgggtt

SEQ ID NO: 47688 - DNA, 201 bp, Homo sapiens
tcacccacaattcaaccttcccatgctcacccacatttcagccttcccgtgctcacccgcagttcggccttcccgtgctcacccgcattcacttcaaccttcccgtgttcactcactcaccgtcaccatctgctcttctggcctccagtattcggtgtcgtctcttcgctcatcgtctctttagttctttctttgtgggtc

SEQ ID NO: 47689 - DNA, 201 bp, Homo sapiens
ctcacccacaattcaaccttcccatgctcacccacatttcagccttcccgtgctcacccgcagttcggccttcccgtgctcacccgcattcacttcaaccttcccgtgttcactcactcaccgtcaccatctgctcttctggcctccagtattcggtgtcgtctcttcgctcatcgtctctttagttctttctttgtgggt

SEQ ID NO: 47690 - DNA, 201 bp, Homo sapiens
gtgctcacccacaattcaaccttcccatgctcacccacatttcagccttcccgtgctcacccgcagttcggccttcccgtgctcacccgcattcacttcaaccttcccgtgttcactcactcaccgtcaccatctgctcttctggcctccagtattcggtgtcgtctcttcgctcatcgtctctttagttctttctttgtg

SEQ ID NO: 47691 - DNA, 201 bp, Homo sapiens
cgtgctcacccacaattcaaccttcccatgctcacccacatttcagccttcccgtgctcacccgcagttcggccttcccgtgctcacccgcattcacttcaaccttcccgtgttcactcactcaccgtcaccatctgctcttctggcctccagtattcggtgtcgtctcttcgctcatcgtctctttagttctttctttgt

SEQ ID NO: 47692 - DNA, 201 bp, Homo sapiens
cttcccgtgctcacccacaattcaaccttcccatgctcacccacatttcagccttcccgtgctcacccgcagttcggccttcccgtgctcacccgcattcacttcaaccttcccgtgttcactcactcaccgtcaccatctgctcttctggcctccagtattcggtgtcgtctcttcgctcatcgtctctttagttctttc

SEQ ID NO: 47693 - DNA, 201 bp, Homo sapiens
gtgcctggcttgtgttttttattggctttccgttcttcacgcaggttaattcagccttcccgtgctcacccacaattcaaccttcccatgctcacccacawttcagccttcccgtgctcacccgcagttcggccttcccgtgctcacccgcattcacttcaaccttcccgtgttcactcactcaccgtcaccatctgctct

SEQ ID NO: 47694 - DNA, 201 bp, Homo sapiens
atcttcaccaatgagctcagctggatcttctggagaacttgctgcagcttctccatcagcacttgctgtttcaccttgtacttttatgttgtggagacggygtcttaaacctcataaacaactctctgccagcttccagcttttcttccgcagctccctcacctctcacagccctcagggaattgagagtcagggccctgc

SEQ ID NO: 47695 - DNA, 201 bp, Homo sapiens
caataaaggatactccatgaatgtgcttgcgtgcccgtagttaatgctgtccacggagtgaatgctgtccacgtagttaacgctgtccatgtagttagttaacgctgttcacgtagctcttttctgccttttcacttagagctgtgtgtgtaccagtttcctgaccagactttgtttctgtttcctctcgcacgtgctgtg

SEQ ID NO: 47696 - DNA, 201 bp, Homo sapiens
gagagtcaggaggtccggggtcagggttcctgtgaagagcaggctcattgggcgtgagggtccctgcgcaagggtctctgtgacgtggaggctcacggagygtgagggtccctgtgatgtggaggcccgtggggccccgtgctgagcgtcctggagcacatcacgtgcactggggctcatgacggcatggggcgtcttccg

SEQ ID NO: 47697 - DNA, 201 bp, Homo sapiens
tcaataaaggatactccatgaatgtgcttgcgtgcccgtagttaatgctgtccacggagtgaatgctgtccacgtagttaacgctgtccatgtagttagttaacgctgttcacgtagctcttttctgccttttcacttagagctgtgtgtgtaccagtttcctgaccagactttgtttctgtttcctctcgcacgtgctgt

SEQ ID NO: 47698 - DNA, 201 bp, Homo sapiens
cagcatgagttttgggaaagcgagcttggtggagagtcaggaggtccggggtcagggttcctgtgaagagcaggctcattgggcgtgagggtccctgcgcragggtctctgtgacgtggaggctcacggagtgtgagggtccctgtgatgtggaggcccgtggggccccgtgctgagcgtcctggagcacatcacgtgcac

SEQ ID NO: 47699 - DNA, 201 bp, Homo sapiens
ttcaataaaggatactccatgaatgtgcttgcgtgcccgtagttaatgctgtccacggagtgaatgctgtccacgtagttaacgctgtccatgtagttagttaacgctgttcacgtagctcttttctgccttttcacttagagctgtgtgtgtaccagtttcctgaccagactttgtttctgtttcctctcgcacgtgctg

SEQ ID NO: 47700 - DNA, 201 bp, Homo sapiens
gaccttgggcaaggccttcctaagtcccgactccctgtcctctaacatggtgttcatatcagcctcattttcttactgggaaggttacgttatgtaatatrtgccagccatttttgcaaagtgctgtatacaggagatcttgagtgagtgtgtttccctcctcctctttttgggtagctatgttaggctgttcactttggg

SEQ ID NO: 47701 - DNA, 201 bp, Homo sapiens
ctcagcctactgagtagctgggattagaggcatgtgccaccatgcccggctgattttgtatttttagtagagacagggtttcaccatgttggtcaggctcrtctcgaactcctaacctcaggtgatccacctgtctcgccctcccaaagtgttaggattacaggcgtgagccaccggccccgggatcaaggccttatttta

SEQ ID NO: 47702 - DNA, 201 bp, Homo sapiens
attgtgcctgtgttctaattcacacatttatttataacttaactgagtggaggatcaaatattgaactcatagttcttttaatgttgactttgaaatacaygctatagctaataaatgttgataacatgtttttgtcactttaaacctgtttttatcatatttttattttgcagtaaattctatcaaatttcatccctcag

SEQ ID NO: 47703 - DNA, 201 bp, Homo sapiens
agtagaaaatgcccaaagtgggtaaatcataatatttaaattagagatttgaataacttaatcacatgtggttagtttgaattgagatatgctgtaaatayacacgctgaatttcaaagaggtaatcataaaatatcccattgttttttatgttgactataaaatattttaaacgtattgggttaagtaaatcattaaaag

SEQ ID NO: 47704 - DNA, 201 bp, Homo sapiens
attcaataaaggatactccatgaatgtgcttgcgtgcccgtagttaatgctgtccacggagtgaatgctgtccacgtagttaacgctgtccatgtagttagttaacgctgttcacgtagctcttttctgccttttcacttagagctgtgtgtgtaccagtttcctgaccagactttgtttctgtttcctctcgcacgtgct

SEQ ID NO: 47705 - DNA, 201 bp, Homo sapiens
cttaaattttacaccttataaaaaggtcagtaccatataggtaataaatttagatgtgaaacagaaaactataaaaaattcaggagaaacaggagaaaatstttggcccctagggattcatgaaaagttcttgtcatgactttaaaagtgtgatgcatagaaaaaattatcaacattaaagaagtgttgcttcatgaaaaa

SEQ ID NO: 47706 - DNA, 201 bp, Homo sapiens
ttgtattagtccattttcacgctgctgataaagacatacctgagattgggcaatttacaaaggaaagaggtttattggacttacagttccacatggctggrgaggcctcacaatcatggcagaaggcaaagaggagcgagtcacattctgcgtggatggcggcaggcagagagggagagcttgtgcaggaaaactccccct

SEQ ID NO: 47707 - DNA, 201 bp, Homo sapiens
agatatgtaggactttttttttttagaaacggagtcttgctctgtcacccaggttggagtgcagtggcgcgatcttggctcactgcaacctccgcctcccsggttgatgccattctcctgcctcagcctcctgagtatctgggactacaggtgcctgccaccacgccctgctaattttttgtattttttagtagagacggg

SEQ ID NO: 47708 - DNA, 201 bp, Homo sapiens
ggacgggagccgcacacatgagcagtgctgataggtgcctggcccattgaaaggccgcgtgtgtgttgaatggatggagatgagtgtcgctttcccgaacrtctcagagttgattgcagctgtaagttctgatatgatagggtttcttaggttagatagatggagaggaaaatctactatttgtacattttctctgaactt

SEQ ID NO: 47709 - DNA, 201 bp, Homo sapiens
ttgggaagccgaggtgggcagatcacctgaggtcagcagtccaagaccaccctggccaacatggtgaagtcccgtctctactaaaaatacaaaaatcagcygggcatggtggcgggcacttgtagtcccagctactcaggaggctgaagcaggagaatcacttgaactcaggaggcagaagttgcggttagccgagatcac

SEQ ID NO: 47710 - DNA, 201 bp, Homo sapiens
tcaagaacttttcctttgcattcacgacttagctgtttcaacatgccttcctcaccatgcttaatcattaatcatttctagttttgatttaaagtaagagrtgtgcaactcattcttttatgaaacagtagccattttagggctattaattgcctgatttttttttttttttgagtcagggtcttgctttgctgcccatgc

SEQ ID NO: 47711 - DNA, 201 bp, Homo sapiens
tggtcgagatgattaaagttaatattttttactgctaaccatcagctgagccttcaatgagtcataatctttttgctggtggagggttttgcctcaatgtygatggctgttgatcaaggtggtgcttgaaagttggggtggctgttgcagtttcttaaaataagacaataatgaaatttgtcacgttgattgacaattctt

SEQ ID NO: 47712 - DNA, 201 bp, Homo sapiens
ccagtgtgtttttaaaatcgtgcatgataaagccagctgctactgtgtaggaagccttactgtttcggttgtcaggggacagtgtggtctgttcagagacygggataactctgtcttgagcttgtatgggctcaataacagggaaaagcttaactccctaaacaatgtacatatcatgttagtctgcattttatttaatat

SEQ ID NO: 47713 - DNA, 201 bp, Homo sapiens
atgaaacctttcttccccctctcttcttgtttttatggtacttttcatctttagggcgtgggtctcccatcttagccatttcagggcctcttcggttcctygagcctctccctgagggccacatatttcaacacatttgaattaaaaagaaaactattaattattattttggatttatagaagcaggttccaagagtggtt

SEQ ID NO: 47714 - DNA, 201 bp, Homo sapiens
cacgggcagcagttatgggtcagaggaggacatactcatcactgtggccagcaccaggctcctagtggtgaccatcatgatggatatgtcctcaagagatkaatgagaaccatctattttgtagctatgtcagaagaaactcaagatttccaggaaatgtctttcttttctggccttccctttggcagcagatatctgggg

SEQ ID NO: 47715 - DNA, 201 bp, Homo sapiens
ggcagcgatgaccgcacggtgaaagtctgggacttgaaaaatatgagatcccccattgcaactattcgcacggactctgccattaacaggtaaagtcaaastgttggttaagtaagtggcttagtttgatgtgaaaggattgattgtgatttcatgttttattcatggaggtttaattgatagaaccccgggaacaatggt

SEQ ID NO: 47716 - DNA, 201 bp, Homo sapiens
ggggacccaccccagccctgagccaggcaggacgcgcagccccctggccgttgctgaagacagcagtggatcatgcctggattgtgtgcccttagctcacrgggaaagtaaggtttttatcacattctttttactgaactttgccagtgagcaaagaggtgattgaattttcttcttcaaatgtcattttattatttgagt

SEQ ID NO: 47717 - DNA, 201 bp, Homo sapiens
tatcagtggtcgtgtaatttcccatttttagagtatttgtcttattctttcatttgaaaaactataaactgatgatagctaagttccgacttcttcatttycatcttgcagatcacacggctttgctgtggagcatagagacagggaagtgcctagtcaagtacgcaggccacgtgggctcaggtaagcactgcctaagga

SEQ ID NO: 47718 - DNA, 201 bp, Homo sapiens
ttttcttttttttaatcctgatttatttttagctaaaaatgacatctttgtctataaaaagaactagatgatgaatatccttttcctggggtcctaaactrtagcgatttggtggttcataccttagttgtttttattgtgcctgtgttctaattcacacatttatttataacttaactgagtggaggatcaaatattgaa

SEQ ID NO: 47719 - DNA, 201 bp, Homo sapiens
ctaacacgcacatttagtgatgaaacaagtgaaatgtgtgctgatggtgggcgtggtggagaggtgaggagggtgagcattgatgcttaggaaattcagcrtgtgcactgatggtgtggcggagacgtgaggagggtgagcattgatgcttaggaaattcaaaatgtgcactaatggcgggcatggtggagaggtgaggag

SEQ ID NO: 47720 - DNA, 201 bp, Homo sapiens
catgcccagtttaggtgctgtcagtgcctgggggaggcgagcagctggcccgctccttcctggctgcctcttctgagggatccagcctcagttcctgtcayggccgctcacgtctggactgcaccctcgctccggctggtctctgtgccttgagggagtgcgtcagctagtggggcttccagtgcttccctctggggcctc

SEQ ID NO: 47721 - DNA, 201 bp, Homo sapiens
ccagttgtattatgataggtgtaggtcttaatggtaggcttaaaatactcagtcaacaatgctgtcatcagatgtactgtcatccatgctttgttgttccwtttatggaggacaggtagaggagatgtagcgtaattcttaagggccctgggatttttgaaatggcaagtgagcattgacttcagctgaaagtcaccagcc

SEQ ID NO: 47722 - DNA, 201 bp, Homo sapiens
atccatgacttgcattatattcctattggacagcatgagtctagaatgtgtagtctagaatatgcaattaacattggttccctcgggggagtagactgtgyctggggaattccgttgggttaagggagagcaattttttttttaaattttaaacctcttttttgccatttgatacttaagatgttaatgaaatttgataaa

SEQ ID NO: 47723 - DNA, 201 bp, Homo sapiens
tcctgagccagtcccttgttgatgcatgtttttaaatttttattggtttatttttttgagacagggcgtcaccctctcgcctaggctggactgcagtggcrtgatcacggctcactgcagtctcgacttcctgggctcaagtgatcctcccacctcaccctcctgagtagcagggactacagggctgtgccaccactccct

SEQ ID NO: 47724 - DNA, 201 bp, Homo sapiens
taatccagagcagggccctgactcttcaattctgtgagggcttagaaaggtgagggagctgcggaagaaaagctggaagctggcagaggttggtttatgakgtttaaggaaggaagccgtctccataacatgagagtgcaaggtgaagcagcaagtgctgatggagaagctgcagcaagttctccagaagatccagctggg

SEQ ID NO: 47725 - DNA, 201 bp, Homo sapiens
ttgattgatttttgagacagagtttcgctcgtttccccggctggagtgcgatggtgcgatctccgctcacaacctccacctcctgggtggaagtgattctyctgcctcagcctactgagtagctgggattagaggcatgtgccaccatgcccggctgattttgtatttttagtagagacagggtttcaccatgttggtcag

SEQ ID NO: 47726 - DNA, 201 bp, Homo sapiens
ccaggagagatttttccccactttcttttttttcttactgtaatccccatacttttacttgcattctgtgcctttttgaaagactggagtttgagttccartgcttcactgtaagaaagaaaagtgtagcgaaatgggtcccctgaaacgtgtggtcattacctttgctggatggggatggagctccgtgctgtgagctgc

SEQ ID NO: 47727 - DNA, 201 bp, Homo sapiens
cgagccaatacgacaaataaaacctacagagtgcgtgatccttacaaatgtgtagagctgtgcatccgcgccacagcacaccagggtgagggcctcgcagygcggtttaggtcctgagatgtgcgtccgcgccccagcacacctgggtgaggtccggggtgcgggtttagttcctgagaggaatggccaggttgtgtgtgt

SEQ ID NO: 47728 - DNA, 201 bp, Homo sapiens
tgtccttagtcatgaaaaagttctgtgggttgacatgaaaacttaattctagccttaattttcagtatttccgactctactatctttcaaaaaaataactrcctttcaaattctgctattctttttctaaacatttagctccattttggctatttcaaaggatgtaggagattaagagaaggcaccctccgaagttctctc

SEQ ID NO: 47729 - DNA, 201 bp, Homo sapiens
aaattctggttaatttgtggtacatttttgcagctagtggatacatgaaacaatggtagttttttagagagctgtacttatgaagaatgtagtaagtgttwtgaaaaagttcttactaatgtggacctatgaatacagtttcctagggtttatgtcttcctattggaatcaggtgtgggggtagagtaaggtggagtgtgt

SEQ ID NO: 47730 - DNA, 201 bp, Homo sapiens
actccgtctcagaaaaaaaaaaattctggttaatttgtggtacatttttgcagctagtggatacatgaaacaatggtagttttttagagagctgtacttaygaagaatgtagtaagtgttatgaaaaagttcttactaatgtggacctatgaatacagtttcctagggtttatgtcttcctattggaatcaggtgtggggg

SEQ ID NO: 47731 - DNA, 201 bp, Homo sapiens
ttctgatatgggggttgcagggataggccagtgtgccctgctgtgcctgtcccctttgagggcaggatggaaaggccgaagaattctgtccagaggaggaygcagtggagccagggcttggtgagttgctggtttgtgccaggcactgttggagcccctggcatcaccccagttcagagagagaaactgaggcatgaggag

SEQ ID NO: 47732 - DNA, 201 bp, Homo sapiens
tgaaaggaaaactctagcatgcattttctaagaataaggatgttctcctaatacagtaccattgttcaaataagaaaattagtaaaaattctatggcatcstttatctggtccacatttaaatttactcagttctccccaaaatgtctttgatactttttttagagctaggatttaatcaggattctctcatcacatttag

SEQ ID NO: 47733 - DNA, 201 bp, Homo sapiens
ttgtattgcagcactgctgtctctgtagatgtgtacacacctctgtctataacacacacttgtatattttctttggctgagccctttgaaaggaaaactcyagcatgcattttctaagaataaggatgttctcctaatacagtaccattgttcaaataagaaaattagtaaaaattctatggcatcgtttatctggtccac

SEQ ID NO: 47734 - DNA, 201 bp, Homo sapiens
caaaatcttgctctgtcacctaggctggagtgcagtggcgtgatctgggctcactgcaacctccgcctcccaagttcaagcgattctcatgcctcagcctyccaagtagctgggatcacaggcacccaccaccatgcctggctaatttttgtatttttagtagagaaggggttttgccatgttggccaggctggtcttgaa

SEQ ID NO: 47735 - DNA, 201 bp, Homo sapiens
tcacccactattgtgaggtcagcatcaggctatgaggaatcctcccccatgagccagacacccccaccaggcccggcctccaacacaggggattccagttsagcatgagatttgggctgggacaaatttccaaattatcagttccagtactagtacttgtgtatatatgacatacctctccatactaacgggtgtgtgtgt

SEQ ID NO: 47736 - DNA, 201 bp, Homo sapiens
ggtgagtggcccccgtgaggtgctctgccttccccctgccgtgggcgggagagagctgtggtgtctgccgcacgcgtttggcatggtaggtgtgagggggrcgatctcagaacagggaggtgttgattaacgtaggagtgggctcgttctagacagtgtagagtgacgccctttcagttgttgaggagcagcaatatagaa

SEQ ID NO: 47737 - DNA, 201 bp, Homo sapiens
tgttgatttgtgttcccgtgctgctctgcatccatgtgatatgtgttcccgtgctgccctgggtccctgtgacgtgctttcccttgctgctgtgcgtcccygtgacgtgcgttcccttgctgctgtgcgtccatgtgacatgtttccgtgctgccgtgcgtccctgtgacgtgtgttcccgtgctgctgtgcgtccctgtg

SEQ ID NO: 47738 - DNA, 201 bp, Homo sapiens
cagtgctttagaccaaacacctttccaccgtctgaacgcctgtattgttctcttactgcctgtggaaatcaccctgtcagccactcctgcagcagagggcrcttcagttctttcttcccaccctgctccaggccgccctccctgcacttctctcatctcctgtccgtctcccccgttgttttctggggctgccataacaaa

SEQ ID NO: 47739 - DNA, 201 bp, Homo sapiens
catgtctcatgttctcacatgtgggagctaaaaaatgtgaacacatggaggtaaacagtggaaaaatagatagataatagagaccgggaagggtgtgagtygggggcggagggaggatgagaagagagttaaaaggtacaaacatgcagtatgatagaaggaatacattcagtgtttgacagcagagtagggtgactatcc

SEQ ID NO: 47740 - DNA, 201 bp, Homo sapiens
cttgagttttctgctttgtgaacattctaaacactgttctatgtggagatagttaagcagttaataaattccagtgataaatgagttttctttagtcctawtagaggttatcatagttcatttttaactgcatgtattgtgtattaacacagttttgttctctttgtggaattgccagactattcattatgtagcgcataa

SEQ ID NO: 47741 - DNA, 201 bp, Homo sapiens
ctgcctcagcctcctgagtatctgggactacaggtgcctgccaccacgccctgctaattttttgtattttttagtagagacggggtttcaccgtgttagcyaggatggtctcgaagtcctgaccttgtgatccgtccaccttgacctcccaaagtgctgggattataggcgtgagccacctcgcccagcccgatactagga

SEQ ID NO: 47742 - DNA, 201 bp, Homo sapiens
aggataaatgttagtggcgtgatcttcccacgtgctcagcccccccagttcggtgcctgaacaggtgggaacagtgccaggcagacagtgtaaatgacgtmcacgtctagaagtttcagtttgtattgggctgtgattgttgcaaggatgaaagtaatctagttttgatattttcatcttggaatattccttgagttttct

SEQ ID NO: 47743 - DNA, 201 bp, Homo sapiens
caggtcacagcttctcccatttgggaaatgttttctttgatcaattgaagcatacagagtaatagaatcaaaggtggaagagatatcagtggtcgtgtaayttcccatttttagagtatttgtcttattctttcatttgaaaaactataaactgatgatagctaagttccgacttcttcatttccatcttgcagatcacac

SEQ ID NO: 47744 - DNA, 201 bp, Homo sapiens
tggacacacaggcgtgctcctcagatgtgaacacattaccttgaggaagctgcgttttaaaaataggaaaggaaacgatcgtcagtgtttgatgtcgtgcsggaaaagcactcccatcagcgctttgtggcccagtgttttccacatcgtgtcgtcttttccttagtgaaatttcggcagattgttatgcagaagcggttc

SEQ ID NO: 47745 - DNA, 201 bp, Homo sapiens
cgtggtcatcgcctccgactggctggttggggggaagcaggctgtgactgcctcctgggaccggacggcaaacctgtacgacgtggagacgtccgagctcrttcactctctgacaggtgcctgggttctctgagtccgccgcctcctggctgtgcatgttagtttatgtccatgggttatgtctgaccttgccacttactt

SEQ ID NO: 47746 - DNA, 201 bp, Homo sapiens
ctacgacccccgaggccacctcccgcgaaccgctcggcggcaggagtaggtgaccaagggtgggggcgttggcccagcagccgaaggggtcttcagcgcgmccagacccctcggggctgcggggcggaagccggggcgtgacttccggcgccgccgggtgtggggcggaggtgtggggcggcttccggagaacccagcggc

SEQ ID NO: 47747 - DNA, 201 bp, Homo sapiens
gctgggattacaggcgtgagccaccgtgcccagcctctctgtgctaatattaatagaagagcccctgtgggcacgcggcaggatggcggtgccacacaccrgaagaggggactcaccagaagctgcactggttgacacgttggtcatggacttagagtctccagaactggaagatgactaatttctgtttttgaagccttt

SEQ ID NO: 47748 - DNA, 201 bp, Homo sapiens
ctgttgcctctttctctcttttggaaagggagcgtctgtccagtgcctgccctactgttgtattttgggaacatgtaacttgtttgggttccgtggtttayggctggaggggagctcagcttcagggtgggcgaatcgcactctgagtcccacccagtcctgattcaggtgatgttttgttgagacttgggacttcacacc

SEQ ID NO: 47749 - DNA, 201 bp, Homo sapiens
atgaaggaaggcatcagactgctgggattccacagcacagaaaccagagctgcctgggcgagaacctttaccacccttcaagatgagggaagaatgccccraaggtgattctgaggttggcagggctgcagctctcactgcagtcccaggacaagagcctgtttcttccttggtttcgaagtgtgggagcctccttggttt

SEQ ID NO: 47750 - DNA, 201 bp, Homo sapiens
gctggagaaatgccgacggtgtggacctggcttcgggaccgggaatgggtacatgctgcagacgttttcagggacctgctggagaaagcctccatagcggygaagagcttgttggtagaaatacggacatcaatggggactcgggtgaaggctcagagaggaaaggggagagctggagagaaagcttctagcatctcagag

SEQ ID NO: 47751 - DNA, 201 bp, Homo sapiens
tccggagaacccagcggcgcgggactggggcgggacttccggcgacaccggaagtgcattagcgccaggttggggttgtggggtcgcgtcagtgcggagasagcggtgtcctgcgcgtcttcgggtcagtacggggggccgcgtcgtagggactcactggcggtgcgcgacctgggctggctccgggggtggcgggcgcag

SEQ ID NO: 47752 - DNA, 201 bp, Homo sapiens
gccgtctttaaggatgagcccgcaccagaacctgaattggcttgatcttggacttccagcctccagcactgtgagaaaataaatgtctgttttttatgcgycgcccggtctgcggccttttgttgcggcagccagagccaactgagacagatttcagtaccgcgcgcagagcgggggctgctggagaaatgccgacggtgt

SEQ ID NO: 47753 - DNA, 201 bp, Homo sapiens
atttaggattataattagaatgcttaataaactgaataggaaagatcttgtttatgttattaataacctttatggaagacactctaaattttttgtgaatrcatttcatctctgttaagaatactctcttctatgtgtagataaacttatttttcaaaacaggctgacttgtttaaaaagaagggaacgctagtgatttta

SEQ ID NO: 47754 - DNA, 201 bp, Homo sapiens
gcgcccagacccctcggggctgcggggcggaagccggggcgtgacttccggcgccgccgggtgtggggcggaggtgtggggcggcttccggagaacccagmggcgcgggactggggcgggacttccggcgacaccggaagtgcattagcgccaggttggggttgtggggtcgcgtcagtgcggagacagcggtgtcctgcg

SEQ ID NO: 47755 - DNA, 201 bp, Homo sapiens
cctgtagacggagctccttgaggccctgtggttaccattctgttcccttagattgtaggcatctgatatggaggaaaagagaaaagtagcacagagacacrgcaagttgccaatgtcagcatttttacttctttctgggtaatttatctaacccgtggtagcttggatttgctataatttcagagtagttttaaaaacgtg

SEQ ID NO: 47756 - DNA, 201 bp, Homo sapiens
gtgattcagttacatcttcgggcagccatagccttacaaaatgtatttcttaaataatgagacttgaaagtcaaaatgacttcttgagctatgggctgcaraagggatgttgtgttagcaggcatgaaatcaacatgaatctccttgtatatctccatcagagctcttgggtgaacaggagcactgtaaatcagcagtaat

SEQ ID NO: 47757 - DNA, 201 bp, Homo sapiens
tttggtgcaagatgcccagctttcagcctgtctcagcttttgacttgccttcctcactaagcttaatcatttctagcttttgatttaaagggagcaatgtrcaactcttccttgcattggaatacttagaggccattgtagggttatgaattggcctaattttagtattgttttgtctcggagtagagaggcctgagcaga

SEQ ID NO: 47758 - DNA, 201 bp, Homo sapiens
tcctgggttcaagcaattctcctacctcagcctcatgagtagctggcactatgggcgtgtgccaccatgcccggctaatttttgtattattagtagagctkgggtttcaccatgttggccaggctggtcttgaactcctgaccttgtgatctgcccaccttggcctctcaaaatgctgggattataggcatgagccaccgc

SEQ ID NO: 47759 - DNA, 201 bp, Homo sapiens
gttagttaacgctgttcacgtagctcttttctgccttttcacttagagctgtgtgtgtaccagtttcctgaccagactttgtttctgtttcctctcgcacrtgctgtgtggttccttcccccgcagtgccctcttcacttgctcactcgccctccctcacacctccacgctgccaggctgagaggtggcatcgcctgtgtg

SEQ ID NO: 47760 - DNA, 201 bp, Homo sapiens
taagcttctaaaggccaaagtattctaatattaaacattgaaataaatgtgagctatacatacatttaagaaagatgaataaaaagataattattacttamttattccagttctgggtcatgtgtagctgaagcctgtttcagtagctcagggcacaaagagggaaccagccctggacaggacgccattccatcacagggc

SEQ ID NO: 47761 - DNA, 201 bp, Homo sapiens
atagacggaaaatgtgtggttactgaaaactgtatatgatacagaatttcataagagccatgctgttgggcaaagcaactctttttcaaccactgctcatyagtttctgtagagacaaaaactctgtacatattttggaatctgaagaatcctatgtaaatcatttgttacttaagtctgtgaaaaacatatttctttgga

SEQ ID NO: 47762 - DNA, 201 bp, Homo sapiens
tgtagttagttaacgctgttcacgtagctcttttctgccttttcacttagagctgtgtgtgtaccagtttcctgaccagactttgtttctgtttcctctcscacgtgctgtgtggttccttcccccgcagtgccctcttcacttgctcactcgccctccctcacacctccacgctgccaggctgagaggtggcatcgcctg

SEQ ID NO: 47763 - DNA, 201 bp, Homo sapiens
tgctgttcgctgctgtgtcgtcttctaatgtgagctcatccactgctgctgcagcgtggtgatcaggagtcacagacaagatcggggatggtgtgtgtgtstgtgtgtgtgtgtgtgtgcacgtgtgtgtggctaaattaagtcatactgtcaaccacacgtgatctcgtctgaaacagtgtttggaagtgggaacagttt

SEQ ID NO: 47764 - DNA, 201 bp, Homo sapiens
aaatcagccaggcgtggtggcgggcgtctgtagtcccagctactcgggaggctgaggcaggagaatggcgtgaacccaggaggcggagcttgcagtgagcygagatcgcgccactgcactccagcctgggcgacagagcgagactctgtctcaaaaaaaaaaaaaagaaactccccgtggtcgaggcagcgtctgcccagc

SEQ ID NO: 47765 - DNA, 201 bp, Homo sapiens
ctaataaaaatacaaaaaaatcagccaggcgtggtggcgggcgtctgtagtcccagctactcgggaggctgaggcaggagaatggcgtgaacccaggaggyggagcttgcagtgagctgagatcgcgccactgcactccagcctgggcgacagagcgagactctgtctcaaaaaaaaaaaaaagaaactccccgtggtcga

SEQ ID NO: 47766 - DNA, 201 bp, Homo sapiens
ctgtctctaataaaaatacaaaaaaatcagccaggcgtggtggcgggcgtctgtagtcccagctactcgggaggctgaggcaggagaatggcgtgaacccrggaggcggagcttgcagtgagctgagatcgcgccactgcactccagcctgggcgacagagcgagactctgtctcaaaaaaaaaaaaaagaaactccccgt

SEQ ID NO: 47767 - DNA, 201 bp, Homo sapiens
tcctgactaacacggtgaaaccctgtctctaataaaaatacaaaaaaatcagccaggcgtggtggcgggcgtctgtagtcccagctactcgggaggctgargcaggagaatggcgtgaacccaggaggcggagcttgcagtgagctgagatcgcgccactgcactccagcctgggcgacagagcgagactctgtctcaaaa

SEQ ID NO: 47768 - DNA, 201 bp, Homo sapiens
atatacttagcaccatgtcaaacacttttttttacatttcagaagaaaagtttatgaaagagtttaacataaactgatgaaacctttcttccccctctcttcttgtttttatggtacttttcatctttagggcgtgggtctcccatcttagccatttcagggcctcttcggttccttgagcctctccctgagggccacata

SEQ ID NO: 47769 - DNA, 201 bp, Homo sapiens
agcacagctccagcagcacagctccagcagcagtgcagtcagagcctctgggaaggagccactctgttcttaccctgcgaatggagcaggtgaagaatgtractctagtagtttgtttcttataatactgttattaatgttagaagtggtgagagatttggaaaatgaaatttacgacaatactgttacttatgttagaaa

SEQ ID NO: 47770 - DNA, 201 bp, Homo sapiens
taatatacttagcaccatgtcaaacacttttttttacatttcagaagaaaagtttatgaaagagtttaacataaactgatgaaacctttcttccccctctcttcttgtttttatggtacttttcatctttagggcgtgggtctcccatcttagccatttcagggcctcttcggttccttgagcctctccctgagggccaca

SEQ ID NO: 47771 - DNA, 201 bp, Homo sapiens
cactcagccaccctcagccagctctgtttgaagtccctgcacacatctgagctgcgtgcactcagccaccctcagccagctctggttgaagtccctgcacrcatctgagctgcgtgcactcagccaccctcagccagctctgcatgaagtccctgcaggcatctgagctgcagggtttctggtgctcagcagcagagcaga

SEQ ID NO: 47772 - DNA, 201 bp, Homo sapiens
tgaacctgggggatggaggttgcagtgagctgagatcgtgcaactccactccagcctaggagacagagcaagactctgtctcaaaaaaaaaaaaaaaaaaattgggaacttcataactcacatgactgttttggttgagagttactagaagcttgtgattaagttaaagcttttaaaaactgtcctaaataataggcaaac

SEQ ID NO: 47773 - DNA, 201 bp, Homo sapiens
ttagccatagtggcggtgaagagcgcattttaccatggtctgtgccttgggtaattttccccgatttctctcttcagcttctggagatcagactgctcatrtctggagatacgcggtgcagctgccgacaccccagcctgttgctgacactagtgtaagcacctttccttacctgcgaatgtgtaggatgctgatgtctgc

SEQ ID NO: 47774 - DNA, 201 bp, Homo sapiens
attgcctgtgtttgtcctaaccaccaggagctgcagctggaagtcagtgcttttcacctgaactaagttcttttctgttcgtgtgtttttcacccggcagkgtaattccataagcctggccctctcctggctgctgcattcccttgcacacacccagggggctgaacccacacgcaggccattccagcgtgggccctcact

SEQ ID NO: 47775 - DNA, 201 bp, Homo sapiens
tcctaaccaccaggagctgcagctggaagtcagtgcttttcacctgaactaagttcttttctgttcgtgtgtttttcacccggcagtgtaattccataagyctggccctctcctggctgctgcattcccttgcacacacccagggggctgaacccacacgcaggccattccagcgtgggccctcactgtgcagaccgtggg

SEQ ID NO: 47776 - DNA, 201 bp, Homo sapiens
acctctgccaaataccccttttgtaaggaaagtgggaggacatcatagactgtgtaacccagtcctgattcattctctgaggctggcagaggttatactctctggggtcctggcgtctctactagtcacagaacagactggggtccttaggctgggaaggaaggcggatggggcggggcttatggtaataaattgtgtctg

SEQ ID NO: 47777 - DNA, 201 bp, Homo sapiens
tggagagtcaggaggtccggggtcagggttcctgtgaagagcaggctcattgggcgtgagggtccctgcgcaagggtctctgtgacgtggaggctcacggrgtgtgagggtccctgtgatgtggaggcccgtggggccccgtgctgagcgtcctggagcacatcacgtgcactggggctcatgacggcatggggcgtcttc

SEQ ID NO: 47778 - DNA, 201 bp, Homo sapiens
ttgcggtagtttagacatctgtccttagtcatgaaaaagttctgtgggttgacatgaaaacttaattctagccttaattttcagtatttccgactctactmtctttcaaaaaaataactacctttcaaattctgctattctttttctaaacatttagctccattttggctatttcaaaggatgtaggagattaagagaagg

SEQ ID NO: 47779 - DNA, 201 bp, Homo sapiens
ggattcttggtgccaaagctaagcatgaatgcaacaagagaaaggctacagtctagctttattactttccctccttctgacccagagccacgaaaagcaartaacgtgcctggtgggatagcgggaacacaaaagtgtgttacgtgaacgcagaagaggtttttccccttcctgggtggctaatgagatttctgatgccta

SEQ ID NO: 47780 - DNA, 201 bp, Homo sapiens
aagatagtactggaatttctagccaaatcaataaggtagtaaaaggaaatagaaggcttacaaaccacaaaggaagaaataaaactgtcctttttttttttagatgacttaatagttgacatagaaaatcccaaggaatccacaaaaaatcttgaactttaggttcagcaagaatgtacacgtttaatacataaaatccag

SEQ ID NO: 47781 - DNA, 201 bp, Homo sapiens
ctcagccagctctgtttgaagtccctgcacacatctgagctgcgtgcactcagccaccctcagccagctctgtttgaagtccctgcacacatctgagctgygtgcactcagccaccctcagccagctctggttgaagtccctgcacacatctgagctgcgtgcactcagccaccctcagccagctctgcatgaagtccctg

SEQ ID NO: 47782 - DNA, 201 bp, Homo sapiens
gcttgaacctgggagatggaggttgcagtgaaccgaggttaacaccactgcactccagcctgggcaacagtggagacgtcatctcaaaaaaaaaaaaaaaattaccttcaggctacgtgcatgaggtatacatgaaacataaatgaactttgagtttagccttgggtcccatccctaggatatcttactatgtatatgcgg

SEQ ID NO: 47783 - DNA, 201 bp, Homo sapiens
attttagattccatggtataccatttcagtagttttacaaacacctgccacttccttgtccctcttcccatgataccaacctgaaaaccccctaaactggwgattaaacatttaaataagatttatgctacgccggttgagcatcctaatccaaaaattcaaaatccataacatgacacaagtggaaatttccacacctta

SEQ ID NO: 47784 - DNA, 201 bp, Homo sapiens
cctcagccagctctgtttgaagtccctgcacacatctgagctgcgtgcactcagccaccctcagccagctctgtttgaagtccctgcacacatctgagctrcgtgcactcagccaccctcagccagctctggttgaagtccctgcacacatctgagctgcgtgcactcagccaccctcagccagctctgcatgaagtccct

SEQ ID NO: 47785 - DNA, 201 bp, Homo sapiens
agtgttttccacatcgtgtcgtcttttccttagtgaaatttcggcagattgttatgcagaagcggttctgtgtctctgtgtgactgggagacagctgttcrtcctaatgaggatgccagcttcgcggcgtttccgctgatggagacccgcggagggagcggaatgttccagaccaggcagtggtgtgcggcgaggaggtgc

SEQ ID NO: 47786 - DNA, 201 bp, Homo sapiens
ctgggggaggcgagcagctggcccgctccttcctggctgcctcttctgagggatccagcctcagttcctgtcacggccgctcacgtctggactgcaccctygctccggctggtctctgtgccttgagggagtgcgtcagctagtggggcttccagtgcttccctctggggcctctgggcctgggggcctcagggcttccat

SEQ ID NO: 47787 - DNA, 201 bp, Homo sapiens
gctttccactttcagatctgctttctttttggtgatggcttttgagtccttgtctgtggggaaggtggagagccagccgtctaccaggtggtgactttgcrgacagcagggccctgtggaagggcctctggggcggaagtgacatggagatgaggacagcctgcaggctgtggggccttggaagcacacctgtgtctcctc

SEQ ID NO: 47788 - DNA, 201 bp, Homo sapiens
cctgtttagatctcagcctcagccctcagacctccctcagcacaccccaatcccgtagagttttcctcccctccccatctcccttttttgttttttttttkttgttgttgttattttggttgctataaaaaggagctgacaggcgaggtgtcactggccattaagcctcctctgtgggtggcaggtggctctgccttgtgc

SEQ ID NO: 47789 - DNA, 201 bp, Homo sapiens
ctcggttcttgttcctgttctgccatggctctgtgtcactagggtcaaacgagcctttctgggccccctttcttcctgtgcaagacacaagacccatttgygaggctataggtctttgattgtgtgattgtgtttgattgtcactctctgtccctgcagccagtcacagcaccagccagctctcccagaaactgaagacca

SEQ ID NO: 47790 - DNA, 201 bp, Homo sapiens
gaagcgccgcctccgaggggcacccgggggtcctggctggcttattggggtgtcctttggttacttactcagggcactgttttaaagtcaggactgttggygacgcaggtgttgtacttttgtatcagcgctgtaacagaacagttgacatgccaaagtaataaagtaataaagccacagtgctgcctgtttcacagctgt

SEQ ID NO: 47791 - DNA, 201 bp, Homo sapiens
tgtcatattccaaattatatagttaatgttaactatagtaaggaagcttgtaattagaagtcatcattatcttcttcactgtttttcttttgtttcaactygctgtatcagaaacactgttttttcttgctgtttttagcttattgcaggagtgaccaggacactacctcctagaagtaatgcccacagaaagcgcaagtt

SEQ ID NO: 47792 - DNA, 201 bp, Homo sapiens
tgggacgggagccgcacacatgagcagtgctgataggtgcctggcccattgaaaggccgcgtgtgtgttgaatggatggagatgagtgtcgctttcccgawcgtctcagagttgattgcagctgtaagttctgatatgatagggtttcttaggttagatagatggagaggaaaatctactatttgtacattttctctgaac

SEQ ID NO: 47793 - DNA, 201 bp, Homo sapiens
cccctacccatatgcctgaaagcttggtggttgtctttttaattagattacattagagtactttaacaaaatgttgtatgtattcatggggtgtgagtgcrgttttgctaccttgatgtactccactcaggtgaggccagggccttcagcatacccctcattggagtgatgctcgttgcacgcaccaggcaacctcccgtc

SEQ ID NO: 47794 - DNA, 201 bp, Homo sapiens
ggggaaggtggagagccagccgtctaccaggtggtgactttgcggacagcagggccctgtggaagggcctctggggcggaagtgacatggagatgaggacrgcctgcaggctgtggggccttggaagcacacctgtgtctcctctcagtgttacatcccctacccatatgcctgaaagcttggtggttgtctttttaatta

SEQ ID NO: 47795 - DNA, 201 bp, Homo sapiens
catgtggtctctaaatcagtttgctttccactttcagatctgctttctttttggtgatggcttttgagtccttgtctgtggggaaggtggagagccagccrtctaccaggtggtgactttgcggacagcagggccctgtggaagggcctctggggcggaagtgacatggagatgaggacagcctgcaggctgtggggcctt

SEQ ID NO: 47796 - DNA, 201 bp, Homo sapiens
tcacagtcagcatgcaggtgtcagcttgggtgtgggcctctgggtgctgtccggccagctggccgcctgggaggtgcgtgttggaaaggacgcatgtggtmtctaaatcagtttgctttccactttcagatctgctttctttttggtgatggcttttgagtccttgtctgtggggaaggtggagagccagccgtctaccag

SEQ ID NO: 47797 - DNA, 201 bp, Homo sapiens
atgagcttccctgagaccgggtgtctcttcagtccccttcctggcatgagagtgcactgtttgaagttaattattgagtttttactcctcgatacacatcmaaatagtggagcagaaaaatttcatgaaattagagtgactaaaatatgcttcacaacccttaacacagccataaattgcttgtcctggggaagcttttca

SEQ ID NO: 47798 - DNA, 201 bp, Homo sapiens
caaactgttggttaagtaagtggcttagtttgatgtgaaaggattgattgtgatttcatgttttattcatggaggtttaattgatagaaccccgggaacartggtttaggctcctttgtcctctaatgcagtttcagtattccatgaaaacttaaactaacttagcctaaaaccaggttggatcagtgagatttgtaagaa

SEQ ID NO: 47799 - DNA, 201 bp, Homo sapiens; identical to SEQ ID NO: 19419

SEQ ID NO: 47800 - DNA, 201 bp, Homo sapiens; identical to SEQ ID NO: 21773

SEQ ID NO: 47801 - DNA, 201 bp, Homo sapiens; identical to SEQ ID NO: 22388

SEQ ID NO: 47802 - DNA, 201 bp, Homo sapiens; identical to SEQ ID NO: 18950

SEQ ID NO: 47803 - DNA, 201 bp, Homo sapiens; identical to SEQ ID NO: 18952

SEQ ID NO: 47804 - DNA, 201 bp, Homo sapiens; identical to SEQ ID NO: 22226

SEQ ID NO: 47805 - DNA, 201 bp, Homo sapiens; identical to SEQ ID NO: 21832

SEQ ID NO: 47806 - DNA, 201 bp, Homo sapiens; identical to SEQ ID NO: 23022

SEQ ID NO: 47807 - DNA, 201 bp, Homo sapiens; identical to SEQ ID NO: 19798

SEQ ID NO: 47808 - DNA, 201 bp, Homo sapiens; identical to SEQ ID NO: 19800

SEQ ID NO: 47809 - DNA, 201 bp, Homo sapiens; identical to SEQ ID NO: 19368

SEQ ID NO: 47810 - DNA, 201 bp, Homo sapiens; identical to SEQ ID NO: 21918

SEQ ID NO: 47811 - DNA, 201 bp, Homo sapiens; identical to SEQ ID NO: 19933

SEQ ID NO: 47812 - DNA, 201 bp, Homo sapiens; identical to SEQ ID NO: 21421

SEQ ID NO: 47813 - DNA, 201 bp, Homo sapiens; identical to SEQ ID NO: 19127

SEQ ID NO: 47814 - DNA, 201 bp, Homo sapiens; identical to SEQ ID NO: 19128

SEQ ID NO: 47815 - DNA, 201 bp, Homo sapiens; identical to SEQ ID NO: 19943

SEQ ID NO: 47816 - DNA, 201 bp, Homo sapiens; identical to SEQ ID NO: 19944

SEQ ID NO: 47817 - DNA, 201 bp, Homo sapiens; identical to SEQ ID NO: 19945

SEQ ID NO: 47818 - DNA, 201 bp, Homo sapiens; identical to SEQ ID NO: 19946

SEQ ID NO: 47819 - DNA, 201 bp, Homo sapiens; identical to SEQ ID NO: 22792

SEQ ID NO: 47820 - DNA, 201 bp, Homo sapiens; identical to SEQ ID NO: 18252

SEQ ID NO: 47821 - DNA, 201 bp, Homo sapiens; identical to SEQ ID NO: 18253

SEQ ID NO: 47822 - DNA, 201 bp, Homo sapiens; identical to SEQ ID NO: 18254

SEQ ID NO: 47823 - DNA, 201 bp, Homo sapiens; identical to SEQ ID NO: 18255

SEQ ID NO: 47824 - DNA, 201 bp, Homo sapiens; identical to SEQ ID NO: 21788

SEQ ID NO: 47825 - DNA, 201 bp, Homo sapiens; identical to SEQ ID NO: 22908

SEQ ID NO: 47826 - DNA, 201 bp, Homo sapiens; identical to SEQ ID NO: 19824

SEQ ID NO: 47827 - DNA, 201 bp, Homo sapiens; identical to SEQ ID NO: 19827

SEQ ID NO: 47828 - DNA, 201 bp, Homo sapiens; identical to SEQ ID NO: 19830

SEQ ID NO: 47829 - DNA, 201 bp, Homo sapiens; identical to SEQ ID NO: 19833

SEQ ID NO: 47830 - DNA, 201 bp, Homo sapiens; identical to SEQ ID NO: 18692

SEQ ID NO: 47831 - DNA, 201 bp, Homo sapiens; identical to SEQ ID NO: 19836

SEQ ID NO: 47832 - DNA, 201 bp, Homo sapiens; identical to SEQ ID NO: 18497

SEQ ID NO: 47833 - DNA, 201 bp, Homo sapiens; identical to SEQ ID NO: 19839

SEQ ID NO: 47834 - DNA, 201 bp, Homo sapiens; identical to SEQ ID NO: 19841

SEQ ID NO: 47835 - DNA, 201 bp, Homo sapiens; identical to SEQ ID NO: 22280

SEQ ID NO: 47836 - DNA, 201 bp, Homo sapiens; identical to SEQ ID NO: 19843

SEQ ID NO: 47837 - DNA, 201 bp, Homo sapiens; identical to SEQ ID NO: 20304

SEQ ID NO: 47838 - DNA, 201 bp, Homo sapiens; identical to SEQ ID NO: 19844

SEQ ID NO: 47839 - DNA, 201 bp, Homo sapiens; identical to SEQ ID NO: 19845

SEQ ID NO: 47840 - DNA, 201 bp, Homo sapiens; identical to SEQ ID NO: 19669

SEQ ID NO: 47841 - DNA, 201 bp, Homo sapiens; identical to SEQ ID NO: 22715

SEQ ID NO: 47842 - DNA, 201 bp, Homo sapiens; identical to SEQ ID NO: 19670

SEQ ID NO: 47843 - DNA, 201 bp, Homo sapiens; identical to SEQ ID NO: 19000

SEQ ID NO: 47844 - DNA, 201 bp, Homo sapiens; identical to SEQ ID NO: 21207

SEQ ID NO: 47845 - DNA, 201 bp, Homo sapiens; identical to SEQ ID NO: 19004

SEQ ID NO: 47846 - DNA, 201 bp, Homo sapiens; identical to SEQ ID NO: 20554

SEQ ID NO: 47847 - DNA, 201 bp, Homo sapiens; identical to SEQ ID NO: 19009

SEQ ID NO: 47848 - DNA, 201 bp, Homo sapiens; identical to SEQ ID NO: 19012

SEQ ID NO: 47849 - DNA, 201 bp, Homo sapiens; identical to SEQ ID NO: 19309

SEQ ID NO: 47850 - DNA, 201 bp, Homo sapiens; identical to SEQ ID NO: 19015

SEQ ID NO: 47851 - DNA, 201 bp, Homo sapiens; identical to SEQ ID NO: 18175

SEQ ID NO: 47852 - DNA, 201 bp, Homo sapiens; identical to SEQ ID NO: 19019

SEQ ID NO: 47853 - DNA, 201 bp, Homo sapiens; identical to SEQ ID NO: 18176

SEQ ID NO: 47854 - DNA, 201 bp, Homo sapiens; identical to SEQ ID NO: 18177

SEQ ID NO: 47855 - DNA, 201 bp, Homo sapiens; identical to SEQ ID NO: 22197

SEQ ID NO: 47856 - DNA, 201 bp, Homo sapiens; identical to SEQ ID NO: 19200

SEQ ID NO: 47857 - DNA, 201 bp, Homo sapiens; identical to SEQ ID NO: 19141

SEQ ID NO: 47858 - DNA, 201 bp, Homo sapiens; identical to SEQ ID NO: 19429

SEQ ID NO: 47859 - DNA, 201 bp, Homo sapiens; identical to SEQ ID NO: 19143

SEQ ID NO: 47860 - DNA, 201 bp, Homo sapiens; identical to SEQ ID NO: 22666

SEQ ID NO: 47861 - DNA, 201 bp, Homo sapiens; identical to SEQ ID NO: 19857

SEQ ID NO: 47862 - DNA, 201 bp, Homo sapiens; identical to SEQ ID NO: 21194

SEQ ID NO: 47863 - DNA, 201 bp, Homo sapiens; identical to SEQ ID NO: 19860

SEQ ID NO: 47864 - DNA, 201 bp, Homo sapiens; identical to SEQ ID NO: 19863

SEQ ID NO: 47865 - DNA, 201 bp, Homo sapiens; identical to SEQ ID NO: 20322

SEQ ID NO: 47866 - DNA, 201 bp, Homo sapiens; identical to SEQ ID NO: 20323

SEQ ID NO: 47867 - DNA, 201 bp, Homo sapiens; identical to SEQ ID NO: 20816

SEQ ID NO: 47868 - DNA, 201 bp, Homo sapiens; identical to SEQ ID NO: 21812

SEQ ID NO: 47869 - DNA, 201 bp, Homo sapiens; identical to SEQ ID NO: 23069

SEQ ID NO: 47870 - DNA, 201 bp, Homo sapiens; identical to SEQ ID NO: 22349

SEQ ID NO: 47871 - DNA, 201 bp, Homo sapiens; identical to SEQ ID NO: 20185

SEQ ID NO: 47872 - DNA, 201 bp, Homo sapiens; identical to SEQ ID NO: 19409

SEQ ID NO: 47873 - DNA, 201 bp, Homo sapiens; identical to SEQ ID NO: 20325

SEQ ID NO: 47874 - DNA, 201 bp, Homo sapiens; identical to SEQ ID NO: 18204

SEQ ID NO: 47875 - DNA, 201 bp, Homo sapiens; identical to SEQ ID NO: 22350

SEQ ID NO: 47876 - DNA, 201 bp, Homo sapiens; identical to SEQ ID NO: 19035

SEQ ID NO: 47877 - DNA, 201 bp, Homo sapiens; identical to SEQ ID NO: 22372

SEQ ID NO: 47878 - DNA, 201 bp, Homo sapiens; identical to SEQ ID NO: 18731

SEQ ID NO: 47879 - DNA, 201 bp, Homo sapiens; identical to SEQ ID NO: 22351

SEQ ID NO: 47880 - DNA, 201 bp, Homo sapiens; identical to SEQ ID NO: 19039

SEQ ID NO: 47881 - DNA, 201 bp, Homo sapiens; identical to SEQ ID NO: 19043

SEQ ID NO: 47882 - DNA, 201 bp, Homo sapiens; identical to SEQ ID NO: 19046

SEQ ID NO: 47883 - DNA, 201 bp, Homo sapiens; identical to SEQ ID NO: 19050

SEQ ID NO: 47884 - DNA, 201 bp, Homo sapiens; identical to SEQ ID NO: 19054

SEQ ID NO: 47885 - DNA, 201 bp, Homo sapiens; identical to SEQ ID NO: 19058

SEQ ID NO: 47886 - DNA, 201 bp, Homo sapiens; identical to SEQ ID NO: 18735

SEQ ID NO: 47887 - DNA, 201 bp, Homo sapiens; identical to SEQ ID NO: 21755

SEQ ID NO: 47888 - DNA, 201 bp, Homo sapiens; identical to SEQ ID NO: 18738

SEQ ID NO: 47889 - DNA, 201 bp, Homo sapiens; identical to SEQ ID NO: 19148

SEQ ID NO: 47890 - DNA, 201 bp, Homo sapiens; identical to SEQ ID NO: 18208

SEQ ID NO: 47891 - DNA, 201 bp, Homo sapiens; identical to SEQ ID NO: 21760

SEQ ID NO: 47892 - DNA, 201 bp, Homo sapiens; identical to SEQ ID NO: 22600

SEQ ID NO: 47893 - DNA, 201 bp, Homo sapiens; identical to SEQ ID NO: 21761

SEQ ID NO: 47894 - DNA, 201 bp, Homo sapiens; identical to SEQ ID NO: 18910

SEQ ID NO: 47895 - DNA, 201 bp, Homo sapiens; identical to SEQ ID NO: 18913

SEQ ID NO: 47896 - DNA, 201 bp, Homo sapiens; identical to SEQ ID NO: 20964

SEQ ID NO: 47897 - DNA, 201 bp, Homo sapiens; identical to SEQ ID NO: 18915

SEQ ID NO: 47898 - DNA, 201 bp, Homo sapiens; identical to SEQ ID NO: 19594

SEQ ID NO: 47899 - DNA, 201 bp, Homo sapiens; identical to SEQ ID NO: 22308

SEQ ID NO: 47900 - DNA, 201 bp, Homo sapiens; identical to SEQ ID NO: 20159

SEQ ID NO: 47901 - DNA, 201 bp, Homo sapiens; identical to SEQ ID NO: 22978

SEQ ID NO: 47902 - DNA, 201 bp, Homo sapiens; identical to SEQ ID NO: 22440

SEQ ID NO: 47903 - DNA, 201 bp, Homo sapiens; identical to SEQ ID NO: 22442

SEQ ID NO: 47904 - DNA, 201 bp, Homo sapiens; identical to SEQ ID NO: 19245

SEQ ID NO: 47905 - DNA, 201 bp, Homo sapiens; identical to SEQ ID NO: 18771

SEQ ID NO: 47906 - DNA, 201 bp, Homo sapiens; identical to SEQ ID NO: 21369

SEQ ID NO: 47907 - DNA, 201 bp, Homo sapiens; identical to SEQ ID NO: 22356

SEQ ID NO: 47908 - DNA, 201 bp, Homo sapiens; identical to SEQ ID NO: 23116

SEQ ID NO: 47909 - DNA, 201 bp, Homo sapiens; identical to SEQ ID NO: 19903

SEQ ID NO: 47910 - DNA, 201 bp, Homo sapiens; identical to SEQ ID NO: 22357

SEQ ID NO: 47911 - DNA, 201 bp, Homo sapiens; identical to SEQ ID NO: 23078

SEQ ID NO: 47912 - DNA, 201 bp, Homo sapiens; identical to SEQ ID NO: 19265

SEQ ID NO: 47913 - DNA, 201 bp, Homo sapiens; identical to SEQ ID NO: 21979

SEQ ID NO: 47914 - DNA, 201 bp, Homo sapiens; identical to SEQ ID NO: 21910

SEQ ID NO: 47915 - DNA, 201 bp, Homo sapiens; identical to SEQ ID NO: 23192

SEQ ID NO: 47916 - DNA, 201 bp, Homo sapiens; identical to SEQ ID NO: 21770

SEQ ID NO: 47917 - DNA, 201 bp, Homo sapiens; identical to SEQ ID NO: 22616

SEQ ID NO: 47918 - DNA, 201 bp, Homo sapiens; identical to SEQ ID NO: 20048

SEQ ID NO: 47919 - DNA, 201 bp, Homo sapiens; identical to SEQ ID NO: 22701

SEQ ID NO: 47920 - DNA, 201 bp, Homo sapiens; identical to SEQ ID NO: 18943

SEQ ID NO: 47921 - DNA, 201 bp, Homo sapiens; identical to SEQ ID NO: 18945

SEQ ID NO: 47922 - DNA, 201 bp, Homo sapiens; identical to SEQ ID NO: 18947

SEQ ID NO: 47923 - DNA, 201 bp, Homo sapiens; identical to SEQ ID NO: 18948

SEQ ID NO: 47924 - DNA, 201 bp, Homo sapiens; identical to SEQ ID NO: 19154

SEQ ID NO: 47925 - DNA, 201 bp, Homo sapiens; identical to SEQ ID NO: 19270

SEQ ID NO: 47926 - DNA, 201 bp, Homo sapiens
atagaaattgagattgttcaaatttggcctaaaaattgaatgatggtacatttaaagaaaaaaaaatctattcttgaacatgcaattaccatttaaagaaragcttttttaccataagcatcaaagaacattagacactcccctgcataagcagtagtttaggtgcttaatttacataattcacatcaagtatagggaact

SEQ ID NO: 47927 - DNA, 201 bp, Homo sapiens
gtggtagtcatccttggaccctacattgggcagtttctcacatcttctctctctgcctggtataatgggttaagcaattccagagtcaggcaacctggacmgaaatcctagccaaatgacttctcttttacctctctgtgccactgttttcttatcgatgatggaattaattatatttcctactttgtaaaggttgttaca

SEQ ID NO: 47928 - DNA, 201 bp, Homo sapiens
gttatatgtttttaaatctgtgatttaaaatgtgaagaaaataaaggttttatacaaaggtgctgataaacaaaataagttcttatttaaaacaaaataaytaatgttaatgtagtgtttaaccaggaaatgaagtatttaaacaaagacagcattatttgagtgtaaagaaattggaattactcatacatgcagggcccc

SEQ ID NO: 47929 - DNA, 201 bp, Homo sapiens
ctctgtgttgggaactgtttcagttatctagttatctattgctgcataataagccaccccaaaacagcagcttgaaacaatcatggtcatttattttgctyacagatctgggggtgactggacttggcaaagcagttcttgctcagggtctcctgcagctgtggtctgacagcagctgggctagagtcataatctcaaaga

SEQ ID NO: 47930 - DNA, 201 bp, Homo sapiens
tggccaaaaaaaaatgtttttaattaacagtgctctgtgttgggaactgtttcagttatctagttatctattgctgcataataagccaccccaaaacagcrgcttgaaacaatcatggtcatttattttgctcacagatctgggggtgactggacttggcaaagcagttcttgctcagggtctcctgcagctgtggtctga

SEQ ID NO: 47931 - DNA, 201 bp, Homo sapiens
taggtaataggtaatggagatttattatattcatactattctatttctacatatttttgtttttcataatactttttaaaaagaatgacaagaagaatagwttaaaaacagattaaatccttgatattagtgctttgtaacctgtttaaatgtaaattaactcttgaccagttttgttattaaaccattatttatactttt

SEQ ID NO: 47932 - DNA, 201 bp, Homo sapiens
gttcaagctcgcagcgtgacctcactgaatgtggagctggaaagaaatgcacacagcacacttagtatttctagtatttccaccatacagatagaatagawgtatataacttgaagagcatagtaaaatgtaaaataattaggaataaatataattagaaaataatgagtttttgactatttccctttgtctttaataaat

SEQ ID NO: 47933 - DNA, 201 bp, Homo sapiens
taataacaataaatatcaacaaattttatcttcctgttaaaagacagactaaaatactggaaggaaaagaactataaagtataaaacatgattgaaagatraaaggatatctgaataaatgtatagtttatgttaatgggtcaatattaattaatgattatcagttcatctcctaaaaagtctataaatttaatggaattc

SEQ ID NO: 47934 - DNA, 201 bp, Homo sapiens
acaatagcctagttcaagctcgcagcgtgacctcactgaatgtggagctggaaagaaatgcacacagcacacttagtatttctagtatttccaccatacasatagaatagaagtatataacttgaagagcatagtaaaatgtaaaataattaggaataaatataattagaaaataatgagtttttgactatttccctttgt

SEQ ID NO: 47935 - DNA, 201 bp, Homo sapiens
tttgtaactctctcttcttttatcatgatgtcttacatttatttttgcatctaagtgaaggatagagcgtggcaaaagtccagataacctataatgacttycacattactttaaaaaatccagttaaccaacgtactgtactgacaacatattgcttaatcataatcagttttaatccaacaccaaactaagcataatatt

SEQ ID NO: 47936 - DNA, 201 bp, Homo sapiens
ttttagcaacaaatgtatttttcttaaaatttgtgtaagacaaaaattacatattattttggcagtgatcatgcatgacctttgctacctgatggctgccrtggcagaaaaactcatgtaggaagtttatcacagggagaatatacacaggtaccttggttatcagtagactttgcactacttgtaaccatttagtctact

SEQ ID NO: 47937 - DNA, 201 bp, Homo sapiens
tatgaaaaacataaagtctttcaaaggaatttccactgtctttttctctccttcatggttttaaacatggggacctttggttatagaattcaggatttggkgctgttgttgtttttttccccatgggtttgactctttctccttgtatggaattttcatatttttctttaaggtttagtcacttaaccattgttttactaa

SEQ ID NO: 47938 - DNA, 201 bp, Homo sapiens
gaaaattccaagtttcatagcttttgatgagtattatgaaaaacataaagtctttcaaaggaatttccactgtctttttctctccttcatggttttaaacrtggggacctttggttatagaattcaggatttggtgctgttgttgtttttttccccatgggtttgactctttctccttgtatggaattttcatatttttct

SEQ ID NO: 47939 - DNA, 201 bp, Homo sapiens
ctgctagtttataaactggcattgacgaaaatcatttgaatctcttctggctgagataatttgccaatgcaaaatacagttgtcattaatcctgcacattrgaaattattagaaacatattactttttaactttaaatctcaaagagattttgagttattgaattcttaaggctttcttagcttgaactgataactatgca

SEQ ID NO: 47940 - DNA, 201 bp, Homo sapiens
taccatttatttgtgctgggaatattcaatattctggttctacctatttgaaactgtgtattactgttaactatagccatcctacagcgttatagaacatktgaacttctttttatttatttattttttttgatggagtctcgctctgttgccaggctggagtgcagtggtgcggtctcggctcactgcaacctccgcctc

SEQ ID NO: 47941 - DNA, 201 bp, Homo sapiens
tctactttaccctaatttttagcctcttaatttctggaaggactctaatttctattccaaatttctatgaattctaattgtaaattatcggaacagagttktatttatatgacctggtactagacttcttaatataactgttacactgtccttgtctttcctactcaaagacagtatcatctgaagttgcctaataaggtc

SEQ ID NO: 47942 - DNA, 201 bp, Homo sapiens
taatttttagcctcttaatttctggaaggactctaatttctattccaaatttctatgaattctaattgtaaattatcggaacagagttttatttatatgayctggtactagacttcttaatataactgttacactgtccttgtctttcctactcaaagacagtatcatctgaagttgcctaataaggtcatgtgagtcaag

SEQ ID NO: 47943 - DNA, 201 bp, Homo sapiens
atagccatcctacagcgttatagaacatttgaacttctttttatttatttattttttttgatggagtctcgctctgttgccaggctggagtgcagtggtgyggtctcggctcactgcaacctccgcctcccaagttcaagtgattcttctgcctccgcctcccaaatagctgggactacaggcacccgccaccatgcccag

SEQ ID NO: 47944 - DNA, 201 bp, Homo sapiens
ttttgatggagtctcgctctgttgccaggctggagtgcagtggtgcggtctcggctcactgcaacctccgcctcccaagttcaagtgattcttctgcctcygcctcccaaatagctgggactacaggcacccgccaccatgcccagctaatttttgcatttttagtagagacagggtttcaccacgttggccaggatggtc

SEQ ID NO: 47945 - DNA, 201 bp, Homo sapiens
ataaacattctggtatggtcatccataggattatgaaaaagaaatactgaattgttaaatttggatgttagaaaggaaagataggaaaaacaatgagtacrgaaatcctcaccatcaatttggatgggttagctgtctcaggcataaaatgtaacacaaaattcagatttatgtatcctggaaatgttctggggttccatc

SEQ ID NO: 47946 - DNA, 201 bp, Homo sapiens
ctggagtgcagtggtgcggtctcggctcactgcaacctccgcctcccaagttcaagtgattcttctgcctccgcctcccaaatagctgggactacaggcayccgccaccatgcccagctaatttttgcatttttagtagagacagggtttcaccacgttggccaggatggtctcgatctcttgacctcgtgatccacccac

SEQ ID NO: 47947 - DNA, 201 bp, Homo sapiens
tctgttctacattggttttctttaatctttctcatgttttaataacatggaaaacttgtattgtttggaattatttatttattttctgacacagggtctcrctgtgttgcccaggctaaagtacagtggcacagtcatgactcactacagccaccatctcctgggctcaagccatccttctgactcaaactgccaagtagc

SEQ ID NO: 47948 - DNA, 201 bp, Homo sapiens
tttaagtgaggcagtgctgcaggtgtattagaaagatttatctgacagtggacacagaggaatgtgttgggaagctgttcagtaaatccgatgagatggcrtgagcccaaatgtgttattggccacgagtttgaaaataaaacaagaggatggatgcatgtattctcaccaagggagaaccaccaggactgggttacagat

SEQ ID NO: 47949 - DNA, 201 bp, Homo sapiens
gaaaatttcctggaggaaatgagttatgagtttcacctggaatagtgcgaggcaaagcttaatgataaagggcatggagcacattccagatgcaaaaagartaactgggggaaatgcaaaccatacaaagaactgtacacagatgggtcaaagagccggcgctgactggtgtccttttaccaaaacatgctgtttttgaca

SEQ ID NO: 47950 - DNA, 201 bp, Homo sapiens
ctggctttctgtgacctcaggagtctgtgttcactgccaccaaggccacctggagtttcttgctgctttcagttatctaatactgtgtaacaaaccacccrataacttagtgacttaaaataataatcattttattatttcccacaaatctgttcacatgaaaattctgttctacattggttttctttaatctttctcatg

SEQ ID NO: 47951 - DNA, 201 bp, Homo sapiens
ccccatccagtgatagaagtgaagaatctcatgttggatgtaaatctgatggtactagattgtttgggaatatggaagttaatactttgattgtatccaarttctaaagggaattacaaagtgaattacaataattagcttgaatatatcaaatataactagatggcttactatgggattatatctagtgtcagcagtgtg

SEQ ID NO: 47952 - DNA, 201 bp, Homo sapiens
aattctaacatgtctaacttaggtacgacctcagctctttactatgtctctctgggcacgttcaaggtacaggatgccacaggtatcatcagagtagcatygtgcagccctgcagttctctcctctagctattcctcatgccatattgctgccacgtttctctatgttttattataccccagtgctcctccccagccattc

SEQ ID NO: 47953 - DNA, 201 bp, Homo sapiens
caactttgaaattgtttttatgaaattataacaacttttagaattcacatttttccatttttatgcataaggtaaaacttactaatatttctatgtcataytacttctagtttacagaattgagagcttcataaaatgcaaaacacatcattatcctaattcattatcctaattagagttggtataagtgacatcactact

SEQ ID NO: 47954 - DNA, 201 bp, Homo sapiens
ttgtttagagaacttcggaatattgacatcatcgaactgttaatattggggatctgctatgagctatacattgtatgaaatacaggttttctttgggggasagttttttggtatagaggaaagagcacaggtcttcaaattagaagttctatgttttggctttaacacttgctatgtgcttaattcataagatcattaatc

SEQ ID NO: 47955 - DNA, 201 bp, Homo sapiens
agagctcactgcaacctccgcttcccaggtttaagcgattctcctgcctcagcctcccaagtagctgggattacaggcgcgggccaccatgcccgactaatttttttttttgtatctttagtagagacagggtttcaccatgttggtcaggctggtctcgaactcctgacctcaaatgatccgcccaccttggcctcccaa

SEQ ID NO: 47956 - DNA, 201 bp, Homo sapiens
tgtctaaccgtatgaccttaacctttaaaagttatttctaggaggataggggtgtgattgactcttttcagatggttcatatagttctagattttccataraaccctagaatttgcttactaggtacaattcatttttcttaaataatcagatgaaaatgagacagtacaaaaggataaagtttccatctattctatatta

SEQ ID NO: 47957 - DNA, 201 bp, Homo sapiens
tttattaaaaatatatttttactttttctgagcggatttaatttacacacaaatttacagttatttgtttattaggttaaatttttatgagctgtttaaamcattgttgtgtttgaacagtattctcattttttttacttttaggctggtgtttggaatgctttatcctgcatattattcatacaaagctgtgaaaacaaa

SEQ ID NO: 47958 - DNA, 201 bp, Homo sapiens
ccctcccagcaaccatattgccttccatcaaggctgctagagaggcctggtgcagtggctcacacctgtaatcccagcactttgggaggctgaagcaggcygatctcttgagcccaggagtttgacaccaacctgggcaacatggtaaaaccccatctctacaaaaaacacaaaaattagcagggcatggtggtgtgtgcc

SEQ ID NO: 47959 - DNA, 201 bp, Homo sapiens
attttcatctgttgtttcatgagtatttttattatttccaggttcgatggatgatgtactggattgtttttgctctctatactgtgattgaaacagtagcygatcaaacagttgcttggtaagttttactattgagaaggggccagactacagactcataatcaggtgtcctaagttcttatcctgctcttgctattaact

SEQ ID NO: 47960 - DNA, 201 bp, Homo sapiens
gctgggattactagcatgagccactgcgccctgatgaatgtcatttttatattcatctttgctataatatagcaagagaatgtaccatttgttagggtatrtgtttgttaagtttatgataggattaatgaaaaacatcctcatttttaaatccttatggaagtttgaaggcagtcacaattatatgagtgatatttttct

SEQ ID NO: 47961 - DNA, 201 bp, Homo sapiens
caaatgtgtttctcaatctaatttcagttttcttttagatattttattcttggttgcatagagagtttatagttttaatatagttcgccttctttgttttytattttgtgatttcttgatcatttctaaatgtaaaattagatactacagatatttgataagtactactttcctatgtagaagtggattaatttggagact

SEQ ID NO: 47962 - DNA, 201 bp, Homo sapiens
attatggttttggatttctttgcatgttgtaatttgtgtgatttattttaaatactttagcataattgattttggtgtgtttggtatggaaagaaaatagycttctgtgttccttagttgcttcatgtataaaatgggggtaatatacctgtgagaatatttaaaagcacagtgcttgcttgcatatagtaggagcccaat

SEQ ID NO: 47963 - DNA, 201 bp, Homo sapiens
atgcataacctctttattaagagttggatgcctcagccttgcagctaaaacctgtggaatggagaatgaggtcagaaaaataccactacaaacactaacarctcatattttaaaagaaatatcaccagggaaggagaacactgagacaattctgtacaaagaatgcctattttcttctaatgcttcaaaatctattttgac

SEQ ID NO: 47964 - DNA, 201 bp, Homo sapiens
tgaatccaaagaagaatgtccaatttcttatttacccaagggatttttgaggttctggaggtacatacatagatagccacttaaaagctttcttccccccmccacccccattgatttcttgtctattcagataacagttgttttcttgtctattcatttgatacatgggatattgctataaaaagaaaatgtctaaaaaat

SEQ ID NO: 47965 - DNA, 201 bp, Homo sapiens
gccaggcatggtggcacttgaacccaggaggcggaggttgcagtgagccaagatcatgccactgcgttccagcctgggcaacagagcaagactctgtgtcaaaaaaaataaaaaatagttttaaaaaagaggctggagtgttgtattttgtattgatttttgagagtgtatatagtgtgtgtgtgtgtgaattgtgactaa

SEQ ID NO: 47966 - DNA, 201 bp, Homo sapiens
taagatgttaataataggggaaactgggtatgtagtatatgggaactatctgtactatctttccaacttttctgtaaaatattctcaaaaaatggccattkaaaacaacagaaaacaaatagacaaagttatcgtatactcatcaaaaggccagtaagcacttgaaaaaatttcaaatttgctggtattcagaaacacaca

SEQ ID NO: 47967 - DNA, 201 bp, Homo sapiens
gaatattttttgcaatgagataaaaagttttagaagtcaattttttcaaaaaataaagtttttattttcatgaaactgctatctaaatatttaaatcatcttttttttttttttttgagacagagtcttgctctgtcacccaggctggagtgcagtggcacgatcttggctcactgcaagctccgtcccccgggttcacgc

SEQ ID NO: 47968 - DNA, 201 bp, Homo sapiens
atttccaatctaatttcactctgacaaaaattttgaacattatttgcttgcacccagtgcaaggctaagtcctaaacttagccatctaatttaaaccgactttttttttttaattatactttaagttctcggatacatgtgcggaacgtgtaggtttgttacatagatatacatgtgtgacatggtggtttgcacccatca

SEQ ID NO: 47969 - DNA, 201 bp, Homo sapiens
taagagaaatcaacaatgtagtaataaactaattataaaaaattgaaatgatagtaatatatatcataatttatattcttgactataatagctggttttcrttgttgttgttgttgttgttgttttgaggtgggggggtggtattgctctgtcgcccaggctggagtgcagtggtgtggtcaaactcaccacagcctcaac

SEQ ID NO: 47970 - DNA, 201 bp, Homo sapiens
ctgtctcaaaaaaaaaaaaaaaaaaaaaagaccccacccattacccttcattattaaaataagcattatctcacaggaatacttttctgtaaaaatgccaygaaaacaaaaatgtgtctatttcatatatctatttttctggctctcttgtgatttattcttttaatttatacgtttaacaccttaaaatcacgtgtttta

SEQ ID NO: 47971 - DNA, 201 bp, Homo sapiens
tgccagatgaaggacagatgaagaaaagtactgttagttgtattaaccatgtctttgaatttctctggcagcctttttttggtgaatttctttagcagatrtaagaaatcagttaccacagacttttgagctttacaggtaaaattgttgaaatctaattaactttaaatgatcccgattaggtcaaaaatccgaacatct

SEQ ID NO: 47972 - DNA, 201 bp, Homo sapiens
acaatggaaaaagaaggttgtactatttttcctaaaatctagggaagcagaatggtataacaaacattgaatgctacagcaattgagttaatctggatttkttttagtgctgattccaccacaaattagccacgagattttgggcaaatcatctgcattgatctaagcattaatttttctcacttgtaaaacgaagaggtg

SEQ ID NO: 47973 - DNA, 201 bp, Homo sapiens
gaagaggtgaaacatgatttctaaaaccccttatatctctaaaacagtggttctcaactagaggcaattttgtgcccctacccttaccacgggacattttmggttgtcaccactgagagggggctgctactggtatctagtcggtaaagaatggtcagggatgctgcttaatattctacaaagcacaggacgttccccaca

SEQ ID NO: 47974 - DNA, 201 bp, Homo sapiens
gtagtaatatgtataggtgttacccttctaaagagcacgttggcagaggaccttcaaaattgacccagttatttcacttctaggaaaatatcattaggaartagagattttaagtgtgaattctggagtaagagtgcctggctttgaatgcagccgacagacttacaaattatatgaccttgggttagtttcttacctttt

SEQ ID NO: 47975 - DNA, 201 bp, Homo sapiens
atgagaaaaatagtcagaaagttctgtgtagagatattctaaaaaaaacctgatctttccttgctaagtaaaaatgagaaatttaaattggaaataaactkttttgtccacaaagattatgcttattatgatgaaataattcttaagaatttctagatgttatatcttgaagtattattattttttattttttttttgttt

SEQ ID NO: 47976 - DNA, 201 bp, Homo sapiens
gcttgccctggaagtatgtaaatcttaaagaacctgaaaatattaaggtgtgaaataaagttatatgagaaaaatagtcagaaagttctgtgtagagataytctaaaaaaaacctgatctttccttgctaagtaaaaatgagaaatttaaattggaaataaacttttttgtccacaaagattatgcttattatgatgaaat

SEQ ID NO: 47977 - DNA, 201 bp, Homo sapiens
caccatgccagctaatttttggtattattggtagagacaaggtttcaccatgttggccgggctggtctcaaagtcctgacctcaggtgatctgcccacctyggcctctcaaagtgctgggattgcagacatgacccaccgcgcttgccctggaagtatgtaaatcttaaagaacctgaaaatattaaggtgtgaaataaag

SEQ ID NO: 47978 - DNA, 201 bp, Homo sapiens
ggcacagtcatagttcactgtaacctcaaatccctgggctccagcgatcttcctgcttccacctcctaagtagctagaactataagcacacaccaccacayccagctaattttttatattttgtagagatagggccttgttatgttgcccagactgttcttaaacttctggcctcaagtgatcctccttccttggtctccc

SEQ ID NO: 47979 - DNA, 201 bp, Homo sapiens
tgctaggattacaggcatgagccactgctcctagccttaaggcagagattgttaatgatgtggcttctagttggtaagtataaaatccccagcaagagaakcgtattcttcctgtgacttgttgacataagccccaaaccaatggataaggaagccaccaggcatgtactgccctctgcagcaatcaatcaattggtaaac

SEQ ID NO: 47980 - DNA, 201 bp, Homo sapiens
tccttggaccctacattgggcagtttctcacatcttctctctctgcctggtataatgggttaagcaattccagagtcaggcaacctggaccgaaatcctasccaaatgacttctcttttacctctctgtgccactgttttcttatcgatgatggaattaattatatttcctactttgtaaaggttgttacagggattaaat

SEQ ID NO: 47981 - DNA, 201 bp, Homo sapiens
gcgattctcctgcctcagcctcccgagtagctgggattacaggcacatgccaccatggcctggctaatttttgtatttttaatagagacggggtttcaccrtgttagccaggctggtctcgaactcccaacctcaggtgatctgcctgcctcggtctcccgaagtgctgggattgcaggcatcagccattgcacccagcta

SEQ ID NO: 47982 - DNA, 201 bp, Homo sapiens
aggttgagaaactgctctaaaagtatgatgagtcagaaaaaactaaaagaatatataaatatgtataagtagttttggtggtaggttacaaataatttttmcttcctttttaaaatttttctccatgttatcaatgttcttcagtaaatacgtattgctttaaactcactaaaatattttattcacctaatgcaaatgcag

SEQ ID NO: 47983 - DNA, 201 bp, Homo sapiens
tagaaaggaaagataggaaaaacaatgagtacagaaatcctcaccatcaatttggatgggttagctgtctcaggcataaaatgtaacacaaaattcagatytatgtatcctggaaatgttctggggttccatctgttttaaagttagacgtctgtctgcctcacatttaagctttagagagaaatcctatgttttaagaag

SEQ ID NO: 47984 - DNA, 201 bp, Homo sapiens
tggacccagccctcctgcccagtcagcccctgcagtattctcagtttcttacagaggcatttgggcccacctaaatccaaaacctgagaatttagtgccasctgaagttcagatggttcagaaacagttctgctcacgatgatcagtttcaatgtgtaaaatattctacagaatacttaattacctggacttttacattct

SEQ ID NO: 47985 - DNA, 201 bp, Homo sapiens
aaatagagccaaggagcaataactgaacgtttaagaagcttcagtatgcatgatttaacaactatccaaggtgatgagcctgtgggacaaagaccataccracctctaccagaagcaaaaaagaaaagtaaaccagcccccagtgaatcagcaggtgtgcttgtgtgttttaatatacggttcttttacatggaaacaggg

SEQ ID NO: 47986 - DNA, 201 bp, Homo sapiens
ctctaatcatgttactcttctgcttaaaacatttcaatactctccccgagcctccagaggcttcattgctctctgacgaagtccaaactagatagcatggkgtattaactccccagccttgttctcccactccatcaagtgctagccatacagaatcatgactctttgaggatttagcttagccaccacctcctacaaggc

SEQ ID NO: 47987 - DNA, 201 bp, Homo sapiens
catgactctttgaggatttagcttagccaccacctcctacaaggccttctctcataacccaccctttccaacccaccccatgctgattacattctcttactgtatgccctctggcaccttgtcattagcttatagtatttattacagtatcataatgcccattaccgtctgtttcccctattggactctaaattttttgag

SEQ ID NO: 47988 - DNA, 201 bp, Homo sapiens
tttcctaatgattagtgaaggatttccctgctgtgttatcatttaggatattaatgatccataaatgaaggattggaatggtagaacagcagtttgatttyttttttttttttttttttttttagtttttggggatagagcttttttgctttgtcaaccaaattggagtgcagtgtggcgtaatcacagttcactcaaact

SEQ ID NO: 47989 - DNA, 201 bp, Homo sapiens
cactgccccggccatgaatgtgattctttttttttttttgagactgaggagttttgctcttgttgcccaggctggagtgcaatggcgcaatctcggctcartgcaacctccacctcctgggttcaagcaattctcctacctcagcctcccgagtagctgggattacaggtggccaccaccatgccctgctaatttctgtat

SEQ ID NO: 47990 - DNA, 201 bp, Homo sapiens
ataaaaaggagccagaaataagccttattgctaaataattaattatgtaagcccacctaggtcctgcataagatccccctcacatacttcacaatatatakgtgtgtgtgtgtgtgtgtgtgtgtgtgtgtgtgtgtgtgtgtgtatttggctaaaaaattatactgccaaaattactgattataaatacttgactacact

SEQ ID NO: 47991 - DNA, 201 bp, Homo sapiens
gaagggatatgaaatgagggcactttcacttttcagagaggtctttgactcaagtatcaaaatgaatgtaatgaacaagaaggaaaattcaaattatatayctaatagcattacattgagggttaaatggaagtttattaactatgcagcactatacatgtaagataactatattattaatgattattaatggtcagcact

SEQ ID NO: 47992 - DNA, 201 bp, Homo sapiens
gagggagtcaaagggtgttctaaagcttctgcttgcatgtgacatgtatcatgttcttttctgctggccaaagcaagcaagtcacatggttaaagccacartcattggttgaggaagtatactgggccaacgggggaggcccactgtaacactttgtattttccttggaagtgaacagtttaggtctgcagagtgctgcaa

SEQ ID NO: 47993 - DNA, 201 bp, Homo sapiens
ggcaccttaaaccaaggctgaagaagcagctgttctcatgccagaaggcaaaagcttaaagcaagagtttgagggtaatgggtaatggagtgagggagtcraagggtgttctaaagcttctgcttgcatgtgacatgtatcatgttcttttctgctggccaaagcaagcaagtcacatggttaaagccacaatcattggtt

SEQ ID NO: 47994 - DNA, 201 bp, Homo sapiens
ttatatttttggtataggggtttggttgtggggggtctctttgtttttaagtgacagagcacagatccccaaccgtgctacatcgaagtttccaagttctytttttaagacttcatttttttctgattgcaaatgtagcctatatatgttatttaaaaatgaacgatgtagaaaatgtttaacatgaacaactgaatccag

SEQ ID NO: 47995 - DNA, 201 bp, Homo sapiens
agatgtaaaaactggaaggaataaggtagtcttcagaagtgattactttgtaattatacccatcctttaaactggttacattggatacatgtaatttacgwaatgttttcaaagtccacaatattgcaccaatttctctcttatattagttttattctggatccataaaaaatatacagtggaaagtccaattttccaagg

SEQ ID NO: 47996 - DNA, 201 bp, Homo sapiens
tttcccccttcttttcagcttcatctcttttttcttctctactagatctttctcgacagcataccaacatgctattacttctcccatcttaaaaaaaaaarctcttttaatctactatacttttcatcttatcaccccatttccctctgtctctttagagcaaaaattcctcagaagaatagtccaagccgggcacagtgg

SEQ ID NO: 47997 - DNA, 201 bp, Homo sapiens
aagacatccaaaactaggctcttgagcttccttccccatctggctcctctggcagctttcccccactctgttaatgccagctccacctactagcagctcargccaaagaccttgggatcataccatccttgattcctctctttctctagttccctacattgaatccgcaaatcttgttgactctgctttcaaaatacatcc

SEQ ID NO: 47998 - DNA, 201 bp, Homo sapiens
tcctggcctcaagcattcctaccaccttggcctcccaaagtgctgggattacagctgtgagccactgccccggccatgaatgtgattcttttttttttttkgagactgaggagttttgctcttgttgcccaggctggagtgcaatggcgcaatctcggctcaatgcaacctccacctcctgggttcaagcaattctcctac

SEQ ID NO: 47999 - DNA, 201 bp, Homo sapiens
ttggaaataaacttttttgtccacaaagattatgcttattatgatgaaataattcttaagaatttctagatgttatatcttgaagtattattattttttattttttttttgttttttagagacagggtctccctctgttgctcaggctagagtgcagtggcacagtcatagttcactgtaacctcaaatccctgggctcca

SEQ ID NO: 48000 - DNA, 201 bp, Homo sapiens
attttttatattttgtagagatagggccttgttatgttgcccagactgttcttaaacttctggcctcaagtgatcctccttccttggtctcccaaagtgayggaattacaggcgtgagccactacaaccagttttgaatattttatgtggtaaataggatgcaaatactgccttgtttcaattggtttcctataagtttaa

SEQ ID NO: 48001 - DNA, 201 bp, Homo sapiens
gagagcttcataaaatgcaaaacacatcattatcctaattcattatcctaattagagttggtataagtgacatcactacttctttttgtttttgtttttgttttttttttttgagacagagtctcactctgttgcccaggctggggtgcagtggcatgatttcagctcactgcaacctccacctcccaggttcaagcgatc

SEQ ID NO: 48002 - DNA, 201 bp, Homo sapiens
agaatatactactgttacatgtaagttctcagaactggaaatgtttgatggtgatctcttgtaagagtcaaaataagtgccctttgagttttttttttttwaatgcaccattgagtttattaaaaagtacagcttactcagaggccagaggccaagaaaggtaaagagagaactaaagccacctttcacctaaggacattt

SEQ ID NO: 48003 - DNA, 201 bp, Homo sapiens
aaagtgaagaaacgaccacaagtgtatttttagtcatctacacgtcaaatatcccaagacagattatgctaaatacatcgacttcatcttctaacatgatmtattcaggatttacacattaaaatgattatttaaattgtggcagtgatggggtttactttcatgaatttaaattgtttttatttctgtaacaattgcttc

SEQ ID NO: 48004 - DNA, 201 bp, Homo sapiens
aagaatgtaaatcatagaatcttgttttattgaaaatgttaagagatcatgaaatgaagctaactcttcatttggcattagggtaggtaaatgcatacctrttaaatgaagcatggttttcttgatagtaaatttagcctaggagtatgttcattttacagtattcactccagctttaaatatcctctaattcctttgaga

SEQ ID NO: 48005 - DNA, 201 bp, Homo sapiens
agaaaaaatcccgtaaccaagccatctgggttggataaaacagggagcttttctatttgatttctcacattttgttcctctttgtttttaatgatggagtsgggggggaatcattatgaagtaaccaaattattggataagttagtgaatcgggaatagatcttttcaactctatactgtctctaaaaaaatctgtatcag

SEQ ID NO: 48006 - DNA, 201 bp, Homo sapiens
ttccagagaataaacataagggtttccctggggaaggagggacattgacaggcttctggaatgagaaggtatcttggagtctctctcctccttaagcagaygtacagccatccttcctaactttagcacccctgtcctttttgttttgttagacagggtcttgctgtgttgcccaggatggagtgcagtggtgccatcata

SEQ ID NO: 48007 - DNA, 201 bp, Homo sapiens
tgattcacccctttccagagaataaacataagggtttccctggggaaggagggacattgacaggcttctggaatgagaaggtatcttggagtctctctccyccttaagcagatgtacagccatccttcctaactttagcacccctgtcctttttgttttgttagacagggtcttgctgtgttgcccaggatggagtgcagt

SEQ ID NO: 48008 - DNA, 201 bp, Homo sapiens
tattttgcctcttcatcttaaaaagacaccagtcacataacttcatttaactacatcttcaatgaccctgtttccaaataaggtcacgttctgagggattrgggtttaggactgtgtgttagtcagcttgtgttgccataacaaaaaccatggactgattgacttgaacaacaggaattattttttcacagttctggagac

SEQ ID NO: 48009 - DNA, 201 bp, Homo sapiens
taatttcataatcaagatgttgactgggccacactccctcagaaacctgttgaggagaatcattccttgtgaattcctagctgctgattgttgccagcacytcagtctacctccacactctacctccattgtcacataggactcgcccctcatgtctctgtgtgtctattttgcctcttcatcttaaaaagacaccagtca

SEQ ID NO: 48010 - DNA, 201 bp, Homo sapiens
tggtactagattgtttgggaatatggaagttaatactttgattgtatccaagttctaaagggaattacaaagtgaattacaataattagcttgaatatatmaaatataactagatggcttactatgggattatatctagtgtcagcagtgtggatgaacacacagcagacctgggaattcttatttacagctcagttctta

SEQ ID NO: 48011 - DNA, 201 bp, Homo sapiens
gggcgtggtggcaggcgcctgtagtcccagctactcaggaggctgaggcaggagaatggcgtgaacccgggaggcggagcttgcagtgagtggagatcgcrccactgccctccagcctgggtgacagagcaagactccgtctcaaaaaaaaaaaaaaaccttagattgcaattgaactttcacgttatctttaagtcagtg

SEQ ID NO: 48012 - DNA, 201 bp, Homo sapiens
tgaggcaggagaatggcgtgaacccgggaggcggagcttgcagtgagtggagatcgcaccactgccctccagcctgggtgacagagcaagactccgtctcaaaaaaaaaaaaaaaccttagattgcaattgaactttcacgttatctttaagtcagtgggcctaatggtaagttcaaattttacacatcctgtgcttaagg

SEQ ID NO: 48013 - DNA, 201 bp, Homo sapiens
ttgtttgtttaatattagctatcctattttagtttacctctagtctcattgagttgtttttagtcccttagtctaatagtacactgtaattaatttttttkttgttgtttagaagcatgattctgaaagccatgaaataaggggaatttggctaactaattcttgcataagtgtggtcatattacatttaagtaatatgta

SEQ ID NO: 48014 - DNA, 201 bp, Homo sapiens
ttaaatcatcttttttttttttttttgagacagagtcttgctctgtcacccaggctggagtgcagtggcacgatcttggctcactgcaagctccgtccccygggttcacgccattctcctgcctcagcctccccagcagctgggactacaggcacacccgccacgcccggctaatttttttgtatttttagtagagatggg

SEQ ID NO: 48015 - DNA, 201 bp, Homo sapiens
tgttaacagtgcttctcaagctgcctgtggtacaggaccacttttgtttttcgagtaagtcatagactaatccttgtttgtttttttttttttttgagacrgagtcttgctctgtcacccaggccggagtgcactggcgcgatcttggctcactggaagctctacctcccgggttcacgccattctcctgcctcagcctcc

SEQ ID NO: 48016 - DNA, 201 bp, Homo sapiens
aaaaaaaaccaaaaaaaatttagccaagtgtggtggtgcacacctgtagtcccagctactcgggcagctgaggcaagaggatcacttgcactggaaggtcraggctgcagtgagtcatgatcgtaattgtaccactgcacttcagcgtaccctgtctctacaaaaaataaaaataaataaataacttatagtcttcataaa

SEQ ID NO: 48017 - DNA, 201 bp, Homo sapiens
gaagaagattaaccttatgctgtccacctgggtaactagcattatggctgcatcattaatagaagtaagaagcccaggattgttgtttgctttctgaacawtttatatatattgggaaataaggaatataaaattttaaagactaataaagattaaatatagtcttatactatattatttatgtaacaattaaatagctaa

SEQ ID NO: 48018 - DNA, 201 bp, Homo sapiens
agtgtactctgttccaagttcagcattcttctaaacatttttttgttggggtctaccacatggtaggcccttgtggttgtagtggggcgtggctagtgggsagagagtgaggagatgaggaagtttgagtctgagttgctgtagcttgattttttttcccctctagtttcatctttacctttccttttagaatagaaatta

SEQ ID NO: 48019 - DNA, 201 bp, Homo sapiens
cttcatcttctaacatgatatattcaggatttacacattaaaatgattatttaaattgtggcagtgatggggtttactttcatgaatttaaattgtttttwtttctgtaacaattgcttccaaatattgactactaaaggcagttctgcaagatgtactaaatatgtatattagaaattatagaaaatcatgttgtccgtt

SEQ ID NO: 48020 - DNA, 201 bp, Homo sapiens
tgttctcaagaagtgtttcctaggtatcttttgataattttgataaaaagtattcatttcatttaaaggttttaataatttagaaagtttaaagattagcstactgattatgatgggatttttactgaaaattagttttgtcaggctgcttgcttgtctgtgtattttctattctaatttagtttttatttttatcaaagc

SEQ ID NO: 48021 - DNA, 201 bp, Homo sapiens
taattcaaagctggacgttcgggggccacggccatatagatattttccaagaaggacaatcaggcagcttaccagggcgggacccaccagcattgaaatcrcatgtgaacaaagaggttcaaaatgaaatagaaggttttgaaaattctgtaaagttcctcctttaaaaaaaaataaaatcccttaaatcttgacaatctt

SEQ ID NO: 48022 - DNA, 201 bp, Homo sapiens
cctttacggtgtaacctaacatactcagtttccagagattaagacacagacatctttaggggagagagggcatttttctgcctactccaataatatctcasttgttctaactgcagtcttatgaagtaggcatagaaaatattccagtattacaggcttagagaagtgaatttacctggagtcacatggattgtaaagaca

SEQ ID NO: 48023 - DNA, 201 bp, Homo sapiens
atacagctttgcacagttgttttcagagaatactcattaataaagctggaattatctgtacataattttgcagtaataccatgtctctggaaagcatttcyttttatttaactttgattgtaagtttagggtttgtgcaggtttgttaggtaaatttgtgtcatgggggtgtgtggtacagactctttcatcacccaggta

SEQ ID NO: 48024 - DNA, 201 bp, Homo sapiens
atagtgagcatacatacagctttgcacagttgttttcagagaatactcattaataaagctggaattatctgtacataattttgcagtaataccatgtctcwggaaagcatttctttttatttaactttgattgtaagtttagggtttgtgcaggtttgttaggtaaatttgtgtcatgggggtgtgtggtacagactcttt

SEQ ID NO: 48025 - DNA, 201 bp, Homo sapiens
tttttttttaggaaaagaaagctaagtacaaattttaaatgtttagatgagaagctctaataacttgagaatattatcagtaagcacagaaataccatccytaaaataaacgtcaaaggtaaagggatagcataagaaatataaaaatagttaataaactgtaataaaaaataggcttggccacgtgcagtggctcacaac

SEQ ID NO: 48026 - DNA, 201 bp, Homo sapiens
cttggactcctggcctcaggttatccacctacttcagcctctcaaagtactgggattataggcatgagccacagtgcccaactcccaaattttttattgcwatattcagtaacatgaaattactgtcaaataatgtacttttgcctattgttttcattattgtattattaatatacttacagtaacacagtagtgctttta

SEQ ID NO: 48027 - DNA, 201 bp, Homo sapiens
gggtcttgctgttatcacccaagctggagtgcagtggcaccatcatagttcactgtagcctggacctcatgggctcaagcgatcctcctacctcagccttstcagtagctgggactacagccgtgcaccaccatgcccagctaattttttttttattattttttatagagacagagtcttactatgttgtccaggttgatc

SEQ ID NO: 48028 - DNA, 201 bp, Homo sapiens
tttttttttttttttgagacagggtcttgctgttatcacccaagctggagtgcagtggcaccatcatagttcactgtagcctggacctcatgggctcaagygatcctcctacctcagccttctcagtagctgggactacagccgtgcaccaccatgcccagctaattttttttttattattttttatagagacagagtctt

SEQ ID NO: 48029 - DNA, 201 bp, Homo sapiens
tgcttagatgggcatggggggagaagtaccccaaagttgagggagctcacatcaatcctaagctaacatattcacccccaacacatgccccatctttttaaaaaaaaaaaaaaaaaaaaactattttcagccacagtctctagtcactttggatttaacttcaaatagctttttttcaaccatgcctctaacttggcacag

SEQ ID NO: 48030 - DNA, 201 bp, Homo sapiens
acaaggcattagatacactcttggcaaagaaaacaaagtaagcaaaataaaacatcaaacatctttgtttatagagttttcctactgacgtttatgcatgttttttttttttttgcattttattcactggcctcccactcagaatatatttacttgaaatattgtgcctatttctaacaagttcatttatctgatttcttg

SEQ ID NO: 48031 - DNA, 201 bp, Homo sapiens
caaggcattagatacactcttggcaaagaaaacaaagtaagcaaaataaaacatcaaacatctttgtttatagagttttcctactgacgtttatgcatgttttttttttttttgcattttattcactggcctcccactcagaatatatttacttgaaatattgtgcctatttctaacaagttcatttatctgatttcttgg

SEQ ID NO: 48032 - DNA, 201 bp, Homo sapiens
tttcctccaaatattgggattttgacccatactgggagctaggacgtctaatgtactaagaacagcagaacatcttttttttttttttttttttttttttkgaaacggagtcttgctctgttgcccatgttggagtatagtgtcatgatctcacctcactgcagcttccacctcctgggttcaagcgattctcctgcctca

SEQ ID NO: 48033 - DNA, 201 bp, Homo sapiens
tttggtattaatactacattctgttatcaatgttttttgttgatctaaagaatatttcctttatcttcacatacatttaggttttgtgtttttgtttttgtttttttttttttgaccttgacttctttctgctatttcttttgagcaaaaccttaaacagcaggctgaatggccttgaggtgtagttttaataaaagcatc

SEQ ID NO: 48034 - DNA, 201 bp, Homo sapiens
tttcacattcttcatatataacaagtaaaattaattcagttttcttctcccaacgtttaattctgaataactctatctactttaccctaatttttagcctmttaatttctggaaggactctaatttctattccaaatttctatgaattctaattgtaaattatcggaacagagttttatttatatgacctggtactagact

SEQ ID NO: 48035 - DNA, 201 bp, Homo sapiens
catgttgggaggccgagacggacagatagcttgagcccaaggagtccgataccagcagggcaacatggcaaaacctcatctctacaaaaaaaaaaaaaccaaaaaaaatttagccaagtgtggtggtgcacacctgtagtcccagctactcgggcagctgaggcaagaggatcacttgcactggaaggtcaaggctgcagt

SEQ ID NO: 48036 - DNA, 201 bp, Homo sapiens
tgaggcaggagaatggtgtgaacccaggaggcggagcttgcagtgagccgagatcgcgccactgcactccagcctgggtgagagtgcaagactctgtctcaaaaaaaaaaaaaaaaaaaaaagaccccacccattacccttcattattaaaataagcattatctcacaggaatacttttctgtaaaaatgccacgaaaaca

SEQ ID NO: 48037 - DNA, 201 bp, Homo sapiens
tgtgaacctgggaggcggagcttgcagtgagccgagattgcgccactgcactccagcttgggcgacaaagcgagactctgtctcaaaaaaaaaaaaaaaargttgcccttggccgggcttagtggctcacatctaaaatctcagcactttgggaaggccaaggcaggcagatcccctgaggtctggagctcaagaccagcc

SEQ ID NO: 48038 - DNA, 201 bp, Homo sapiens
taccacgcccagctaatttttgtctttttagtagagacagggtttaaccatgttgcccaggatggtctccatctcttgacctcgtgatccgcccgcctcgrcctcccaaacttctgggattacaggcgtgagccaccgcacccagccaccattttatctctctaaagtctggtcccagtattaaacctattctttagtaaa

SEQ ID NO: 48039 - DNA, 201 bp, Homo sapiens
tgaaatactaatcactagaaataaagaaatgaaaaaagcccctaaacctgaaatacaacccagaattttttttttttttttttttttgagacagggtcttrctgttatcacccaagctggagtgcagtggcaccatcatagttcactgtagcctggacctcatgggctcaagcgatcctcctacctcagccttctcagtag

SEQ ID NO: 48040 - DNA, 201 bp, Homo sapiens
aacataaaattatccatttcagaggcatttgatgcattcacaatattatacatatatataatacaatataatacaactctttctagttccaaaatattttygtcaccccaaataaaaccctgtgcccaagttgctgacaaccaccaacctgctgtctgtatgtatttacctatcctggatatttcatataaatagaatcat

SEQ ID NO: 48041 - DNA, 201 bp, Homo sapiens
atactatataagcaaacatcaataggaaaaaaaatctagaaatgacaacctaaacctgaagcctggtttatttttctcaattataaaataaacattttttwaaaataagaatttggcaagtaaaaaaagaaaaaatgaaaaaatttaaaatcacctgaaagctcacttccatgagatataatcctttcatttatgtttttc

SEQ ID NO: 48042 - DNA, 201 bp, Homo sapiens
gctagccatacagaatcatgactctttgaggatttagcttagccaccacctcctacaaggccttctctcataacccaccctttccaacccaccccatgctrattacattctcttactgtatgccctctggcaccttgtcattagcttatagtatttattacagtatcataatgcccattaccgtctgtttcccctattgga

SEQ ID NO: 48043 - DNA, 201 bp, Homo sapiens
ttgtgtacgtgtatgtttatgtcttaggtatactacacgtggataaatagtgggatttgtgtgcaataagatattgcctgtgattatctctgactggcagrgttggagcaatttttattttattattggtgatttcctacattttctaaatgttgttcaaggaaccacagaatattttttgcaatgagataaaaagtttta

SEQ ID NO: 48044 - DNA, 201 bp, Homo sapiens
ttggtcaatcaataaataaaaatactgtaggataacatttgaggacaaaaaacttctgtgccatattatgtgaaaatatccattgtaaactgtgtatactrtgtcgtgagatttctgtgtctatcttttcattattcatttgtacatatgtcttggacctgggatttggtgatctttacaaatggcattagattaagtcct

SEQ ID NO: 48045 - DNA, 201 bp, Homo sapiens
agctgagtgtaatgtgctatcctagaatagagaaaggagactaggtaaaaactaaggaaacctaaataaagtataaagtttaattgataaacaaaaatcarcactggtacattaattgtaataagtgtaccatgccaatataagatgttaataataggggaaactgggtatgtagtatatgggaactatctgtactatctt

SEQ ID NO: 48046 - DNA, 201 bp, Homo sapiens
tttatatagggcagtgcttttcaaattatgttctgatgcactcccacagaggctggccagcaaggggtgaggaggcctgctagtgaagtctttaagtgagkcagtgctgcaggtgtattagaaagatttatctgacagtggacacagaggaatgtgttgggaagctgttcagtaaatccgatgagatggcgtgagcccaaa

SEQ ID NO: 48047 - DNA, 201 bp, Homo sapiens
gaaactcctgtaattgcagtgtggcagagacctctttgttgactacatagtaagtcatcctcactgctctctacctgcccaccttgacagaagaactcaartttgctcagctatcatttatcctagtgataaatggactacatttatgtggttctcacagacaacaagatactgagcctctcattatatattagtgaactt

SEQ ID NO: 48048 - DNA, 201 bp, Homo sapiens
tcacttgttaagttaacccagttcattcgttctttttttaaaaaattaattttttatggtaggggtagagatggggtcttgctgtgttgcccaggctggtstggaactcctgtgctcaagcaatcctcccacctaaacctcccaaagtgctgggattaaaagcatgagccacgacacccggcttattaattcttttaataa

SEQ ID NO: 48049 - DNA, 201 bp, Homo sapiens
ataaaaaacaaagtctgagaaatttacagccaaaaaagctaagagagtagctgagtgtaatgtgctatcctagaatagagaaaggagactaggtaaaaackaaggaaacctaaataaagtataaagtttaattgataaacaaaaatcagcactggtacattaattgtaataagtgtaccatgccaatataagatgttaata

SEQ ID NO: 48050 - DNA, 201 bp, Homo sapiens
ggagaaatagctgattctaggaatggggcaggagatacagtagtccccctttatcagaggggaatatgttccaagattcctggtggatgcctgaaaccacrgataacaccaaagcctatatatactatatttttttaatctgataaccaaaacagctgctaagaataagcgactacagggcaggtaatgtgtacagcatgg

SEQ ID NO: 48051 - DNA, 201 bp, Homo sapiens
tgaggcagtgctgcaggtatattagaaaaactgatctgacagtgggcacagaggaatgtgttgggaagctattcagtaagtccgatgagatggcatgagcycagatgtattactggccacgagtttgaaaataaaacaagagaatggatgcatgtactctcaccaagggagaaccaccaggagtaggttacagatgggaag

SEQ ID NO: 48052 - DNA, 201 bp, Homo sapiens
ccgggaagaaagaagaggaagaaagatagggagggaggcaatccaggcatgaagcagacgctcctggattgaagtagaaatacaagaggcatattgaggawaccatgttggaacagatggtttatataaggcagtgcttttcaaattatgttctgatgccacccccagaggggctagccagcaaggggtgaagaggcccgc

SEQ ID NO: 48053 - DNA, 201 bp, Homo sapiens
aaacaagcccctcaaaaccctagaaaatattacagttattaataataaattctcagtaatattcacattggagcagtaataaattatattaatagtagcartccttaaaaatggtcccactcttcactaaaacattcaatcttacccatgttccaaatgaaatgattattgttttctactttctactcttacaagaaagag

SEQ ID NO: 48054 - DNA, 201 bp, Homo sapiens
tctaagaataagatacattgctattagacaatgagaaatcaggtaaataggaacaatgatgttttcaagaaaattaaaaggttgacattttaaaaatatatgtaggaaatgccctgtaagaggtcatcttttctgtcttctttcattaagaaagaaaacacattctaaactattgggtcttgttttcactgcatgggctag

SEQ ID NO: 48055 - DNA, 201 bp, Homo sapiens
agtgaaggatagagcgtggcaaaagtccagataacctataatgactttcacattactttaaaaaatccagttaaccaacgtactgtactgacaacatattscttaatcataatcagttttaatccaacaccaaactaagcataatattgtcacacattggtttgttgaagatgcagaatttagaaattcagatccttgagc

SEQ ID NO: 48056 - DNA, 201 bp, Homo sapiens
tagactttgcactacttgtaaccatttagtctactctttgtaactctctcttcttttatcatgatgtcttacatttatttttgcatctaagtgaaggatasagcgtggcaaaagtccagataacctataatgactttcacattactttaaaaaatccagttaaccaacgtactgtactgacaacatattgcttaatcataa

SEQ ID NO: 48057 - DNA, 201 bp, Homo sapiens; identical to SEQ ID NO: 8350

SEQ ID NO: 48058 - DNA, 201 bp, Homo sapiens; identical to SEQ ID NO: 8223

SEQ ID NO: 48059 - DNA, 201 bp, Homo sapiens; identical to SEQ ID NO: 7960

SEQ ID NO: 48060 - DNA, 201 bp, Homo sapiens; identical to SEQ ID NO: 7961

SEQ ID NO: 48061 - DNA, 201 bp, Homo sapiens; identical to SEQ ID NO: 8179

SEQ ID NO: 48062 - DNA, 201 bp, Homo sapiens; identical to SEQ ID NO: 7962

SEQ ID NO: 48063 - DNA, 201 bp, Homo sapiens; identical to SEQ ID NO: 8180

SEQ ID NO: 48064 - DNA, 201 bp, Homo sapiens; identical to SEQ ID NO: 8020

SEQ ID NO: 48065 - DNA, 201 bp, Homo sapiens; identical to SEQ ID NO: 7963

SEQ ID NO: 48066 - DNA, 201 bp, Homo sapiens; identical to SEQ ID NO: 7964

SEQ ID NO: 48067 - DNA, 201 bp, Homo sapiens; identical to SEQ ID NO: 7966

SEQ ID NO: 48068 - DNA, 201 bp, Homo sapiens; identical to SEQ ID NO: 7967

SEQ ID NO: 48069 - DNA, 201 bp, Homo sapiens; identical to SEQ ID NO: 8187

SEQ ID NO: 48070 - DNA, 201 bp, Homo sapiens; identical to SEQ ID NO: 8189

SEQ ID NO: 48071 - DNA, 201 bp, Homo sapiens; identical to SEQ ID NO: 7898

SEQ ID NO: 48072 - DNA, 201 bp, Homo sapiens; identical to SEQ ID NO: 8117

SEQ ID NO: 48073 - DNA, 201 bp, Homo sapiens; identical to SEQ ID NO: 8191

SEQ ID NO: 48074 - DNA, 201 bp, Homo sapiens; identical to SEQ ID NO: 8192

SEQ ID NO: 48075 - DNA, 201 bp, Homo sapiens; identical to SEQ ID NO: 8193

SEQ ID NO: 48076 - DNA, 201 bp, Homo sapiens; identical to SEQ ID NO: 8118

SEQ ID NO: 48077 - DNA, 201 bp, Homo sapiens; identical to SEQ ID NO: 8316

SEQ ID NO: 48078 - DNA, 201 bp, Homo sapiens; identical to SEQ ID NO: 8123

SEQ ID NO: 48079 - DNA, 201 bp, Homo sapiens; identical to SEQ ID NO: 8299

SEQ ID NO: 48080 - DNA, 201 bp, Homo sapiens; identical to SEQ ID NO: 8363

SEQ ID NO: 48081 - DNA, 201 bp, Homo sapiens; identical to SEQ ID NO: 7936

SEQ ID NO: 48082 - DNA, 201 bp, Homo sapiens; identical to SEQ ID NO: 7938

SEQ ID NO: 48083 - DNA, 201 bp, Homo sapiens; identical to SEQ ID NO: 7991

SEQ ID NO: 48084 - DNA, 201 bp, Homo sapiens; identical to SEQ ID NO: 7992

SEQ ID NO: 48085 - DNA, 201 bp, Homo sapiens; identical to SEQ ID NO: 8205

SEQ ID NO: 48086 - DNA, 201 bp, Homo sapiens; identical to SEQ ID NO: 7993

SEQ ID NO: 48087 - DNA, 201 bp, Homo sapiens; identical to SEQ ID NO: 7995

SEQ ID NO: 48088 - DNA, 201 bp, Homo sapiens; identical to SEQ ID NO: 8321

SEQ ID NO: 48089 - DNA, 201 bp, Homo sapiens; identical to SEQ ID NO: 7997

SEQ ID NO: 48090 - DNA, 201 bp, Homo sapiens; identical to SEQ ID NO: 7998

SEQ ID NO: 48091 - DNA, 201 bp, Homo sapiens; identical to SEQ ID NO: 8364

SEQ ID NO: 48092 - DNA, 201 bp, Homo sapiens; identical to SEQ ID NO: 8000

SEQ ID NO: 48093 - DNA, 201 bp, Homo sapiens; identical to SEQ ID NO: 8001

SEQ ID NO: 48094 - DNA, 201 bp, Homo sapiens; identical to SEQ ID NO: 8003

SEQ ID NO: 48095 - DNA, 201 bp, Homo sapiens; identical to SEQ ID NO: 7946

SEQ ID NO: 48096 - DNA, 201 bp, Homo sapiens; identical to SEQ ID NO: 8004

SEQ ID NO: 48097 - DNA, 201 bp, Homo sapiens; identical to SEQ ID NO: 8208

SEQ ID NO: 48098 - DNA, 201 bp, Homo sapiens; identical to SEQ ID NO: 8242

SEQ ID NO: 48099 - DNA, 201 bp, Homo sapiens; identical to SEQ ID NO: 8210

SEQ ID NO: 48100 - DNA, 201 bp, Homo sapiens; identical to SEQ ID NO: 8156

SEQ ID NO: 48101 - DNA, 201 bp, Homo sapiens; identical to SEQ ID NO: 8211

SEQ ID NO: 48102 - DNA, 201 bp, Homo sapiens; identical to SEQ ID NO: 8306

SEQ ID NO: 48103 - DNA, 201 bp, Homo sapiens; identical to SEQ ID NO: 8158

SEQ ID NO: 48104 - DNA, 201 bp, Homo sapiens; identical to SEQ ID NO: 8212

SEQ ID NO: 48105 - DNA, 201 bp, Homo sapiens; identical to SEQ ID NO: 8159

SEQ ID NO: 48106 - DNA, 201 bp, Homo sapiens; identical to SEQ ID NO: 8213

SEQ ID NO: 48107 - DNA, 201 bp, Homo sapiens; identical to SEQ ID NO: 8160

SEQ ID NO: 48108 - DNA, 201 bp, Homo sapiens; identical to SEQ ID NO: 8215

SEQ ID NO: 48109 - DNA, 201 bp, Homo sapiens; identical to SEQ ID NO: 8162

SEQ ID NO: 48110 - DNA, 201 bp, Homo sapiens; identical to SEQ ID NO: 8349

SEQ ID NO: 48111 - DNA, 201 bp, Homo sapiens; identical to SEQ ID NO: 8385

SEQ ID NO: 48112 - DNA, 201 bp, Homo sapiens; identical to SEQ ID NO: 8389

SEQ ID NO: 48113 - DNA, 201 bp, Homo sapiens; identical to SEQ ID NO: 8390

SEQ ID NO: 48114 - DNA, 201 bp, Homo sapiens; identical to SEQ ID NO: 8222

SEQ ID NO: 48115 - DNA, 201 bp, Homo sapiens
tgtgacccccgggacctcaagagctgtaaccgcccctgtgtgtggtcgaggcttttgaaaccaaactctagcctctccaacctagaaactgcatactttcyacaaaatttgagatttttgagaccctggtacttttcacgaagtcaccttaattatcaccaaaaagctcctgcaagatgggagtggttatactccatttac

SEQ ID NO: 48116 - DNA, 201 bp, Homo sapiens
gcggacgacccagaattggaatggttctttgtggctccaaagtctgatttcaacacaccccttttgttgctcattagtaatgatctctctttgttcttatyccttccaggctcctcctcagccatcctggccgtgctcagtcatctgaccagctgacctccgtgttcccccactccctggggagctcctccgccttttggc

SEQ ID NO: 48117 - DNA, 201 bp, Homo sapiens
gtttttcctgagtccagtccttttgcaatcatgctgatttcatcctgtgctgtttattattctctctggttcttgaggcctggcctggcaagacagtcctrttttaggagacaacactctcccatagcaatctttgctttatcttcggatacgtttattacctgagacactaggtagccaatggggcatatgagaaatacc

SEQ ID NO: 48118 - DNA, 201 bp, Homo sapiens
ccccgggacctcaagagctgtaaccgcccctgtgtgtggtcgaggcttttgaaaccaaactctagcctctccaacctagaaactgcatactttccacaaawtttgagatttttgagaccctggtacttttcacgaagtcaccttaattatcaccaaaaagctcctgcaagatgggagtggttatactccatttacaggaaa

SEQ ID NO: 48119 - DNA, 201 bp, Homo sapiens
ggtccgtctcccaccaagaactctcagcccagggatcctgaacaatggttctttccaccaagcctgagacttggctttctgtttcctttggactctctggraaagaaaaccctgggagttcccattcctaggtctgagaaaacatctctgttaaaagttgaccaggagggcacagggccctaccctgcacaacgtgagtct

SEQ ID NO: 48120 - DNA, 201 bp, Homo sapiens
ggcttgcgcacacacacacagacacacacacacacacacacacacacacacacacacgctgtctcagcagggagcactgctgccttgggtctgtgtttggyaacatggatccccagcccaagtgccagaaaggcagttataggtgtggctcatgtgcggtaacaacagtggtccgtctcccaccaagaactctcagcccag

SEQ ID NO: 48121 - DNA, 201 bp, Homo sapiens
aatccccatttcacagatgagaaaactgaggcaagaaactcgcccaaggtcatgcacatttgtaagtggcaaagccagactttgaaatcagaaagcctggytccagagcctattaacctctctataacagtctatctcccaaatgggattctaggcaatttttatgcaaattaaattattgaaaatggtcacgcatgatat

SEQ ID NO: 48122 - DNA, 201 bp, Homo sapiens
tagtccattttcacactgctgataaagacataccagagactggggaagaaaaagaggtttaattggacttacagttccacatggctgggaaagcctcagartcatggtgggaggcaaaaggcacttcttacatggcagcagcaaaagaaaatgagaaggatgcaaaagcagaagcccctgataaaaccatcagatcttgtg

SEQ ID NO: 48123 - DNA, 201 bp, Homo sapiens; identical to SEQ ID NO: 18401

SEQ ID NO: 48124 - DNA, 201 bp, Homo sapiens; identical to SEQ ID NO: 20885

SEQ ID NO: 48125 - DNA, 201 bp, Homo sapiens; identical to SEQ ID NO: 18404

SEQ ID NO: 48126 - DNA, 201 bp, Homo sapiens; identical to SEQ ID NO: 22445

SEQ ID NO: 48127 - DNA, 201 bp, Homo sapiens; identical to SEQ ID NO: 22740

SEQ ID NO: 48128 - DNA, 201 bp, Homo sapiens; identical to SEQ ID NO: 20889

SEQ ID NO: 48129 - DNA, 201 bp, Homo sapiens; identical to SEQ ID NO: 22742

SEQ ID NO: 48130 - DNA, 201 bp, Homo sapiens; identical to SEQ ID NO: 22744

SEQ ID NO: 48131 - DNA, 201 bp, Homo sapiens; identical to SEQ ID NO: 17718

SEQ ID NO: 48132 - DNA, 201 bp, Homo sapiens; identical to SEQ ID NO: 17710

SEQ ID NO: 48133 - DNA, 201 bp, Homo sapiens; identical to SEQ ID NO: 17744

SEQ ID NO: 48134 - DNA, 201 bp, Homo sapiens; identical to SEQ ID NO: 17703

SEQ ID NO: 48135 - DNA, 201 bp, Homo sapiens; identical to SEQ ID NO: 17757

SEQ ID NO: 48136 - DNA, 201 bp, Homo sapiens; identical to SEQ ID NO: 17717

SEQ ID NO: 48137 - DNA, 201 bp, Homo sapiens; identical to SEQ ID NO: 17699

SEQ ID NO: 48138 - DNA, 201 bp, Homo sapiens; identical to SEQ ID NO: 46037

SEQ ID NO: 48139 - DNA, 201 bp, Homo sapiens; identical to SEQ ID NO: 46039

SEQ ID NO: 48140 - DNA, 201 bp, Homo sapiens; identical to SEQ ID NO: 45044

SEQ ID NO: 48141 - DNA, 201 bp, Homo sapiens; identical to SEQ ID NO: 44981

SEQ ID NO: 48142 - DNA, 201 bp, Homo sapiens; identical to SEQ ID NO: 45118

SEQ ID NO: 48143 - DNA, 201 bp, Homo sapiens; identical to SEQ ID NO: 44017

SEQ ID NO: 48144 - DNA, 201 bp, Homo sapiens; identical to SEQ ID NO: 38068

SEQ ID NO: 48145 - DNA, 201 bp, Homo sapiens
aagaggtccacactttcattttgcactgggttcccaaacaggtcctgggtaggaaggatggctgaggataaaacaggagttgctttggcctggctgaacakttgaaccaatgatcagagtttcattttatgattgtgttactctgaacagatttgctatttttttccagctacatttagagttcctcatgtatatatcacc

SEQ ID NO: 48146 - DNA, 201 bp, Homo sapiens
tgtatcctttgatgtagaagccacaagaatggctttagcagcttattttaatcttatgaattattcattcaggattttttaaatgattcagatgctttcartctgttaacagtatttataaaacatgtttcagtgatacaacataggtgaactaaaccaaagatgcaaatgccttggaggaaaagaaattgtattatagag

SEQ ID NO: 48147 - DNA, 201 bp, Homo sapiens
ctaggctggagaaccactacagggctgacacctggaatgggagcttgtaacttttacaaaataatagatgtttatcatcttttgcaatttttacttttaartctatactaaaatgagccaaagaagtcttaacaatgatgtatggcacaattggttggttgaggctatcattccatgattacaaataggtggttatgtggg

SEQ ID NO: 48148 - DNA, 201 bp, Homo sapiens
ttgatttgattatatgttggtatctcccaaatataggttaacttagctatttaaatggtatcttttgacatttaaaaagaattaagtacctgtcaaatctwgcattgaggttgcagttgaataagataaaagcttaggatgtcaaaaaataatatagagaaatattataagattttatgattattcttgaagtttttgatg

SEQ ID NO: 48149 - DNA, 201 bp, Homo sapiens; identical to SEQ ID NO: 38066

SEQ ID NO: 48150 - DNA, 201 bp, Homo sapiens
tgtcaaatcttgcattgaggttgcagttgaataagataaaagcttaggatgtcaaaaaataatatagagaaatattataagattttatgattattcttgamgtttttgatgcaaaaggaaaatatgctgaatagttcttccaaaaaatattatttccctcaatattttatttgtagccatgtaatttaaagagaacagaaa

SEQ ID NO: 48151 - DNA, 201 bp, Homo sapiens
tgcatcatgttcttttttcataatgcttttacttcctgtttggatcagttgtatgtaaatgtacatttttgttactttggctgtgcccgttagaatttatsttccataaagtatttctcccattgagtctaatgatgtatactttgcctaggtctttccaaaattaaatttatgtaaatgtctattttatataaaatatga

SEQ ID NO: 48152 - DNA, 201 bp, Homo sapiens
ctgatgagataattcataaatgttgccccttttttaaatgatacaaccctaaaagtgactgaattgcccaagtgcttgaacatggcagaggtagttactcytattttgcagtttgtgcacttaaaaattcctacagtgattgttactttactggggaaaaaagatgaggtgaaacttcctcccaaggaattaaaatatctg

SEQ ID NO: 48153 - DNA, 201 bp, Homo sapiens
ctgcactttggaatcacctgaggacctttcggaatcttcggttgaatcatcctggctgtcctggtgatgcttcttatgtgcagctaggctggagaaccacyacagggctgacacctggaatgggagcttgtaacttttacaaaataatagatgtttatcatcttttgcaatttttacttttaagtctatactaaaatgagc

SEQ ID NO: 48154 - DNA, 201 bp, Homo sapiens; identical to SEQ ID NO: 38105

SEQ ID NO: 48155 - DNA, 201 bp, Homo sapiens; identical to SEQ ID NO: 31892

SEQ ID NO: 48156 - DNA, 201 bp, Homo sapiens; identical to SEQ ID NO: 31896

SEQ ID NO: 48157 - DNA, 201 bp, Homo sapiens
gacaggcattattagattctttcctgaggaccattatcatttccattttgcagatgaaggtactgacacagagaggttaaataacttgcccaaggcagtgyggctagcaaataatcacgctaaggtttggaaccctggtctcatgccaaagatcatgcttctaatgaagtattttgaagagcaaggctttctttggtgacc

SEQ ID NO: 48158 - DNA, 201 bp, Homo sapiens
cctcaggtgatccactcacctcggcttcccaaagtgctgggattacaagtgtgggccaccatacctggcctcaatgaacacttgtttaggtccttctaagsgttgtggatacagcagtgagcacagcaggtcaaaatccttgccttcataaggctgacattccagtcaggagagacagaaaatgaacacataagaaaaata

SEQ ID NO: 48159 - DNA, 201 bp, Homo sapiens; identical to SEQ ID NO: 31928

SEQ ID NO: 48160 - DNA, 201 bp, Homo sapiens; identical to SEQ ID NO: 31916

SEQ ID NO: 48161 - DNA, 201 bp, Homo sapiens
attttgtgtttttagtagaaatggggtttcaccatgttggtccggctggtctcgaactcctgacctcaggtgatccactcacctcggcttcccaaagtgcygggattacaagtgtgggccaccatacctggcctcaatgaacacttgtttaggtccttctaagggttgtggatacagcagtgagcacagcaggtcaaaatc

SEQ ID NO: 48162 - DNA, 201 bp, Homo sapiens
actccagcctaggtggggcagagtgagactccgtcttaaaccaaaaaacaaaaggaggttgaaggacgtgctgctctgtgggatataggagaaggggtgcygacagatcttggctgagggtgactcagggatgggaggtttggggtatgcagagaattccccagcctgccttctgcgtgtgggtccctgggtgtctgcttc

SEQ ID NO: 48163 - DNA, 201 bp, Homo sapiens
cctaggtggggcagagtgagactccgtcttaaaccaaaaaacaaaaggaggttgaaggacgtgctgctctgtgggatataggagaaggggtgccgacagawcttggctgagggtgactcagggatgggaggtttggggtatgcagagaattccccagcctgccttctgcgtgtgggtccctgggtgtctgcttcaagcgct

SEQ ID NO: 48164 - DNA, 201 bp, Homo sapiens
ttggctcactgaagccttgatctcctggggtcaagcgatcctcccacctcaaacccccaagtagctgggactacaggcatatgccaccatgcctggctaayttttatatttttgtgtagagacagggttttgccatgttgtccatgctggtctgaactgagctctggcaatccacctgccttgacctcccaaagtgttggg

SEQ ID NO: 48165 - DNA, 201 bp, Homo sapiens
gggcgtggtggcgggtgcctgtagtcccagctactcgggaggctgaggtaggagaatggcgtcaacccgggaggcggagcttgcagtgagccgagatcacrgcactgcaccccagtgtgggtgacagagcgagactccatctcaaaaaaaaaaaaaaaagttccatcataacttcatttttactagaagggtcaagattaa

SEQ ID NO: 48166 - DNA, 201 bp, Homo sapiens
ttctgtgagtctaatatggctgtagtgatttaatagaaacccttgtgttttgcttttctcccttcccctttctgtttcttagagttggaaaggctcctggrtaaatttggacaggatgcacaaagaatagaagattctgtgctgattggatgctctgagcagcaggaagcatggtttgctctggatctaggtctggatagc

SEQ ID NO: 48167 - DNA, 201 bp, Homo sapiens
ggttgtgccccatactccggaggaaggaaggctgcacagagaggccaaggagaacctgaacagacaggcattgctgggtttccggtcagtctattattatkaaatcataaccattttgtccaatcagatttctacatggttgtcaatcatgcctatgtaatgaagccaccataaaaacccaaaaggacagggttcagagag

SEQ ID NO: 48168 - DNA, 201 bp, Homo sapiens
gccccctgctctgagcacacccctagattccatgaatttttactacacttactttatcacaaagctgtccatctatccattaatctatcttattttttgaygcatagattgaagatattagtacacttcttcctatttcagcatgcgtaacatttgctagaattcagtatttatttacaggttggtttttttctctagtct

SEQ ID NO: 48169 - DNA, 201 bp, Homo sapiens
ctccctccttggcctcccaaagtgctaagattataggtatgagccaccacacctggcctatacattttgtatatttctttttttttttttttttgaggcaragtttcactcttgttgcccaggctggagtgcaatggcgcgatctcggctcgccacaaccttcgcctcccaggttcaagcgattctcctgcctcagcctcc

SEQ ID NO: 48170 - DNA, 201 bp, Homo sapiens
gtattatcttctaagattgcttagttctagaatcattttctgacctttggccatagtattctaaattttgtagctcctgaccttacatccttttcttcctwatgtctttcagatccaggtgaacttgagagaattagagacagctgcctggttcagtcatgatgaggtagccacagccctgaagagaaagggcccctatac

SEQ ID NO: 48171 - DNA, 201 bp, Homo sapiens
gtgtatatgtgtgtgtgtgtatatatatatattcatatatatatatattcatccatggtttctggctcataactcctatggcccttattacagtcttttgytataatgtggggcactttagacctcaggggcaggcctcaggaaacaaaatctcttttaccttctcctgtcctccttttacctgcccatggcaggactcta

SEQ ID NO: 48172 - DNA, 201 bp, Homo sapiens
tctctaggtattttgtggttgatgttttatcactgtacttgttttcctttcactccactgcatgtaaattcttgcctcacagtgtaatattggcagagtamcttgaagttcaattcagtaaatatttattacccttgaagttcaattcaataaatatttattgaatcgagccattcaatatgctaactacagagatacaga

SEQ ID NO: 48173 - DNA, 201 bp, Homo sapiens
ctaacctgaagatcccaggtattatcttctaagattgcttagttctagaatcattttctgacctttggccatagtattctaaattttgtagctcctgaccktacatccttttcttccttatgtctttcagatccaggtgaacttgagagaattagagacagctgcctggttcagtcatgatgaggtagccacagccctgaa

SEQ ID NO: 48174 - DNA, 201 bp, Homo sapiens
acagagtgatcccattctggcttaaagtataaccctcttggcaattcattactttaaatttcatattatgactttttttaaaactccttttttttttttttaaggacctgacaatgtccctgtattgtggaatagcttgcaggagaaaatttttttggtgctataggctgctgtcaacctatgttactaagacacggtgag

SEQ ID NO: 48175 - DNA, 201 bp, Homo sapiens
atacttgctgtccgttgtacttttttaatggtagccattaaagaaggtatgagttaatagtagccatcaaagaaggtatgaggttttcatttgcatttccctgatgattagtgatgttgagcaccttttcacatacctgttggccatttgaataccttctttggagaaatgtctattcagattctttgcccatttttaaat

SEQ ID NO: 48176 - DNA, 201 bp, Homo sapiens
agaccagcctgaccaacatggagaaaccccatctctactaaaaaaaatacaaaattagctaggcgtggtggcgtatgcctgtaatcccaactactcgagargctgaggcaggagaatcgcttgaacccgggaggtggaggttgcggtgagccgagattgcgccattgcactccagcccgggcaacaagagcgaaactccgt

SEQ ID NO: 48177 - DNA, 201 bp, Homo sapiens
tcattactgagttacttgttacccttacagaattaagaaaaatagcacagtatgacattttaaaattcatgtacaggtgcattctagttacatgaacatgstagttaaataaaagtcacaattaagtcattatgactcagagtactttataataaatcagatgccctgaggctctgttgaggaagtagaatcccaatggga

SEQ ID NO: 48178 - DNA, 201 bp, Homo sapiens
cagtaagtgtgggcaaatccatgtgtacacacaaggctagagtgacgtttgatttcttcttttgcagattatagtcctttctacaaacactggcaggacamtgtgctgtagggagattgcttattcttccttcttctgcccttgtttttggcagaaccactgtcaagatcattgtctcctaaagacatgcagatctatggc

SEQ ID NO: 48179 - DNA, 201 bp, Homo sapiens
aaataaaccaatagtgcaaccacagaagtatgggtgaggtacacagtaagacaaaggagggaatgaatgattatctatagccacctcaaaccctttttggrgcaaattaggttgtaaataaataaagggaaataaccatggtaagagagggatgcagcgacagcattctcaaagatgaatgctatacaggtaactaagggt

SEQ ID NO: 48180 - DNA, 201 bp, Homo sapiens
gcacctttctcaaatgggctgtctgtatcacccttctagcctacagggctgtcctgaattaatctgagtgcttgtaggtgaaagtgtggaagagaccatcygccgagaagttgcagaagaggtgggattggaggtggaaagcctgcagtactatgcatcccagcattggcccttccctagtggctcactcatgattgcttg

SEQ ID NO: 48181 - DNA, 201 bp, Homo sapiens
aaggtcgtggtcacagcattttaacattttagcttaatctcttcctttttgcagaaaccagggatataaccatagttttgcctcataactgtggagctacmtcagtaaccacagctcatcattttctgatacttttttggagagtcatttaaaaatggaacttgccaacctctcacattgtgccttaatttttattttttt

SEQ ID NO: 48182 - DNA, 201 bp, Homo sapiens
acattattcctaacgggtacttcccagtggtcttcagaatttgggatttcacataatggtaaaatttaaaggaaaatttggggaatacaaaaggttatcamctttctattttttaaaaaaggacattaaaaagtgtcatctgctatcatcatcatttaaatgacaataaaggacattttaatgccttctaagttaggtgat

SEQ ID NO: 48183 - DNA, 201 bp, Homo sapiens
ttgtgtagagacagggttttgccatgttgtccatgctggtctgaactgagctctggcaatccacctgccttgacctcccaaagtgttgggattacaggcgyaagtcaccaaacctggccgaaaaattttaaacaaactaaatatccaataatatctaaaatatctcacacacttgaatataagttctattaagatcagact

SEQ ID NO: 48184 - DNA, 201 bp, Homo sapiens
gcagtactatgcatcccagcattggcccttccctagtggctcactcatgattgcttgccatgcaactgtgaaaccagggcagacagaagtaagttctcatsttcccttatactgtgatatttcttttgcttcatccaacctgctcatcagcaagtacttattaagcacttgtctagtccagcatcatctagattacataaa

SEQ ID NO: 48185 - DNA, 201 bp, Homo sapiens
ctgagtgcttgtaggtgaaagtgtggaagagaccatccgccgagaagttgcagaagaggtgggattggaggtggaaagcctgcagtactatgcatcccagyattggcccttccctagtggctcactcatgattgcttgccatgcaactgtgaaaccagggcagacagaagtaagttctcatcttcccttatactgtgatat

SEQ ID NO: 48186 - DNA, 201 bp, Homo sapiens
aggctggtctcgaactcctgacctcaggtgatccgcctgcctcagcctcccaaagtgctgggattacaggcatgagccaccaagcccggtcacattttgtwtatttcagtatttcataagaaatgttaaaaaacttataacatcattctaatttcttttttgaatacaggtgaataaaaatgtttccatatagctctgggt

SEQ ID NO: 48187 - DNA, 201 bp, Homo sapiens
atcatttgaacctgggaggggaggttgcagtgagccaagatcacaccattgccctctagcctgggtaaaaagagcaaaactccatctcaaaaaaaaaaaaagtaatatttgtatgttcttttttaattgaaaaatttatacaatcaatagagacacaaggaaaaataggtattattcataatttattctcaatgttaacca

SEQ ID NO: 48188 - DNA, 201 bp, Homo sapiens
ccctcccggccggggtggctgccgggcggagacgctcctcacttcccagacggggtggcagccaggcggaggggctcctcacttctcagacggggcggttrccaggcggagggtctcctcacttctcagacggggcggccgggcagagacgctcctcacctcccagatggggcggcggggcacaggcgctccccacatctc

SEQ ID NO: 48189 - DNA, 201 bp, Homo sapiens
ggtgggcggggcacacccagtgcgcatgcgcagcaccccggcccggaaacagcgcggggtccgctatggcggcggcagccgagggcgtactggcgacccgsagtgatgagcccgcccgaggtacccggaatggatggggaggaagcgtccggtggggggcctggggctccgtctcgggtgggcgaggttgagtgtgtggtg

SEQ ID NO: 48190 - DNA, 201 bp, Homo sapiens
agccaagtacaagaagctggagaagcgatgagaaacttatttctatgggacagagtcttttttttttaatgtggaagaatgtcttataaaacctgaatccygaggctgatgaattgtgaaaattcctcaaaaggaaattatgctggtcatcacaggaacatctcaacgttcgagtaaactggaggactgtggctattcctg

SEQ ID NO: 48191 - DNA, 201 bp, Homo sapiens
agagacgctcctcactttccagactgggcagccaggcagaggggctcctcacatcccagacgatgggcagccaggcagagacactcctcacttcccagacsgggtggcggccaggcagaggctgcaatctccgcactttgggggggccaaggcaggcggctgggaggtggaggccatagcgagccgagatcacgccactgc

SEQ ID NO: 48192 - DNA, 201 bp, Homo sapiens
cgatgagaaacttatttctatgggacagagtcttttttttttaatgtggaagaatgtcttataaaacctgaatcctgaggctgatgaattgtgaaaattcytcaaaaggaaattatgctggtcatcacaggaacatctcaacgttcgagtaaactggaggactgtggctattcctgaaccttctttgagacagaatccctc

SEQ ID NO: 48193 - DNA, 201 bp, Homo sapiens
gtgatctgcccacctcggcctggcctgtattatgttttttatcttcccaataatctgtgaggtaagtacatgatttttttttgtacttttagtagagacgrggtttcaccatgttggccaggctggtcttgaactcctgacctcgtgatccgcccgcctcagcctcccaaagtgctgggattataggtgtgagccaccaca

SEQ ID NO: 48194 - DNA, 201 bp, Homo sapiens
tgggtctgggttcaagcgattctcctgcctcagccccccgagtagctgggattacaggcgcgccaccacgcctggctaattttgtatttttagtagagacrgggtctctcatgttggtcaggctggtctcgatctcccaacctcaagtgatctgcccacctcggcctggcctgtattatgttttttatcttcccaataatc

SEQ ID NO: 48195 - DNA, 201 bp, Homo sapiens
ctcggcttcccaaagtgctgggattacacgcatgagccaccgcgcccagcctgatagtatatatattatatgtatataagttaaatgttttcatgctgtaraagtaccaagactattttacctcccttttcttaggacatgagtttatcatttccctttgtaaccatgatcctgaaccttctggatcttgtttggtttaaa

SEQ ID NO: 48196 - DNA, 201 bp, Homo sapiens
tcccagatggggcggcggggcacaggcgctccccacatctcagacggtgggctgccgggcagagacgctcctcacttcctagatgggatggcggccgggasgaggcgctcctcacttcccaggtgggatggcggccgggcagagacgctcctcactttccagactgggcagccaggcagaggggctcctcacatcccagac

SEQ ID NO: 48197 - DNA, 201 bp, Homo sapiens
catctcagacggtgggctgccgggcagagacgctcctcacttcctagatgggatggcggccgggacgaggcgctcctcacttcccaggtgggatggcggcsgggcagagacgctcctcactttccagactgggcagccaggcagaggggctcctcacatcccagacgatgggcagccaggcagagacactcctcacttccc

SEQ ID NO: 48198 - DNA, 201 bp, Homo sapiens
acatggtaataaacgagttactaagaagtagtgaggtcctagctgatagtgtgtgtgtgtgtgtgtgtgtgtgtgtgtgtgtatgtgtatatatatatatwttttttttttgagatggagtctcactctgtcacccaggctggaatgcagtggcacaatctcggctcactgcaacctccgcctcctggattcaagcaattc

SEQ ID NO: 48199 - DNA, 201 bp, Homo sapiens; identical to SEQ ID NO: 14394

SEQ ID NO: 48200 - DNA, 201 bp, Homo sapiens
ctgggttcaagcgattctcctgcctcagccccccgagtagctgggattacaggcgcgccaccacgcctggctaattttgtatttttagtagagacagggtytctcatgttggtcaggctggtctcgatctcccaacctcaagtgatctgcccacctcggcctggcctgtattatgttttttatcttcccaataatctgtga

SEQ ID NO: 48201 - DNA, 201 bp, Homo sapiens
agacgggagagggagacgggagagggagagggagacgggagagggagacgggagagggagacgggagagggagacgggagagggagacgggagagggagaygggagagggagatggagagggagacgggcctgagtttgtttttgtccttataacatttacagattattttattttcatcatttaacaagggctgactact

SEQ ID NO: 48202 - DNA, 201 bp, Homo sapiens
gaactcctgacctcgtgatccgcccgcctcagcctcccaaagtgctgggattataggtgtgagccaccacatctggttcaagtacatgatttttatcctcmttttgtaggcaaggaaactggtttaaggggataagtaagttgcttaaggacactaagccagtacagggaagagccatatttctaagcaggtctgtttgct

SEQ ID NO: 48203 - DNA, 201 bp, Homo sapiens
gtgggcggggcacacccagtgcgcatgcgcagcaccccggcccggaaacagcgcggggtccgctatggcggcggcagccgagggcgtactggcgacccggmgtgatgagcccgcccgaggtacccggaatggatggggaggaagcgtccggtggggggcctggggctccgtctcgggtgggcgaggttgagtgtgtggtgg

SEQ ID NO: 48204 - DNA, 201 bp, Homo sapiens
tcactgcaacctccgtctcccaggttcaagcaattttcctgccccagcctccaaagtagctgggattacaagcacacgccaccacgcctggctaatttttwtttttatttttagtagagatgaggttttgccatgtcagccaggctggacttgaactcctgacctcaagtgatctgcccaccttggcctcccaaagtgctg

SEQ ID NO: 48205 - DNA, 201 bp, Homo sapiens; identical to SEQ ID NO: 14365

SEQ ID NO: 48206 - DNA, 201 bp, Homo sapiens
gccctgagacaggcctgttggaagttgggggaggccatgaatgggagagaaagaaaatacaactctgcaggcctctgtaacatagactaatgagaaaacartaacaaaaaagagttcatatccagcaacagtaatcaagaagtgcttccttggggaaagtgtattttgagcagggttgtgaagggaattattggtggaaaa

SEQ ID NO: 48207 - DNA, 201 bp, Homo sapiens
ttaaaaagaatggaaaattagtagatgagagacactaagtctgggccacagtcgtgcctgatcaactagctactgtcttctaaagcatctgccctgctagkgctcagaatcatgtcacgccacctaatctgtcttagcatagctggagagacactagcattattacttttccactcttttcctatattctttgttaataaa

SEQ ID NO: 48208 - DNA, 201 bp, Homo sapiens
cccaataatctgtgaggtaagtacatgatttttttttgtacttttagtagagacgaggtttcaccatgttggccaggctggtcttgaactcctgacctcgygatccgcccgcctcagcctcccaaagtgctgggattataggtgtgagccaccacatctggttcaagtacatgatttttatcctcattttgtaggcaagga

SEQ ID NO: 48209 - DNA, 201 bp, Homo sapiens
cattcctgaagttagatctaagtatttactcacatttaatctactataaggaggtatgatgcttcttcaagtttggaagtcacccttgcctttactttccrgtttaatggattgagcttattttgaatatagtaaaataaaaattaatagcccacctgtattcaatttttaccatgtaccaagcactgtgttaccttcttt

SEQ ID NO: 48210 - DNA, 201 bp, Homo sapiens
agaaaatggacaacctgcaaaattacctttctaacagtataaagggaaattggaacataatgatttgattttcaccctattttgtatgttttctagtttartagtagaacccatggaaaactggctacagttgatgttgaattgggaccctcagcagagaggaggacctgttgaccttactttgaagcagccaagatgttt

SEQ ID NO: 48211 - DNA, 201 bp, Homo sapiens
agggtttcgctatgttgtccaggctggtctcgcactcctgacctcaggtgatctgcccgcctccacctcccaaagtgggattacaggcgtgagccattgcrtccagccctgatgcttatttgaaaaagaaaattatattcttagagctgattttttaaaaagtttatttagcaagctgtctcagtttgcttctctgtggtc

SEQ ID NO: 48212 - DNA, 201 bp, Homo sapiens
ggataattgcttgaattcaggaggtggaagttgtagtgagctgagagatcatgccactgcacatcagcctgcgtgacacagcaagactctgtctcaaaagaaaaaaaaaaaaaatagaactgtaagattcaacaatgtcatttcttggtatatatccaaaggattttaaagcaggcttgtgaagagatatttgcactccca

SEQ ID NO: 48213 - DNA, 201 bp, Homo sapiens
gggtagcttggccatagctatctgcatttatgtgtccttttgtatgcattactttggagataagtcattaaatctgatgctgattgtggttcatttcctcmgctgggttttgggaatatggtgtacagtcttggggcatgtgaaagtgtctgacactgatttaatctctccagcaagttgttgggctgtaagcagaagatt

SEQ ID NO: 48214 - DNA, 201 bp, Homo sapiens
tgggagagatgggagtttttatttctgtaaccagttacaggtagaaggcctggaaattaccgccagaccaactcaaaattacaaagtttttccgtagtttrtttatcttctaagctatatgtctatgtgtaagtttgcattcatctaaagacataagtgattaacttcttttaatctgtagctgaggtctgagtcttgaag

SEQ ID NO: 48215 - DNA, 201 bp, Homo sapiens
acttctcagaaggaagacttaaacatgaggtgccacatgatgatgttttggttaacaacaaattgtgtatactatggtagtcccataagattatactactrtatttttactatgtattttctatgtttacatgcacaaatacttaccattgtgttacagttgcctacagtattcagtacagtcacttgctgaacaggtatg

SEQ ID NO: 48216 - DNA, 201 bp, Homo sapiens
aggatcgcttgagccctggagatagaggttgcggtgagctgagatcatgccactgcactccagcctgggtgacagagtgagactctacctcaaaaaaaaawtttttttgttgttttttcctttatccacccatctgcacactggtataaatatatatatttttaagaaaaaagtcatctgtattcatttcctaagggttcc

SEQ ID NO: 48217 - DNA, 201 bp, Homo sapiens
tgaagtagcaggatcgcttgaggcccaggaggtcgaggctgcagtgagccaagattacactactgcacttcagcctgggttgacagagcaagactttcttaaaaaaaaaaaaaaaaaaaacccagagcagaaatgaaaaacctgtgaattagcagtgacaaatagtgaacagtaatattaattttttgttgataatttagt

SEQ ID NO: 48218 - DNA, 201 bp, Homo sapiens
aaattccactgaaaatttaacagtatccccttctcatcgaagggattgtgtatctgtgcttctaatattagttggctttcataaatcatgttgttgtgtgtatatgtatttaagatgtacatttaataatatcaaagagaagatgcctgttaatttataatgtatttgaaaattacatgttttttcatttgtaaaaatgag

SEQ ID NO: 48219 - DNA, 201 bp, Homo sapiens
aattccactgaaaatttaacagtatccccttctcatcgaagggattgtgtatctgtgcttctaatattagttggctttcataaatcatgttgttgtgtgtatatgtatttaagatgtacatttaataatatcaaagagaagatgcctgttaatttataatgtatttgaaaattacatgttttttcatttgtaaaaatgagt

SEQ ID NO: 48220 - DNA, 201 bp, Homo sapiens
agaactgccatttaactgtttgacatatgtcctaagaaggctcttaggataatgaagtaaatgggttatttgcagaatggatttggactcatccgtcagarttgtcagtaactaacatatgtggagttttgagtagtttttgatggaaaaaagtttgtcccctgtcatttcatgaatttgaaagtaatttatgaaatggta

SEQ ID NO: 48221 - DNA, 201 bp, Homo sapiens
atactgtcatgttcatgcagggaaaaaggcagaaagaaatatggcatctccttaaaattgcctgtgtaagtaattattaatgaattatttaatgtgacatkgagttgctattattccttgcaaaggggatttttatcagcatgaggtgggccctcttgaagacatgtatattttgcattgggatgacatccatgttccttg

SEQ ID NO: 48222 - DNA, 201 bp, Homo sapiens
taataaatttttgagatctattttataactttgtatttctaagattagacttttttcagtgttttaaatcagttttgcaagaactcagattccaagccctrtattttattaattcctactcttttgctaaaagctgaatgactatccatttctgttattttctcagcttaagatgtgccgtatccaaagccagtggctctt

SEQ ID NO: 48223 - DNA, 201 bp, Homo sapiens
atcatctgcagccatttacctggtaagaaatggatgagaacttgggcatgcttaatgggaatggaaattttttcatttgtctttttttttctttctttaaktgtttaattgcctttgaaatatacaattaaatataattaaatggcaagaaatcttaatttgtgagaatcactttgtcaactgaggtagcttttgatttta

SEQ ID NO: 48224 - DNA, 201 bp, Homo sapiens
tccagtaatcagagttgaaggaagtaaaatttaatactttacttacttttttgcctttattaaaggcatttaagttttttagcggatgttaatgtttacaratgtcaccacaatacaggtaatttccaatttgaagtgtagttgcttgcaaaagtatatctgacagacattttcaatgtattttctagaaggaacacatta

SEQ ID NO: 48225 - DNA, 201 bp, Homo sapiens
acttgagcatcagagtagatttgtacaaaatgtgaggtgaatttttcttttaactcaatgatttctgttacttcaaagtatattttaaactttatttaggrtctgggattcgatatttgcatgaaaacaaaattatacatcgagatctaaaacctgaaaacatagttcttcaggatgttggtggaaaggtaggtgaaacct

SEQ ID NO: 48226 - DNA, 201 bp, Homo sapiens
tgcaatctaatctgaactgaccttgaatctttttatcccatttagtgtgaatattcctttattttgctgcttgatgatgagagggagggctgctgccacakactgtggtgagggctggttaatgtagtatggtatatgcacaaaactacttttctaaaatctaaaatttcataattctgaaacaacttgccccaagggttt

SEQ ID NO: 48227 - DNA, 201 bp, Homo sapiens
tcattttaaattccactgaaaatttaacagtatccccttctcatcgaagggattgtgtatctgtgcttctaatattagttggctttcataaatcatgttgktgtgtgtatatgtatttaagatgtacatttaataatatcaaagagaagatgcctgttaatttataatgtatttgaaaattacatgttttttcatttgtaa

SEQ ID NO: 48228 - DNA, 201 bp, Homo sapiens
catgagatttgtcagccttttccagtttcaaatgctttttgcctctttttacttttatgagccttatcatgaaatttacatgccctcagtatggatttggwaattttattcccttgtattttattatgacttattttctcatttgaatattcttttagagtatagtaattaatgtgtggtcactattgcagcccagcaatt

SEQ ID NO: 48229 - DNA, 201 bp, Homo sapiens
tatcatgaaatttacatgccctcagtatggatttggtaattttattcccttgtattttattatgacttattttctcatttgaatattcttttagagtatartaattaatgtgtggtcactattgcagcccagcaatttgcagaacagatttttagatttctttctttttttagctgctcaacaaaccagaaaattgttgtg

SEQ ID NO: 48230 - DNA, 201 bp, Homo sapiens
tgaatattttgattcatgatgtgcctcttctagcaatggaatactgttctggaggagatctccgaaaggtagtgtggatgttttgagatgagagagagtamatcacaaactttagcaatgtttgaatcatgttaaatataataaactagaataagaatcggaaaaactatggtctgcttcctgttttgtaaataaagtttt

SEQ ID NO: 48231 - DNA, 201 bp, Homo sapiens
gagagtaaatcacaaactttagcaatgtttgaatcatgttaaatataataaactagaataagaatcggaaaaactatggtctgcttcctgttttgtaaatmaagttttattggaacacagccacattcatttctttacacattgtctatggctgctttcttatggctgcagaagtgagtagttttaacagagactatgtga

SEQ ID NO: 48232 - DNA, 201 bp, Homo sapiens
agtatattttagttaaggaagtttgcctcagtttctccagagttgtaaaggagcaggagagtagttgtctgtttcaagttgcattatccagtagaactttytgtgatgatgtagaaaccttctatatttctgttggccacatgaggttattgactacttgacatgtagctagtttggctagagaacgaattttgaataaat

SEQ ID NO: 48233 - DNA, 201 bp, Homo sapiens
aagatgttatttgcatttttcaccatgttgacattttcattgatggtgcaacataaaatggctttcaccttagtatgaatcaaggcactagcgccaaactrtgctagtagccgttatattttttaccaccatgcagtcacagtttttaaaaaatgacagtttcacttacaaatgtccttgataaagcagtaaaaatattat

SEQ ID NO: 48234 - DNA, 201 bp, Homo sapiens
tagtcaatgaagaaagggtccaaggacaggttactaatggtgtgtaaaggtgggaatagttttgtactgaaatactctggttgtgcatataagtagtaacrgaaatgtaagtcttaggaatatgataagaaattgtgtgaatcaacagagatgcttgcctgtaatcttttgatgtttttttcttttccttcagacacagag

SEQ ID NO: 48235 - DNA, 201 bp, Homo sapiens
aaaggatgcatgctggcagcttttgtgacttcttttcttggtccctgggtggggatggatgaattaatcactttttgttttattatggtaaagtatacatmacacaacatttatcactttatttttaagtgtacagttaggtggcattaagtacattgacgttgttgtacagccataaccctatctccagaatattccgac

SEQ ID NO: 48236 - DNA, 201 bp, Homo sapiens
gaaacaagaactgccatttaactgtttgacatatgtcctaagaaggctcttaggataatgaagtaaatgggttatttgcagaatggatttggactcatccrtcagagttgtcagtaactaacatatgtggagttttgagtagtttttgatggaaaaaagtttgtcccctgtcatttcatgaatttgaaagtaatttatgaa

SEQ ID NO: 48237 - DNA, 201 bp, Homo sapiens
cagcccggtcaacatggcaaaaccccatctctactaaaaatacaaaaattagccaggtgtggtggcgggtgcctgtaatcccagctacttgggaggccgarggaggagaattgcttgaacccgggaggcggaggttgcggtaagctgagatcataccactgcactccagcctgggcgactccgtctctaaataaataaata

SEQ ID NO: 48238 - DNA, 201 bp, Homo sapiens
taataatcttttcctgttgcttatttatttatttattttgagacagggtctcactctgtcacctaggctggagtgcagtggcatgtttttggctcactgcmacctgcgcctcccaggttcaagcgattctcttgcctcagcctcccgagtagttgggactaaaggtgtgcaccaccatgcccagctaatttttgtattttt

SEQ ID NO: 48239 - DNA, 201 bp, Homo sapiens
gtttgttatttttaaatgaattaagacacgagtatttttaaatttctgtttaattcctgaaaaaccctttggggttctcaagaattttctagtgtaaaggkgtcctgagaccaaaaagtttgagaactgcttatctagactattctcagaagcttggctgctcaggaaagaagagaggtgggtgagtagctaaaagttgat

SEQ ID NO: 48240 - DNA, 201 bp, Homo sapiens
gagtcatactaccagcatttctgttttcttttataaaacaaatcctttttaggaaacaaatacttgtttcctaaaaacatatacttgtcctgagcaaactmtgtgtatctcagagtaaacaatcaatagtgtccagttgggtgaatgaatttactctccagaactggttttattaatattattgatattttatttctattt

SEQ ID NO: 48241 - DNA, 201 bp, Homo sapiens
gggcatgtatcaggttcttagtaaattatttattgatatgaatgagagctatagatagttctattatgcagtgtacccagaaacaactctcatcaatagtstttacatttgtattgattgtttgtagtatacaggtttctaaaattgaaatgagaaattataatcatgtaatgttggagtacatggcgagatagctcactt

SEQ ID NO: 48242 - DNA, 201 bp, Homo sapiens
aaaaaaggaagcaacaaaacagttactgaaatatttcccttttgaaaaaatagcttagcaagtctgattgtatgcatattttccaactgtttattatgaayatctttagatatgtagaagagttgaaagaagtgtactgaacctaccactaaaaataatgatgaaacagtagcatttaattattatttttttttgcctcct

SEQ ID NO: 48243 - DNA, 201 bp, Homo sapiens
caaatttatcttttgaatatcttaacaattttgagcttgccaggttctcaatttagaaaggcttgcatagttttctttcacttattgaataaagtccagascctttcattggtactcaaaacctatcttggtttcatatcaacttacactcctggacttatctcttactaatgccctgagaggccatcattttaggtacat

SEQ ID NO: 48244 - DNA, 201 bp, Homo sapiens
tgtgtaaaagtagatgtccattataggattttctattgctataagtggcagctgtcatagtgtgaaatctgcctaaattgggaaggcatggaaagtctcargtagtataattgtattgcaaatccgtatcagttttgaagatttccctactccccttttaaacataaagatttatattaaagaaaagtctcttaataagag

SEQ ID NO: 48245 - DNA, 201 bp, Homo sapiens
ctttaggtgagagtgataaaacggttcttacttgatttggggcccttaagcaggttgctgctctgggattaggttgtcttataaaaaggtaactcaccacscataacaatgctttttcctgtttaaagagagacctagttcttctatcagatgatttcttaaggcagcatgaagtagccagacacaaaaagagttaagatc

SEQ ID NO: 48246 - DNA, 201 bp, Homo sapiens
cttacaaaagagacctgaatgagatccctcatcccttctgcatgtgaggacagagcaagaagatggtcatctaggaaccagaaagcaggccctcaaatctrccttgttcttggacttcccagcctccagaactataagaaataaatttctgttgtttttatggcacttagtctatggtattttgttatagtagtccaaatg

SEQ ID NO: 48247 - DNA, 201 bp, Homo sapiens
acatctcgcatttgtttcatacttgtcataggaatcatagcatagtttctgctctgaagggcatctgtgagcctcttgttatagggcacggggaaagagtmcacattatggagtttatagtttacagactttaattcagtttgcagcaccactatttacctatctgtgaacctgagcaaatgtctctctatctcaaggaca

SEQ ID NO: 48248 - DNA, 201 bp, Homo sapiens
ggttactataaactactgatttgttaaaacttgaggaaattaccataaaatgtctactgaatcaatttttcctgcatttagtcttaatgtcaattctgtayatttcctctttcattaagaaaaatagcagtggccaggcatggtggctcacgcctgtaatcctagcactttgggaggccaaggcaggtggattgcttgagc

SEQ ID NO: 48249 - DNA, 201 bp, Homo sapiens
tatatatgagagagagttctgaaaagacctgttataaaatcagtttcaggcacttttcccttgtatgctgttgtgtgtttgaaggtcagttttaaagcatkggtgtaatagtctcatggtttatctttttaaaaagcattgcctcaagagagctgtggataaatatatttaattagtaaagctaaaaagttttgttgtctt

SEQ ID NO: 48250 - DNA, 201 bp, Homo sapiens
gctgcggccgggcgcgggcgggccctgggagatgcgggagcggctgggcaccggcggcttcgggaacgtctgtctgtaccagcatcgggtgaggcggggcrtgagagggagcggcggtgggttggagcggcggtgggtttgagcgtctgtggaacacagggctgacagtgtgggatagatggttggtgggaccttgggcag

SEQ ID NO: 48251 - DNA, 201 bp, Homo sapiens
ttcttcaactaaaatggtataagatgagtggatatatttggttttagtcaatgaagaaagggtccaaggacaggttactaatggtgtgtaaaggtgggaayagttttgtactgaaatactctggttgtgcatataagtagtaacggaaatgtaagtcttaggaatatgataagaaattgtgtgaatcaacagagatgcttg

SEQ ID NO: 48252 - DNA, 201 bp, Homo sapiens
ggctggagtgcaatggcacaatcttggctcactgcaacccccacctcccgggtacaagcgattctcctgtctcagtctcccgagtagctgggattataggygcacaccaccacgcccagctaatttttgcatttttagtagagacagggtttcaccgtgttggccaggctgctcttgaactcctgacctcaagggatctgc

SEQ ID NO: 48253 - DNA, 201 bp, Homo sapiens
tttatatcttttatcttaacccaatttttaatttaaatggagatgtttattaattaaaattagtttcagagtttcagggatttttgaggaattttttgttyggaggctgatatgttacagaagaaaggttatatccactgactgatgtcttttatagatcactcctacagtgacagcacagagatggtgaaaatcattgtg

SEQ ID NO: 48254 - DNA, 201 bp, Homo sapiens
ttactcaatacaatgctctgtgaaatacttgttggcaatatgaacttgctttaaaatgggttcattattcaaataaaatattgtttcaagttgtagattaytgaagtcattaaattaccttcacttatcagagcgtgttttctcttttatagggaacagcgtgccattgatctatataagcagttaaaacacagaccttca

SEQ ID NO: 48255 - DNA, 201 bp, Homo sapiens
taagtcttcttagatataatgctaacttaacaaaaatgaagaacactttgatctcagcatcacaacaactgaaagctaaattggagttttttcacaaaagyattcagcttgacttggagagatacagcgagcagatgacgtatgggatatgtaagtgtctgtgtaatgtatttgaaaggagcatctggtttcttgaagcca

SEQ ID NO: 48256 - DNA, 201 bp, Homo sapiens
agggctgacagtgtgggatagatggttggtgggaccttgggcagtatttgggggccagtgggcttgtgtgtgtgtattagagagaaagatactatgcctgygtgtccaaagttgtatttgaggtactgggcatagatagagctgttgcggggaacttgggtatgactgtcaggctgtgaccaggtgtttagtgagtgtgac

SEQ ID NO: 48257 - DNA, 201 bp, Homo sapiens
atggaataagaggataaaaaggttgaagatgttaacaaatagtgatttaagtgatagaagttgtagctagagtaaaatattaaaatctaagatttcaaatrgagcaagtccaattctttttctttaatcaatatttctgggccaggcgtcgtggcacatgcctgtaatcccagccactttggaggctgaggcaggagaatt

SEQ ID NO: 48258 - DNA, 201 bp, Homo sapiens
attttttccccttatcctgtacatttgtccacggtcctaagttattacactccttaatgtcagtacttaccctgaggatgtgggtggggatacccatggtrtcctggggtgggaaatccaagttctttatctttttgtgtccctattcaaggtagtggggaccagggggcagtcaaaatcatagagccaagatacaagtaa

SEQ ID NO: 48259 - DNA, 201 bp, Homo sapiens
gttggccttttttggtttttaataaaagcatttatttcataggagtgttaagaattttccaagtataactaagttacaaactatttccctactcattatayctctggtccaaggtattgactcttaaatgccctaaaacttgaaattttttctgaattaaagttctggattaaaaacttcagatattttctcgaattatag

SEQ ID NO: 48260 - DNA, 201 bp, Homo sapiens
aggaatctattttttatctccacaagtttgccttttctgaacattccatataaatggaattatgtaatatatagtcttgtgtctgactttttttacttgcyttgtatttttgaagcccgtgcatgttgtagcatgtatcagtacttcattcgttttgattaccgattagttttttcactgtatatatctttttgcatttgt

SEQ ID NO: 48261 - DNA, 201 bp, Homo sapiens
tgttctttgggttttggtgattgttcactttagcccatacaaaagtttgggtcttttttcctcaacaaaagtttggactctgttatctgtaagagatatgstaatacacattgattttgttcatttgcatttcaaagtaggaaatctggtgcataagtatttagaaaacctaggattttcaaagatccttgaacaggattt

SEQ ID NO: 48262 - DNA, 201 bp, Homo sapiens
tatgattagtagaaatggacttttggtgttgtgttctgtatctcatacttgaagtttctatatggagttatatgagaactctgaaaaatggatttatatartttggaaggtgaaaaggtagatattaaatctccatgagatcattcaagagaagatttactttcttgaggatagggctctcacaggagaatgaaacttcac

SEQ ID NO: 48263 - DNA, 201 bp, Homo sapiens
tcctggcatcataaggagttggtgtaatcattttaaattccactgaaaatttaacagtatccccttctcatcgaagggattgtgtatctgtgcttctaatmttagttggctttcataaatcatgttgttgtgtgtatatgtatttaagatgtacatttaataatatcaaagagaagatgcctgttaatttataatgtattt

SEQ ID NO: 48264 - DNA, 201 bp, Homo sapiens
gttgtgtagttacgatgatccatataaacttgagcatcagagtagatttgtacaaaatgtgaggtgaatttttcttttaactcaatgatttctgttacttyaaagtatattttaaactttatttagggtctgggattcgatatttgcatgaaaacaaaattatacatcgagatctaaaacctgaaaacatagttcttcagg

SEQ ID NO: 48265 - DNA, 201 bp, Homo sapiens; identical to SEQ ID NO: 14528

SEQ ID NO: 48266 - DNA, 201 bp, Homo sapiens
gagcccaggaggtcaaggctacagtgagctgagatcataccactgtactccagcctgggtgacaagagcaagaccctgtctgaaaaaaaaggaaagcatcttgatgccactaaactgtacacttaaaaatggttaaggtggtaaattttatgctatgtgtgttttaccacaatcaaaaaactatttcatttcagttaacaa

SEQ ID NO: 48267 - DNA, 201 bp, Homo sapiens
tcgccatgtgggcctcttcatggggaagcttgaatgttttcatgacatggaagctagctttccccagaaagatcttttcctcagaaagagtgagtgatctragagagagagagagagagagagagtgaacgagcgagcaagatgaaaaccgacgtatcttttatgatctttacttggaagtgagactccatccttttccac

SEQ ID NO: 48268 - DNA, 201 bp, Homo sapiens
tttccatttcagacctcaccacactgaactgtagttttgtgtttagtttttttgtcccttctgctaaacagtggttccatcagagaaggaacagcacctgctttttttttctttttcttttttttcatttttcatacttaacccagctcctagacttcacctgtcttgttcaagtctgtttttccatcatagtatctagca

SEQ ID NO: 48269 - DNA, 201 bp, Homo sapiens
ttagtgaaaatagttgttggcctcttggaggtgttggaaccttggtgatgcctcttctcttaggaacctttcacgtatgcttggcaccaaatatctctgctttttttttttttaatccaaagacttcaggacattcctgaagttagatctaagtatttactcacatttaatctactataaggaggtatgatgcttcttcaa

SEQ ID NO: 48270 - DNA, 201 bp, Homo sapiens
cttaacctttacctcatacaagaccagcttgtcactgctccttatgcctcaaacccgttatctacctttgtgctttgacagatgctatccttctgcctggdtatccatttctgtgtatcttctcacctacactggcatatctttaagagcttttctttaaatggtctctgccacaaaatttgtcatttaaaggctatattc

SEQ ID NO: 48271 - DNA, 201 bp, Homo sapiens
tctgctggaaagagtactggatggggaatcagaggcttgaattctagattgagtaatttactgaccgttacctcaggcaaatctgcgtttcccatttcctycttctgcaaaatggggttgaaacctaactttcctactcagtgagtatattgtgacagtgtatttaagaggatgtttgtgaaaatgctttgaaaactataa

SEQ ID NO: 48272 - DNA, 201 bp, Homo sapiens
atcagaggcttgaattctagattgagtaatttactgaccgttacctcaggcaaatctgcgtttcccatttcctccttctgcaaaatggggttgaaacctarctttcctactcagtgagtatattgtgacagtgtatttaagaggatgtttgtgaaaatgctttgaaaactataaactattatgtacttgcaagatattatc

SEQ ID NO: 48273 - DNA, 201 bp, Homo sapiens
tctgtgccctaatgtgcattatacttaaatgcatgttaaaaaaagatatacttttacactttaaaatttgtagacacatagcaacacatgcaaattaatayacatgtgaaattgtatttcatatactattttcacatttaaaaaataacattatctcctcttatactgcttttattttactgaaatgtattcagtttagtc

SEQ ID NO: 48274 - DNA, 201 bp, Homo sapiens
acatgtatgtatagcacttagcatgtctgaggaaatgcagtatgactggagtgtagagtttcaggagagagaaaacctaaatataggagagagagaaaacstaaatataggtttttttgtttgtttttaataaaaacatgttaatgggcaataggtttgttatttttaaatgaattaagacacgagtatttttaaatttct

SEQ ID NO: 48275 - DNA, 201 bp, Homo sapiens
ctttgatctcagcatcacaacaactgaaagctaaattggagttttttcacaaaagcattcagcttgacttggagagatacagcgagcagatgacgtatggratatgtaagtgtctgtgtaatgtatttgaaaggagcatctggtttcttgaagccatctgttattttgccttcttaactcagccagttgttttacttacct

SEQ ID NO: 48276 - DNA, 201 bp, Homo sapiens
aaaaaaaaattctgactcccagttttctggctaatgaatcagataccacagatacacagtgatagcatttgtttaggttatattttttaaaactttgaggyagccctgtcaacataccatgaagctcagaaataaactgctacccaggtagcttctttgagtgtcaccttgagtgacaaactgtaacaagattgtgtctgt

SEQ ID NO: 48277 - DNA, 201 bp, Homo sapiens
cttctcacatgactgctgtgaggattaaatgggaaaattataagcagagagtagcaaatattattattattgcatttaggcttaattattgtccaaagaawataccagcatgatgcataagcaactttcaactcctttagccattttctgaaatataacaattaatgatttttttttaaaatcgaggtcacattttaaact

SEQ ID NO: 48278 - DNA, 201 bp, Homo sapiens
tacagatcattcttccagttatcacagcaatcttatatttaggtattattttgcaaatgaggaagttgaagcttatagaatcacatagctggtggttggtraagtgtggatttgaaataaatactttctgactctaatatctgtgcttaattccattttgattctcaaacttggttatgtggcagaatcaccaggaaagct

SEQ ID NO: 48279 - DNA, 201 bp, Homo sapiens
cggataaacatgaaattccaagcaacctagttcaagggcctccttcctttaggtaatgaaagtttgatgaattgtcctactgtttctaaatatgtggttartcatccaagaaaaattgttcccttggccagaggctgcatttgtgtctagggcttgggttagtatgggttaaagatagccaagactattgttctcaagcac

SEQ ID NO: 48280 - DNA, 201 bp, Homo sapiens
gcaaaatacagcttccaattatacagctgcgtaaagtgtgggctgaagcagtgcactatgtgtctggactaaaagaagactatagcaggctctttcagggrcaaagggcagcaatgtaagtggattctgttgtttataagcacaatgcaatgtgcatcatatactcaagaattaatcttgccggttttcactaatcaatat

SEQ ID NO: 48281 - DNA, 201 bp, Homo sapiens
gttttattatggtaaagtatacataacacaacatttatcactttatttttaagtgtacagttaggtggcattaagtacattgacgttgttgtacagccatmaccctatctccagaatattccgacttttttgttgttgttgtacatctataaacttcccatagaatattctttgtgaaaaggtagaatttcacagagttga

SEQ ID NO: 48282 - DNA, 201 bp, Homo sapiens
ttataggtaatctttatatcttttatcttaacccaatttttaatttaaatggagatgtttattaattaaaattagtttcagagtttcagggatttttgagraattttttgtttggaggctgatatgttacagaagaaaggttatatccactgactgatgtcttttatagatcactcctacagtgacagcacagagatggtg

SEQ ID NO: 48283 - DNA, 201 bp, Homo sapiens
tctaacagtataaagggaaattggaacataatgatttgattttcaccctattttgtatgttttctagtttagtagtagaacccatggaaaactggctacasttgatgttgaattgggaccctcagcagagaggaggacctgttgaccttactttgaagcagccaagatgttttgtattaatggatcacattttgaatttga

SEQ ID NO: 48284 - DNA, 201 bp, Homo sapiens
gacaagagcaagaccctgtctgaaaaaaaaggaaagcatcttgatgccactaaactgtacacttaaaaatggttaaggtggtaaattttatgctatgtgtrttttaccacaatcaaaaaactatttcatttcagttaacaaaagtcagctagggccgggcgtggtggctcacacctataatcccagcactttgggaggcca

SEQ ID NO: 48285 - DNA, 201 bp, Homo sapiens
gctagctttccccagaaagatcttttcctcagaaagagtgagtgatctgagagagagagagagagagagagagtgaacgagcgagcaagatgaaaaccgaygtatcttttatgatctttacttggaagtgagactccatccttttccaccacattctgtttgttacagtgagtcactaagtacagcctacattcaagggga

SEQ ID NO: 48286 - DNA, 201 bp, Homo sapiens
agctttatctgacccattcttttttttttcctttgagacggagtctcactgtgtcacccaggctggagtacaatggcgtgggctcactgcaacctctgcckcctggattcatgggactataggcacgtgccaccacacccagctaattttttgtatttttattagaggtggggtttcgctatgttggccaggctggtcttg

SEQ ID NO: 48287 - DNA, 201 bp, Homo sapiens
aggaggaaggagatggggaagccagttttgcaaaccatggactgagcggttttggagatcttgctggcctgagcagcgtctgggagatgtgtcctttctgraatagttggccacactgctgctatgaaaagtgtggtgggaatacccacaaagccagcatggccttccctgccatgccccagacagtcacatctgacactc

SEQ ID NO: 48288 - DNA, 201 bp, Homo sapiens
actgctgctatgaaaagtgtggtgggaatacccacaaagccagcatggccttccctgccatgccccagacagtcacatctgacactcacctgccattcccrgctgtagcagagacccacagagctttatctgacccattcttttttttttcctttgagacggagtctcactgtgtcacccaggctggagtacaatggcgtg

SEQ ID NO: 48289 - DNA, 201 bp, Homo sapiens
atgccccagacagtcacatctgacactcacctgccattcccagctgtagcagagacccacagagctttatctgacccattcttttttttttcctttgagayggagtctcactgtgtcacccaggctggagtacaatggcgtgggctcactgcaacctctgcctcctggattcatgggactataggcacgtgccaccacacc

SEQ ID NO: 48290 - DNA, 201 bp, Homo sapiens
tccctgccatgccccagacagtcacatctgacactcacctgccattcccagctgtagcagagacccacagagctttatctgacccattcttttttttttcytttgagacggagtctcactgtgtcacccaggctggagtacaatggcgtgggctcactgcaacctctgcctcctggattcatgggactataggcacgtgcc

SEQ ID NO: 48291 - DNA, 201 bp, Homo sapiens
cagactgctcgtaaatccaccggtgggaaagccccccgcaaacagctggccacgaaagctgccaggaaaagcaccccctctacctgcggggtgaagcctcmtcgctacaggcctgggaccgtggcgcttcgagagattcgtcgttatcagaagtcgaccgagctgctcatccggaagctgcccttccagaggttggtgagg

SEQ ID NO: 48292 - DNA, 201 bp, Homo sapiens
ttggaagatactaacctgtgtgccatccacgctaagagagtcaccatcatgcccaaagacatccagttggctcgccggatacggggagagagagcttaagkgaaggcagtttttatggcattttgtagtaaattctgtaaaatactttggtttaattggtgactttttttgtaagaaattgtttatatgttgcatttgtac

SEQ ID NO: 48293 - DNA, 201 bp, Homo sapiens
gggcagcggaagcagcgcggaggtcggagaagtggcctaaaacttcggcgttgggtgaaagaaaatggcccgaaccaagcagactgctcgtaaatccaccrgtgggaaagccccccgcaaacagctggccacgaaagctgccaggaaaagcaccccctctacctgcggggtgaagcctcatcgctacaggcctgggaccgt

SEQ ID NO: 48294 - DNA, 201 bp, Homo sapiens
tttcactcaggatgaatgcgaaaagtgactgtttacagacctcagtgatgtcagcactgttgctcaggagtgacaagttgttaatatgcaaaacggatgcrtgatatttcttgcttctcatgatgcatgtttctgtatgttaatgacttgttgggtagctattaaggtactagaattgataaatgtgtacaacagggtcct

SEQ ID NO: 48295 - DNA, 201 bp, Homo sapiens
tgacttgttgggtagctattaaggtactagaattgataaatgtgtacaacagggtccttttgcaataaaactggttatgacttgatccaagtgtttaacarttggggctgttaagtctgaccatacatcactgtgatagaatgtaggctttttcaagggtgaagatacaaaccttaaccacagtgtaacttatagtttcct

SEQ ID NO: 48296 - DNA, 201 bp, Homo sapiens
atggcccgaaccaagcagactgctcgtaaatccaccggtgggaaagccccccgcaaacagctggccacgaaagctgccaggaaaagcaccccctctacctrcggggtgaagcctcatcgctacaggcctgggaccgtggcgcttcgagagattcgtcgttatcagaagtcgaccgagctgctcatccggaagctgcccttc

SEQ ID NO: 48297 - DNA, 201 bp, Homo sapiens
ggggctgttaagtctgaccatacatcactgtgatagaatgtaggctttttcaagggtgaagatacaaaccttaaccacagtgtaacttatagtttcctttaaaaaaaaaaaattaaacctggcagctatagaatacaatatgtgcatttataatagctattttatatattgtagtgtcaacattttcaaattaaatgtttt

SEQ ID NO: 48298 - DNA, 201 bp, Homo sapiens
taagaggaaacagtactgaagttctttttcttgtggcatttgtattataaaaacttggtgtaggggaggagcacaaagctctagcccactgaacctctgcyggttaagatggtgttaggttaggttacatctggttactgtcctgggaaaatcatttttatagagatggccttccaagtggttttaaaatttatcttattg

SEQ ID NO: 48299 - DNA, 201 bp, Homo sapiens
tgaggcagcagaatggcttgaacccaggaggcggagcttgcagtgagccgagatcacgccactgcactccagcctgggcgacagagcgaaactccatctcaaaaaaaaaaaaaaaaaaaaaaaaaaagatgccagggctggctgggcacagtggctcacacctgtaaccccaacactttggtttgggaggccaaggcggat

SEQ ID NO: 48300 - DNA, 201 bp, Homo sapiens
gctgaggcaggacgatcattggaacccaggagtttgaggctgcagtgagtgaaagagtgagaccccatccctaaaatacacacacacacacacacacacaccccccaagtaaaatttcagctggaatataaatcgtgggtattatactgatttatggagagaattatgctaagtctttcagatgaggaaaacatataagaa

SEQ ID NO: 48301 - DNA, 201 bp, Homo sapiens
ctgaggcaggacgatcattggaacccaggagtttgaggctgcagtgagtgaaagagtgagaccccatccctaaaatacacacacacacacacacacacaccccccaagtaaaatttcagctggaatataaatcgtgggtattatactgatttatggagagaattatgctaagtctttcagatgaggaaaacatataagaaa

SEQ ID NO: 48302 - DNA, 201 bp, Homo sapiens
atgaactctgtaggtggttctatcatgcagttagttttcagaaccattcacactgacagtaaaggctatttattcccagcagttgaaagaccactaaggacacaggaatggttagcaaagctacttaaagatgccagggctggggccgggtgcgatggctcacgcctgtaatcccagcactttgggaggccaaggtgggca

SEQ ID NO: 48303 - DNA, 201 bp, Homo sapiens
agatagctagatagataatagataaataaggtagatgacagattagatacagatgataaacagatatgctatcagtctagatctattactcacagtcagtygtatcacagtgtaattccatcaacttcatttgcagcaaaagaacagcccctgatgtacgcctgtttcctgaatatttggaaatattaatattaatataga

SEQ ID NO: 48304 - DNA, 201 bp, Homo sapiens
ttttagtctttacaatgtttttttctattatgcaatattctctcaaatactttatgtccatccacgttgtctgagacatgccactttaacattctagttaygctgtagctgtcattttaccctaagccgttagtagtactgatccacataaaattgggctgtttaggtgtttaactgtttaaatgtataatatatctgata

SEQ ID NO: 48305 - DNA, 201 bp, Homo sapiens
atgtcagggcttatgttgaaccttaactgagagcaagattcaaaagacactgaggcttatttttctttcttatatctatagttacacagggagctgtctartcttggatgtatccaagttgatatctggttttatccattgaaacccacagtgaaaatggtaaataggtgctaggtgtttggatttttttaatccaatgta

SEQ ID NO: 48306 - DNA, 201 bp, Homo sapiens
ccttttctttcactcttctgcaagacaaccccataagaaagctgaaacctgcttttgtgaaagcctatgattactataagacaggtgagcaaaacagaatmctagataaactcagttctttccagtgtggtgtctttgatggaaaaataaaataaaagccaatgtgtttggggtttttttcttttttactttatatagatt

SEQ ID NO: 48307 - DNA, 201 bp, Homo sapiens
agggctggggccgggtgcgatggctcacgcctgtaatcccagcactttgggaggccaaggtgggcagatcatgaggtcaggagatcgagaccatcctggctaacacaatgaagccccgtctctacaaacaaacaaacaaacaaacaaaatacaaaaaattagccggatgtggtggcaggcacctgtagtcccaactactcg

SEQ ID NO: 48308 - DNA, 201 bp, Homo sapiens
atgtccatgtgtacaaattatttagctcccacttataagtgagaatgtgaagtatttgacctcctgtttctgagttatttcacttgagatagtagcaacawgggtggaagtggaggccaaacctcaattcttaaaggaataaaagtgtggtaaacccttgtacatcttgttttcagtttaatctgtctccataacttattt

SEQ ID NO: 48309 - DNA, 201 bp, Homo sapiens
tcaggagatcgagaccatcctggctaacacaatgaagccccgtctctacaaacaaacaaacaaacaaacaaaatacaaaaaattagccggatgtggtggcrggcacctgtagtcccaactactcgggaggctgaggcagcagaatggcttgaacccaggaggcggagcttgcagtgagccgagatcacgccactgcactcc

SEQ ID NO: 48310 - DNA, 201 bp, Homo sapiens
aagtgagaatgtgaagtatttgacctcctgtttctgagttatttcacttgagatagtagcaacaagggtggaagtggaggccaaacctcaattcttaaagsaataaaagtgtggtaaacccttgtacatcttgttttcagtttaatctgtctccataacttattttttcttccttggcctacaaaactactgccaaaacta

SEQ ID NO: 48311 - DNA, 201 bp, Homo sapiens
cccatccctaaaatacacacacacacacacacacacaccccccaagtaaaatttcagctggaatataaatcgtgggtattatactgatttatggagagaaktatgctaagtctttcagatgaggaaaacatataagaaatatcatgcaagaaaaaagaagcaaatatggaacaagaactgaaagaacacatacccgcgtga

SEQ ID NO: 48312 - DNA, 201 bp, Homo sapiens
tgtttcagatgaagcaaatttgctgaatacagtgtcccctgcagccgataggcagtttgctctacatatcccaagccttcattttgctctcaaaagcagtyctcctaaatacaaaatcatctacatcttttattagttgatatcagatttatcatactgcaaggtaacgcagaactatacagctttggagaggaacactaa

SEQ ID NO: 48313 - DNA, 201 bp, Homo sapiens
attaaaagcaaataaatattctttctgacactttcagttttttttttcatgtactggaattcctcttaatctagaattgggagacctagttttgtttctctttttttttttttcgctctaccaaaattggaggggcctggtgttttacactatctaaagcccagagacttgaatttgtaattttatttttaacctatgcca

SEQ ID NO: 48314 - DNA, 201 bp, Homo sapiens
cctaggatttagatccctctcagatgttcaggcagaataattttgtcaggacaaaagtaaggtcacggaactatatgaaaatggattatgaatcctaagayatcagcctattctcccctatgtctaagaagaatattcctcagcttatgactggaatgtcttgctaggggtgctgggtaagttttgtggaggtccccacca

SEQ ID NO: 48315 - DNA, 201 bp, Homo sapiens
gccagtgtctagcttactaaaaaaagagttgtatataatatttaagatgctgagtatttcataggaaagctgaatgctgctgtaaagtgctctttaagtcttttttttttttaatccccttctaatgaatgaaactaggggaatttcaggggacagagatgggatttgttgtatgataaactgtatgtagtttttagtctt

SEQ ID NO: 48316 - DNA, 201 bp, Homo sapiens
agatcgtgccattgcactccagcctgggcaacaagagcgaaactccgtctcagaaaaaacaaacaaacaaacaaaaaaacatttaattacacatatacacmcagatattacacatattcagtgcattcagaatcccagcaggatgtttgtggaaattaacaacttattctgaaattgttttgataatgaatagggccaaga

SEQ ID NO: 48317 - DNA, 201 bp, Homo sapiens
ccttatagttttctatcttatttttactgaggcttcctatttctttgccaagcctatgttttcatttatttcaaacatgttcataattgctcactgaagcatttttgtcgtggctgctttaaaatcttggtcagataattctaatgtctttgtcatcttagtgttggccttttcatttagtttgagatcttcctgattctt

SEQ ID NO: 48318 - DNA, 201 bp, Homo sapiens
aaaaccagaattataggtcaggtgcagtggctcacactcaatcctagcacttgggaggccaaggtgggaagactgcttgaggctaggagtttgagaccagygtgggcaatgcagtgaaaccctatcttgataaaaaaaaaaaattaacaccctccccgcccattatggtagcacaatgtagatagaattatcctgtaagcg

SEQ ID NO: 48319 - DNA, 201 bp, Homo sapiens
tgaatattaaaaaacgctttacttctgaatatataaaaaagccagaagaaggaatctagaaagtggaattggggaagttagagtaaataatgatgtccttyaaagcatgcatgccaactaaggtgaacttaacatatgttaaattcatcgtaataagaaccctctccatatccttaaatgtgagttaacacccttataaag

SEQ ID NO: 48320 - DNA, 201 bp, Homo sapiens
catggttaaggatgagattgtatggggtctgttctcagctgtaactattaatcaattagaaagcagatagtattacctttcttcctttaaaacatagtgcygagtgatatgatgcctatgagaatagaggcaaaattcacagatagtttcatagctgatggtgtcatttgaacaaataagatagattgtactggaggaatc

SEQ ID NO: 48321 - DNA, 201 bp, Homo sapiens
gtgagctagttgtgtgcttagtatcaaatagtattcatggtaaatgctcaaaacttccccagaggggaatcacgttaatgcaaatgtgcaaaataaaaagrtgtgtcttaaatttaaggatgcatccttaattgtgtacagcttcattattttacaggattgtttgtggcatttcttacttcaaaacctgattttaaaaaa

SEQ ID NO: 48322 - DNA, 201 bp, Homo sapiens
tctctatcaaccctagtcgaaggccaaattatgggccatagttaaggaatttcctgacccttatgaagatcggatttgctttaccaaagaatttgaactcmcaattaaaatctatgacccaggtcattctgacatttatcggcttgtctacatgctggtttcagctgcttaagctaaggaatagctagaaaaagcacagtg

SEQ ID NO: 48323 - DNA, 201 bp, Homo sapiens
ccaggagcttgaaaccagcctgggcaacatggggaaacccatctctacaaaaaatacaaacaaaaaactcaccagacgtggcggtacatgcctgtagtccwagctacgtcggaggctgaagtgagaggatcacctgagcctgggaggttgaggaaatgaagatactaaaataaaaataaaatttaaaaaggcatgcatggt

SEQ ID NO: 48324 - DNA, 201 bp, Homo sapiens
cccagtctaaagactacattgaaaccaaagaaagtgaaaactctatctgggaacaggataaaaagcaaccagatcagtaaactgcagaaggaatttaaacrtcatagtaagtttgatattacaacattagtacttaataattgttttgttatttttggctgggggtggtgtatggcatgtgtggatcattttttcctttat

SEQ ID NO: 48325 - DNA, 201 bp, Homo sapiens
tatagcacttgttatgtgatacatgatgtgggggtgattggtgggcgaaaatggtctgttcaataagtgttgctaggatattaagaacaacatggttattcatgtggaaaaattgggcttgggttccctacctcacaccatagacaaacaccaattacagatgcattaaagtagaaaatagattatgacttttgagtggga

SEQ ID NO: 48326 - DNA, 201 bp, Homo sapiens
cccatctttggtctgacccaccaccccacttaaaagttccacagtctttgggttaggctggctttctccagaaatgttcaagtatggagtgataaagtcaytgggagacatgaaaaattcaccatttttctcaatgcttgcatacttcaaaaatattgttataagctcagttggatctgctctctcagttaaagccacctt

SEQ ID NO: 48327 - DNA, 201 bp, Homo sapiens
tattcagtattttcttccaggtggtagatgcaagggctggacccagtctaaagactacattgaaaccaaagaaagtgaaaactctatctgggaacaggatraaaagcaaccagatcagtaaactgcagaaggaatttaaacgtcatagtaagtttgatattacaacattagtacttaataattgttttgttatttttggct

SEQ ID NO: 48328 - DNA, 201 bp, Homo sapiens
tgtaattgttgcttcactgtactgcaggtatccccctgtttaaaaaaatgtatgaataccgtgcctcgtgtaatctgctttgaaacacaggttataacctrttggaacctgtgcttcctgggcgcacatcctcaagctcggcctgataaactttgtttgattgagattcccatcttggtctctcaatttgggttgacacag

SEQ ID NO: 48329 - DNA, 201 bp, Homo sapiens
gtgggcgacaccgcgagggcttcccgtttatgggcggccgtccgcgctgtaagatggccagggaagccaacttggctggagatggaggcggcggcgttgtstacgccgcgggagtcagtgaactccgcagggcactgctttttgtgctctacgtgacagaccacgtgcttcgggctgcgaccctggtccttgtccgaatgt

SEQ ID NO: 48330 - DNA, 201 bp, Homo sapiens
gtttatgggcggccgtccgcgctgtaagatggccagggaagccaacttggctggagatggaggcggcggcgttgtgtacgccgcgggagtcagtgaactcygcagggcactgctttttgtgctctacgtgacagaccacgtgcttcgggctgcgaccctggtccttgtccgaatgtccagccccgcgtgagccgtgggatg

SEQ ID NO: 48331 - DNA, 201 bp, Homo sapiens
gtattcatggtaaatgctcaaaacttccccagaggggaatcacgttaatgcaaatgtgcaaaataaaaaggtgtgtcttaaatttaaggatgcatccttarttgtgtacagcttcattattttacaggattgtttgtggcatttcttacttcaaaacctgattttaaaaaatgcttctcttccccatttttagattgcatg

SEQ ID NO: 48332 - DNA, 201 bp, Homo sapiens
aagttgcttgggggtggggtggagcagagagaactctttaatggttccttgttacagccctcaacaaagatatgtcaattcccttggctttacagactatygcccagaagaaaagatgtttggttttcacaagccaaagatgtaccgaagtatagagggctgctgtatttgcagagctaagtcctccagttctcgattcac

SEQ ID NO: 48333 - DNA, 201 bp, Homo sapiens
ctaaagcagaatcaaagctcctcttggggaaatggcaagtctttaggataggcaagaccctgtatgaatagtaccaaagcattaccgcatggtagagaacrcactcgattaaaaatgttaagctatctgaaaaataaaatgtgcaagtcttcaggatggcacaaaacaaaggttaatgcttcttggggcacatttcttaga

SEQ ID NO: 48334 - DNA, 201 bp, Homo sapiens
aaatcagccagtcgtggtggcacacacctgtaatcttagttcctcaggaggctgaggcaggagaattgcttgaacctcagaggcggaggttgcaatgagckgagattgtaccactgcactccagcctggcgacagagtgagactctctcaggaaaaaaaaaaaaaaaaagatcgtagattagattaaaatccagcgatgct

SEQ ID NO: 48335 - DNA, 201 bp, Homo sapiens
gaggttgagactgcagtgagctgtggtcatgccactgcacttcagcctgggtgacagagtgagatccggtctcaaggaaaaccaaaagataaaaataattaaaaaaaaaaaaaaacccaaattttctttagtctgtttctttccatgcagcatgtaacataggatttgatgccttataaatatttaataagtacttgattg

SEQ ID NO: 48336 - DNA, 201 bp, Homo sapiens
aggctgaggcaggagaatcgcctgaacccaggaggtggaggttgcagtgagccgagatcgtgccattgcactccagcctgggcaacgagagcaaaactgcstctcaaaaaaaaagaaaagagtgatcttttcattaaatggtgctgggtgatctacatatccatggggaagagggccagggaagaatctttgacccttacc

SEQ ID NO: 48337 - DNA, 201 bp, Homo sapiens
attggtagtagtgtagtagtaaacactttagaacagtgcctagtgcatagtgtaagtactttaaagtactttaaaccactttgtttgcatttatttaatctttttttttttttttttgagacagagtttcactctgtagcccagactggagtgcagtggtgttatcttggctcactgcaatgtccgcctcctgggctcagg

SEQ ID NO: 48338 - DNA, 201 bp, Homo sapiens
caaccaggctggagtgcagtgcagtggcacggatctcagctcactgcaacctccccctactgggttcaagcgattctcctgcctcagcctcccgagtagcygggattacaggtgcatgccaccacacccagctaatttttgtatttttagtagagacagagtttcgccatgttggccaggctggtcttgaactcctgacct

SEQ ID NO: 48339 - DNA, 201 bp, Homo sapiens
tattctaaagaaccaccagattgcttgaaaaaacaaatctccagtttaaaatcaagttatgccacgcccacccagtactttgttaaatatataaagtaacytggtttcagagaccattttatgtccttggttttgctctagggattaagtagtgttttttttttgttgtttttttaaacatttcatgggtttgtagatttt

SEQ ID NO: 48340 - DNA, 201 bp, Homo sapiens
tattaataaacctatttttcccaagttttggttgaccaaattacaataccaaaaggcaacctatattagtacatttctgtagtaaatagaaagagcatgtyaggaaaatgaaaaactttggacctatttttcccaagttttggttgaccaaattacaataccaaaaggcaacctatattagtacatttctgtattaaatag

SEQ ID NO: 48341 - DNA, 201 bp, Homo sapiens
cattgacagtttcttttttttttttttttttgagacggagttttgctcttgttgccaagctatagtgcaatggctcgatctctgctcactgcagcctctgyctcccgggttcagtgattctcctgccttagcctcccgagtagctgggattacaggtgcatggccaccacacctggctaaatttttgtatttttagtagaa

SEQ ID NO: 48342 - DNA, 201 bp, Homo sapiens
tactttaaagtactttaaaccactttgtttgcatttatttaatctttttttttttttttttgagacagagtttcactctgtagcccagactggagtgcagkggtgttatcttggctcactgcaatgtccgcctcctgggctcaggcaattctcccacctcagccgcccaaatagctgggtctacaggcacgcaccaccatg

SEQ ID NO: 48343 - DNA, 201 bp, Homo sapiens
atgagggagctgagtcagctacgggcaagcgggcagctgaagatgatgaggataacgatgtcgatacccagaagcagaagaccgacgaggatgaccagacrgcaaaaaaggaaaagttaaactaaaaaaaaaaggccgccgtgacctattcgccctccacttcccgtctcagaatctaaacgtggtcaccttcgagtagag

SEQ ID NO: 48344 - DNA, 201 bp, Homo sapiens
aaaaaaaacaactcttaccctcctccaaatctaaggacatttgatgaaaaacattgtcctgccccactggctgctctgaaaagccgtctttgcattgtgcstcgtcagcctccttgctcgccgcagccgcctccgccgccgcggactccggcagctttatcgccagagtccctgaactgtcgctttcttttttatcccctg

SEQ ID NO: 48345 - DNA, 201 bp, Homo sapiens
aggtggggaggaagaaggtgatggtgaggaagaggatggagatgaagatgagggagctgagtcagctacgggcaagcgggcagctgaagatgatgaggatracgatgtcgatacccagaagcagaagaccgacgaggatgaccagacagcaaaaaaggaaaagttaaactaaaaaaaaaaggccgccgtgacctattcgcc

SEQ ID NO: 48346 - DNA, 201 bp, Homo sapiens
actcttaagaactttattccccaggaaaggtgaatttcacagccactgcggaagccatgcattctcaggaagtgtgtgacaatgagttgactgacgtcccrccacttgcgcagaaggacactgtagtcaaggccttactagttgaggtacgtaagtctactctctgtgagtctcagagcccttattatttcatacagtatt

SEQ ID NO: 48347 - DNA, 201 bp, Homo sapiens
cactggggaaactggaaaagaagaaactgttcaatatagaatcaccgtttaactcttaagaactttattccccaggaaaggtgaatttcacagccactgcrgaagccatgcattctcaggaagtgtgtgacaatgagttgactgacgtcccaccacttgcgcagaaggacactgtagtcaaggccttactagttgaggtac

SEQ ID NO: 48348 - DNA, 201 bp, Homo sapiens
aaaagccgtctttgcattgtgcgtcgtcagcctccttgctcgccgcagccgcctccgccgccgcggactccggcagctttatcgccagagtccctgaactstcgctttcttttttatcccctgcatcgcgtcaccggcgtgccccaccatgtcagacgcagccgtagacaccagctccgaaatcaccaccgaggacttaaa

SEQ ID NO: 48349 - DNA, 201 bp, Homo sapiens
ataacgatgtcgatacccagaagcagaagaccgacgaggatgaccagacagcaaaaaaggaaaagttaaactaaaaaaaaaaggccgccgtgacctattcrccctccacttcccgtctcagaatctaaacgtggtcaccttcgagtagagaggcccgcccgcccaccgtgggcagtgccacccgcagatgacacgcgctct

SEQ ID NO: 48350 - DNA, 201 bp, Homo sapiens
gcgctctccaccacccaacccaaaccatgagaatttgcaacaggggagggaaaaagaaccaaaacttccaaggccctgctttttttttttcttaaaagtastttaaaaaggaaacttgtattttttatttacattttatatttttgtacatattgttagggtcggccatttttaatgatctcggatgaccaaaccagcctt

SEQ ID NO: 48351 - DNA, 201 bp, Homo sapiens
aagttgctgtttatttttattttttggcctgtttgatgtatgtgtgaaacaatgttgtccaacaataaacaggaattttattttgctgagttgttctagcaaaaaaaaaaagaaaaaaaaaagaaaaacattgttctgatgaaaatcacttggaatgagcctcttagggaaataaatagaaagtactttttaggataaatt

SEQ ID NO: 48352 - DNA, 201 bp, Homo sapiens
caatatagaatcaccgtttaactcttaagaactttattccccaggaaaggtgaatttcacagccactgcggaagccatgcattctcaggaagtgtgtgacratgagttgactgacgtcccaccacttgcgcagaaggacactgtagtcaaggccttactagttgaggtacgtaagtctactctctgtgagtctcagagccc

SEQ ID NO: 48353 - DNA, 201 bp, Homo sapiens
agacgcagccgtagacaccagctccgaaatcaccaccgaggacttaaaggagaagaaggaagttgtggaagaggcggaaaatggaagagacgcccctgctmacgggaatgctaatgaggaaaatggggagccggaggctgacaacgaggtagatgaagaagaggaagaaggtggggaggaagaaggtgatggtgaggaaga

SEQ ID NO: 48354 - DNA, 201 bp, Homo sapiens
ctgggtgagtagtaatgctattagcaaattccacttcgtgtgcttggatgatttgttttctgcactgaccccaatacacactttttctcctcctttaataytaatcaagaggaagacaaccactggatacactggggaaactggaaaagaagaaactgttcaatatagaatcaccgtttaactcttaagaactttattccc

SEQ ID NO: 48355 - DNA, 201 bp, Homo sapiens
cgcagccgtagacaccagctccgaaatcaccaccgaggacttaaaggagaagaaggaagttgtggaagaggcggaaaatggaagagacgcccctgctcacrggaatgctaatgaggaaaatggggagccggaggctgacaacgaggtagatgaagaagaggaagaaggtggggaggaagaaggtgatggtgaggaagagga

SEQ ID NO: 48356 - DNA, 201 bp, Homo sapiens
ggaaaaccgtgtcctgggttgtgactccgaagtcactgggtgagtagtaatgctattagcaaattccacttcgtgtgcttggatgatttgttttctgcacygaccccaatacacactttttctcctcctttaatattaatcaagaggaagacaaccactggatacactggggaaactggaaaagaagaaactgttcaatat

SEQ ID NO: 48357 - DNA, 201 bp, Homo sapiens
aattttcttgtttcaaacacctaaactacaaagtgtctgatagagctgaccatatttgcacagcttctcagcgcctctggactcatggacattgtccctcwgtccatttacctgatgcacagagcatcttttgcagtattcatgctgttctgcatcccttcataaacttgtggttgggtgtgggggacaggtcgttgtgca

SEQ ID NO: 48358 - DNA, 201 bp, Homo sapiens
cgcagatgacacgcgctctccaccacccaacccaaaccatgagaatttgcaacaggggagggaaaaagaaccaaaacttccaaggccctgctttttttttttcttaaaagtactttaaaaaggaaacttgtattttttatttacattttatatttttgtacatattgttagggtcggccatttttaatgatctcggatgac

SEQ ID NO: 48359 - DNA, 201 bp, Homo sapiens
gcagatgacacgcgctctccaccacccaacccaaaccatgagaatttgcaacaggggagggaaaaagaaccaaaacttccaaggccctgctttttttttttcttaaaagtactttaaaaaggaaacttgtattttttatttacattttatatttttgtacatattgttagggtcggccatttttaatgatctcggatgacc

SEQ ID NO: 48360 - DNA, 201 bp, Homo sapiens
agggtcggccatttttaatgatctcggatgaccaaaccagccttcggagcgttctctgtcctacttctcactttacttgtggtgtggccatgttcattatratctcaaaggagaaaaaaaaaacttgtaaaaaatgcaaaaatgacaacagaaaaaccatcttattccgagcattccagtaacttttttgtgtatgtactt

SEQ ID NO: 48361 - DNA, 201 bp, Homo sapiens
ggaatgctaatgaggaaaatggggagccggaggctgacaacgaggtagatgaagaagaggaagaaggtggggaggaagaaggtgatggtgaggaagaggayggagatgaagatgagggagctgagtcagctacgggcaagcgggcagctgaagatgatgaggataacgatgtcgatacccagaagcagaagaccgacgagg

SEQ ID NO: 48362 - DNA, 201 bp, Homo sapiens; identical to SEQ ID NO: 19619

SEQ ID NO: 48363 - DNA, 201 bp, Homo sapiens; identical to SEQ ID NO: 22185

SEQ ID NO: 48364 - DNA, 201 bp, Homo sapiens; identical to SEQ ID NO: 21118

SEQ ID NO: 48365 - DNA, 201 bp, Homo sapiens; identical to SEQ ID NO: 22224

SEQ ID NO: 48366 - DNA, 201 bp, Homo sapiens; identical to SEQ ID NO: 22225

SEQ ID NO: 48367 - DNA, 201 bp, Homo sapiens; identical to SEQ ID NO: 20886

SEQ ID NO: 48368 - DNA, 201 bp, Homo sapiens; identical to SEQ ID NO: 20278

SEQ ID NO: 48369 - DNA, 201 bp, Homo sapiens; identical to SEQ ID NO: 22227

SEQ ID NO: 48370 - DNA, 201 bp, Homo sapiens; identical to SEQ ID NO: 20279

SEQ ID NO: 48371 - DNA, 201 bp, Homo sapiens; identical to SEQ ID NO: 20281

SEQ ID NO: 48372 - DNA, 201 bp, Homo sapiens; identical to SEQ ID NO: 22323

SEQ ID NO: 48373 - DNA, 201 bp, Homo sapiens; identical to SEQ ID NO: 22324

SEQ ID NO: 48374 - DNA, 201 bp, Homo sapiens; identical to SEQ ID NO: 19640

SEQ ID NO: 48375 - DNA, 201 bp, Homo sapiens; identical to SEQ ID NO: 19641

SEQ ID NO: 48376 - DNA, 201 bp, Homo sapiens; identical to SEQ ID NO: 19642

SEQ ID NO: 48377 - DNA, 201 bp, Homo sapiens; identical to SEQ ID NO: 19644

SEQ ID NO: 48378 - DNA, 201 bp, Homo sapiens; identical to SEQ ID NO: 19647

SEQ ID NO: 48379 - DNA, 201 bp, Homo sapiens; identical to SEQ ID NO: 19649

SEQ ID NO: 48380 - DNA, 201 bp, Homo sapiens; identical to SEQ ID NO: 23155

SEQ ID NO: 48381 - DNA, 201 bp, Homo sapiens; identical to SEQ ID NO: 19650

SEQ ID NO: 48382 - DNA, 201 bp, Homo sapiens; identical to SEQ ID NO: 23156

SEQ ID NO: 48383 - DNA, 201 bp, Homo sapiens; identical to SEQ ID NO: 19651

SEQ ID NO: 48384 - DNA, 201 bp, Homo sapiens; identical to SEQ ID NO: 23157

SEQ ID NO: 48385 - DNA, 201 bp, Homo sapiens; identical to SEQ ID NO: 19653

SEQ ID NO: 48386 - DNA, 201 bp, Homo sapiens; identical to SEQ ID NO: 22332

SEQ ID NO: 48387 - DNA, 201 bp, Homo sapiens; identical to SEQ ID NO: 22560

SEQ ID NO: 48388 - DNA, 201 bp, Homo sapiens; identical to SEQ ID NO: 19654

SEQ ID NO: 48389 - DNA, 201 bp, Homo sapiens; identical to SEQ ID NO: 19655

SEQ ID NO: 48390 - DNA, 201 bp, Homo sapiens; identical to SEQ ID NO: 19523

SEQ ID NO: 48391 - DNA, 201 bp, Homo sapiens; identical to SEQ ID NO: 19656

SEQ ID NO: 48392 - DNA, 201 bp, Homo sapiens; identical to SEQ ID NO: 22243

SEQ ID NO: 48393 - DNA, 201 bp, Homo sapiens; identical to SEQ ID NO: 22192

SEQ ID NO: 48394 - DNA, 201 bp, Homo sapiens; identical to SEQ ID NO: 22244

SEQ ID NO: 48395 - DNA, 201 bp, Homo sapiens; identical to SEQ ID NO: 19524

SEQ ID NO: 48396 - DNA, 201 bp, Homo sapiens; identical to SEQ ID NO: 19526

SEQ ID NO: 48397 - DNA, 201 bp, Homo sapiens; identical to SEQ ID NO: 19530

SEQ ID NO: 48398 - DNA, 201 bp, Homo sapiens; identical to SEQ ID NO: 19532

SEQ ID NO: 48399 - DNA, 201 bp, Homo sapiens; identical to SEQ ID NO: 19534

SEQ ID NO: 48400 - DNA, 201 bp, Homo sapiens; identical to SEQ ID NO: 19535

SEQ ID NO: 48401 - DNA, 201 bp, Homo sapiens; identical to SEQ ID NO: 23102

SEQ ID NO: 48402 - DNA, 201 bp, Homo sapiens; identical to SEQ ID NO: 19671

SEQ ID NO: 48403 - DNA, 201 bp, Homo sapiens; identical to SEQ ID NO: 23208

SEQ ID NO: 48404 - DNA, 201 bp, Homo sapiens; identical to SEQ ID NO: 23127

SEQ ID NO: 48405 - DNA, 201 bp, Homo sapiens; identical to SEQ ID NO: 21794

SEQ ID NO: 48406 - DNA, 201 bp, Homo sapiens; identical to SEQ ID NO: 19673

SEQ ID NO: 48407 - DNA, 201 bp, Homo sapiens; identical to SEQ ID NO: 22146

SEQ ID NO: 48408 - DNA, 201 bp, Homo sapiens; identical to SEQ ID NO: 19678

SEQ ID NO: 48409 - DNA, 201 bp, Homo sapiens; identical to SEQ ID NO: 22196

SEQ ID NO: 48410 - DNA, 201 bp, Homo sapiens; identical to SEQ ID NO: 19679

SEQ ID NO: 48411 - DNA, 201 bp, Homo sapiens; identical to SEQ ID NO: 22198

SEQ ID NO: 48412 - DNA, 201 bp, Homo sapiens; identical to SEQ ID NO: 19681

SEQ ID NO: 48413 - DNA, 201 bp, Homo sapiens; identical to SEQ ID NO: 21191

SEQ ID NO: 48414 - DNA, 201 bp, Homo sapiens; identical to SEQ ID NO: 19688

SEQ ID NO: 48415 - DNA, 201 bp, Homo sapiens; identical to SEQ ID NO: 21192

SEQ ID NO: 48416 - DNA, 201 bp, Homo sapiens; identical to SEQ ID NO: 19691

SEQ ID NO: 48417 - DNA, 201 bp, Homo sapiens; identical to SEQ ID NO: 19693

SEQ ID NO: 48418 - DNA, 201 bp, Homo sapiens; identical to SEQ ID NO: 19696

SEQ ID NO: 48419 - DNA, 201 bp, Homo sapiens; identical to SEQ ID NO: 19700

SEQ ID NO: 48420 - DNA, 201 bp, Homo sapiens; identical to SEQ ID NO: 21730

SEQ ID NO: 48421 - DNA, 201 bp, Homo sapiens; identical to SEQ ID NO: 23641

SEQ ID NO: 48422 - DNA, 201 bp, Homo sapiens; identical to SEQ ID NO: 19558

SEQ ID NO: 48423 - DNA, 201 bp, Homo sapiens; identical to SEQ ID NO: 20815

SEQ ID NO: 48424 - DNA, 201 bp, Homo sapiens; identical to SEQ ID NO: 21195

SEQ ID NO: 48425 - DNA, 201 bp, Homo sapiens; identical to SEQ ID NO: 22591

SEQ ID NO: 48426 - DNA, 201 bp, Homo sapiens; identical to SEQ ID NO: 21856

SEQ ID NO: 48427 - DNA, 201 bp, Homo sapiens; identical to SEQ ID NO: 22593

SEQ ID NO: 48428 - DNA, 201 bp, Homo sapiens; identical to SEQ ID NO: 22596

SEQ ID NO: 48429 - DNA, 201 bp, Homo sapiens; identical to SEQ ID NO: 22170

SEQ ID NO: 48430 - DNA, 201 bp, Homo sapiens; identical to SEQ ID NO: 22171

SEQ ID NO: 48431 - DNA, 201 bp, Homo sapiens; identical to SEQ ID NO: 22204

SEQ ID NO: 48432 - DNA, 201 bp, Homo sapiens; identical to SEQ ID NO: 22205

SEQ ID NO: 48433 - DNA, 201 bp, Homo sapiens; identical to SEQ ID NO: 20260

SEQ ID NO: 48434 - DNA, 201 bp, Homo sapiens; identical to SEQ ID NO: 18762

SEQ ID NO: 48435 - DNA, 201 bp, Homo sapiens; identical to SEQ ID NO: 20261

SEQ ID NO: 48436 - DNA, 201 bp, Homo sapiens; identical to SEQ ID NO: 21864

SEQ ID NO: 48437 - DNA, 201 bp, Homo sapiens; identical to SEQ ID NO: 21865

SEQ ID NO: 48438 - DNA, 201 bp, Homo sapiens; identical to SEQ ID NO: 23361

SEQ ID NO: 48439 - DNA, 201 bp, Homo sapiens; identical to SEQ ID NO: 21868

SEQ ID NO: 48440 - DNA, 201 bp, Homo sapiens; identical to SEQ ID NO: 19091

SEQ ID NO: 48441 - DNA, 201 bp, Homo sapiens; identical to SEQ ID NO: 22615

SEQ ID NO: 48442 - DNA, 201 bp, Homo sapiens; identical to SEQ ID NO: 19094

SEQ ID NO: 48443 - DNA, 201 bp, Homo sapiens; identical to SEQ ID NO: 22618

SEQ ID NO: 48444 - DNA, 201 bp, Homo sapiens; identical to SEQ ID NO: 22183

SEQ ID NO: 48445 - DNA, 201 bp, Homo sapiens; identical to SEQ ID NO: 22184

SEQ ID NO: 48446 - DNA, 201 bp, Homo sapiens; identical to SEQ ID NO: 20477

SEQ ID NO: 48447 - DNA, 201 bp, Homo sapiens; identical to SEQ ID NO: 21772

SEQ ID NO: 48448 - DNA, 201 bp, Homo sapiens; identical to SEQ ID NO: 20479

SEQ ID NO: 48449 - DNA, 201 bp, Homo sapiens; identical to SEQ ID NO: 20481

SEQ ID NO: 48450 - DNA, 201 bp, Homo sapiens; identical to SEQ ID NO: 20483

SEQ ID NO: 48451 - DNA, 201 bp, Homo sapiens; identical to SEQ ID NO: 20485

SEQ ID NO: 48452 - DNA, 201 bp, Homo sapiens; identical to SEQ ID NO: 20488

SEQ ID NO: 48453 - DNA, 201 bp, Homo sapiens; identical to SEQ ID NO: 18074

SEQ ID NO: 48454 - DNA, 201 bp, Homo sapiens; identical to SEQ ID NO: 18964

SEQ ID NO: 48455 - DNA, 201 bp, Homo sapiens; identical to SEQ ID NO: 18076

SEQ ID NO: 48456 - DNA, 201 bp, Homo sapiens; identical to SEQ ID NO: 18966

SEQ ID NO: 48457 - DNA, 201 bp, Homo sapiens; identical to SEQ ID NO: 18486

SEQ ID NO: 48458 - DNA, 201 bp, Homo sapiens; identical to SEQ ID NO: 18081

SEQ ID NO: 48459 - DNA, 201 bp, Homo sapiens; identical to SEQ ID NO: 18492

SEQ ID NO: 48460 - DNA, 201 bp, Homo sapiens; identical to SEQ ID NO: 22477

SEQ ID NO: 48461 - DNA, 201 bp, Homo sapiens; identical to SEQ ID NO: 20515

SEQ ID NO: 48462 - DNA, 201 bp, Homo sapiens; identical to SEQ ID NO: 21076

SEQ ID NO: 48463 - DNA, 201 bp, Homo sapiens; identical to SEQ ID NO: 21077

SEQ ID NO: 48464 - DNA, 201 bp, Homo sapiens; identical to SEQ ID NO: 20517

SEQ ID NO: 48465 - DNA, 201 bp, Homo sapiens; identical to SEQ ID NO: 20520

SEQ ID NO: 48466 - DNA, 201 bp, Homo sapiens; identical to SEQ ID NO: 21079

SEQ ID NO: 48467 - DNA, 201 bp, Homo sapiens; identical to SEQ ID NO: 20523

SEQ ID NO: 48468 - DNA, 201 bp, Homo sapiens; identical to SEQ ID NO: 20525

SEQ ID NO: 48469 - DNA, 201 bp, Homo sapiens; identical to SEQ ID NO: 20527

SEQ ID NO: 48470 - DNA, 201 bp, Homo sapiens; identical to SEQ ID NO: 20530

SEQ ID NO: 48471 - DNA, 201 bp, Homo sapiens; identical to SEQ ID NO: 20533

SEQ ID NO: 48472 - DNA, 201 bp, Homo sapiens; identical to SEQ ID NO: 20535

SEQ ID NO: 48473 - DNA, 201 bp, Homo sapiens; identical to SEQ ID NO: 20537

SEQ ID NO: 48474 - DNA, 201 bp, Homo sapiens; identical to SEQ ID NO: 23125

SEQ ID NO: 48475 - DNA, 201 bp, Homo sapiens; identical to SEQ ID NO: 21087

SEQ ID NO: 48476 - DNA, 201 bp, Homo sapiens; identical to SEQ ID NO: 21795

SEQ ID NO: 48477 - DNA, 201 bp, Homo sapiens; identical to SEQ ID NO: 21796

SEQ ID NO: 48478 - DNA, 201 bp, Homo sapiens; identical to SEQ ID NO: 19395

SEQ ID NO: 48479 - DNA, 201 bp, Homo sapiens; identical to SEQ ID NO: 19399

SEQ ID NO: 48480 - DNA, 201 bp, Homo sapiens; identical to SEQ ID NO: 19401

SEQ ID NO: 48481 - DNA, 201 bp, Homo sapiens; identical to SEQ ID NO: 18510

SEQ ID NO: 48482 - DNA, 201 bp, Homo sapiens; identical to SEQ ID NO: 23133

SEQ ID NO: 48483 - DNA, 201 bp, Homo sapiens; identical to SEQ ID NO: 20572

SEQ ID NO: 48484 - DNA, 201 bp, Homo sapiens; identical to SEQ ID NO: 20577

SEQ ID NO: 48485 - DNA, 201 bp, Homo sapiens; identical to SEQ ID NO: 20582

SEQ ID NO: 48486 - DNA, 201 bp, Homo sapiens; identical to SEQ ID NO: 20586

SEQ ID NO: 48487 - DNA, 201 bp, Homo sapiens; identical to SEQ ID NO: 21101

SEQ ID NO: 48488 - DNA, 201 bp, Homo sapiens; identical to SEQ ID NO: 20590

SEQ ID NO: 48489 - DNA, 201 bp, Homo sapiens; identical to SEQ ID NO: 21102

SEQ ID NO: 48490 - DNA, 201 bp, Homo sapiens; identical to SEQ ID NO: 20593

SEQ ID NO: 48491 - DNA, 201 bp, Homo sapiens; identical to SEQ ID NO: 20596

SEQ ID NO: 48492 - DNA, 201 bp, Homo sapiens; identical to SEQ ID NO: 20598

SEQ ID NO: 48493 - DNA, 201 bp, Homo sapiens; identical to SEQ ID NO: 20601

SEQ ID NO: 48494 - DNA, 201 bp, Homo sapiens; identical to SEQ ID NO: 22507

SEQ ID NO: 48495 - DNA, 201 bp, Homo sapiens; identical to SEQ ID NO: 22509

SEQ ID NO: 48496 - DNA, 201 bp, Homo sapiens; identical to SEQ ID NO: 20650

SEQ ID NO: 48497 - DNA, 201 bp, Homo sapiens; identical to SEQ ID NO: 20660

SEQ ID NO: 48498 - DNA, 201 bp, Homo sapiens; identical to SEQ ID NO: 20665

SEQ ID NO: 48499 - DNA, 201 bp, Homo sapiens; identical to SEQ ID NO: 21111

SEQ ID NO: 48500 - DNA, 201 bp, Homo sapiens; identical to SEQ ID NO: 21112

SEQ ID NO: 48501 - DNA, 201 bp, Homo sapiens; identical to SEQ ID NO: 21113

SEQ ID NO: 48502 - DNA, 201 bp, Homo sapiens; identical to SEQ ID NO: 21822

SEQ ID NO: 48503 - DNA, 201 bp, Homo sapiens; identical to SEQ ID NO: 21371

SEQ ID NO: 48504 - DNA, 201 bp, Homo sapiens; identical to SEQ ID NO: 19080

SEQ ID NO: 48505 - DNA, 201 bp, Homo sapiens; identical to SEQ ID NO: 19414

SEQ ID NO: 48506 - DNA, 201 bp, Homo sapiens; identical to SEQ ID NO: 21827

SEQ ID NO: 48507 - DNA, 201 bp, Homo sapiens; identical to SEQ ID NO: 23141

SEQ ID NO: 48508 - DNA, 201 bp, Homo sapiens; identical to SEQ ID NO: 22318

SEQ ID NO: 48509 - DNA, 201 bp, Homo sapiens; identical to SEQ ID NO: 21835

SEQ ID NO: 48510 - DNA, 201 bp, Homo sapiens; identical to SEQ ID NO: 21836

SEQ ID NO: 48511 - DNA, 201 bp, Homo sapiens; identical to SEQ ID NO: 21837
  misc_feature (1)...(201): n = A,T,C or G, or insertion/deletion polymorphism (see Tables 1-2)

SEQ ID NO: 48512 - DNA, 201 bp, Homo sapiens; identical to SEQ ID NO: 21124

SEQ ID NO: 48513 - DNA, 201 bp, Homo sapiens; identical to SEQ ID NO: 21127

SEQ ID NO: 48514 - DNA, 201 bp, Homo sapiens; identical to SEQ ID NO: 21129

SEQ ID NO: 48515 - DNA, 201 bp, Homo sapiens; identical to SEQ ID NO: 22891

SEQ ID NO: 48516 - DNA, 201 bp, Homo sapiens; identical to SEQ ID NO: 22897

SEQ ID NO: 48517 - DNA, 201 bp, Homo sapiens; identical to SEQ ID NO: 23158

SEQ ID NO: 48518 - DNA, 201 bp, Homo sapiens; identical to SEQ ID NO: 22335

SEQ ID NO: 48519 - DNA, 201 bp, Homo sapiens; identical to SEQ ID NO: 22132

SEQ ID NO: 48520 - DNA, 201 bp, Homo sapiens; identical to SEQ ID NO: 23421

SEQ ID NO: 48521 - DNA, 201 bp, Homo sapiens; identical to SEQ ID NO: 22339

SEQ ID NO: 48522 - DNA, 201 bp, Homo sapiens; identical to SEQ ID NO: 22340

SEQ ID NO: 48523 - DNA, 201 bp, Homo sapiens; identical to SEQ ID NO: 19425

SEQ ID NO: 48524 - DNA, 201 bp, Homo sapiens; identical to SEQ ID NO: 23162

SEQ ID NO: 48525 - DNA, 201 bp, Homo sapiens; identical to SEQ ID NO: 23163

SEQ ID NO: 48526 - DNA, 201 bp, Homo sapiens; identical to SEQ ID NO: 23164

SEQ ID NO: 48527 - DNA, 201 bp, Homo sapiens; identical to SEQ ID NO: 21846

SEQ ID NO: 48528 - DNA, 201 bp, Homo sapiens; identical to SEQ ID NO: 22135

SEQ ID NO: 48529 - DNA, 201 bp, Homo sapiens; identical to SEQ ID NO: 21138

SEQ ID NO: 48530 - DNA, 201 bp, Homo sapiens; identical to SEQ ID NO: 21847

SEQ ID NO: 48531 - DNA, 201 bp, Homo sapiens; identical to SEQ ID NO: 21139

SEQ ID NO: 48532 - DNA, 201 bp, Homo sapiens; identical to SEQ ID NO: 20234

SEQ ID NO: 48533 - DNA, 201 bp, Homo sapiens; identical to SEQ ID NO: 21849

SEQ ID NO: 48534 - DNA, 201 bp, Homo sapiens; identical to SEQ ID NO: 18596

SEQ ID NO: 48535 - DNA, 201 bp, Homo sapiens; identical to SEQ ID NO: 18598

SEQ ID NO: 48536 - DNA, 201 bp, Homo sapiens; identical to SEQ ID NO: 21851

SEQ ID NO: 48537 - DNA, 201 bp, Homo sapiens; identical to SEQ ID NO: 21852

SEQ ID NO: 48538 - DNA, 201 bp, Homo sapiens; identical to SEQ ID NO: 21149

SEQ ID NO: 48539 - DNA, 201 bp, Homo sapiens; identical to SEQ ID NO: 20826

SEQ ID NO: 48540 - DNA, 201 bp, Homo sapiens; identical to SEQ ID NO: 20830

SEQ ID NO: 48541 - DNA, 201 bp, Homo sapiens; identical to SEQ ID NO: 20833

SEQ ID NO: 48542 - DNA, 201 bp, Homo sapiens; identical to SEQ ID NO: 23463

SEQ ID NO: 48543 - DNA, 201 bp, Homo sapiens; identical to SEQ ID NO: 23170

SEQ ID NO: 48544 - DNA, 201 bp, Homo sapiens; identical to SEQ ID NO: 23171

SEQ ID NO: 48545 - DNA, 201 bp, Homo sapiens; identical to SEQ ID NO: 23172

SEQ ID NO: 48546 - DNA, 201 bp, Homo sapiens; identical to SEQ ID NO: 22950

SEQ ID NO: 48547 - DNA, 201 bp, Homo sapiens; identical to SEQ ID NO: 18627

SEQ ID NO: 48548 - DNA, 201 bp, Homo sapiens; identical to SEQ ID NO: 22952

SEQ ID NO: 48549 - DNA, 201 bp, Homo sapiens; identical to SEQ ID NO: 20253

SEQ ID NO: 48550 - DNA, 201 bp, Homo sapiens; identical to SEQ ID NO: 22955

SEQ ID NO: 48551 - DNA, 201 bp, Homo sapiens; identical to SEQ ID NO: 20254

SEQ ID NO: 48552 - DNA, 201 bp, Homo sapiens; identical to SEQ ID NO: 22958

SEQ ID NO: 48553 - DNA, 201 bp, Homo sapiens; identical to SEQ ID NO: 22960

SEQ ID NO: 48554 - DNA, 201 bp, Homo sapiens; identical to SEQ ID NO: 22961

SEQ ID NO: 48555 - DNA, 201 bp, Homo sapiens; identical to SEQ ID NO: 22963

SEQ ID NO: 48556 - DNA, 201 bp, Homo sapiens; identical to SEQ ID NO: 22966

SEQ ID NO: 48557 - DNA, 201 bp, Homo sapiens; identical to SEQ ID NO: 23180

SEQ ID NO: 48558 - DNA, 201 bp, Homo sapiens; identical to SEQ ID NO: 21858

SEQ ID NO: 48559 - DNA, 201 bp, Homo sapiens; identical to SEQ ID NO: 21860

SEQ ID NO: 48560 - DNA, 201 bp, Homo sapiens; identical to SEQ ID NO: 21862

SEQ ID NO: 48561 - DNA, 201 bp, Homo sapiens; identical to SEQ ID NO: 21161

SEQ ID NO: 48562 - DNA, 201 bp, Homo sapiens; identical to SEQ ID NO: 21162

SEQ ID NO: 48563 - DNA, 201 bp, Homo sapiens; identical to SEQ ID NO: 21163

SEQ ID NO: 48564 - DNA, 201 bp, Homo sapiens; identical to SEQ ID NO: 20265

SEQ ID NO: 48565 - DNA, 201 bp, Homo sapiens; identical to SEQ ID NO: 20875

SEQ ID NO: 48566 - DNA, 201 bp, Homo sapiens; identical to SEQ ID NO: 23000

SEQ ID NO: 48567 - DNA, 201 bp, Homo sapiens; identical to SEQ ID NO: 20879

SEQ ID NO: 48568 - DNA, 201 bp, Homo sapiens; identical to SEQ ID NO: 23190

SEQ ID NO: 48569 - DNA, 201 bp, Homo sapiens; identical to SEQ ID NO: 23191

SEQ ID NO: 48570 - DNA, 201 bp, Homo sapiens; identical to SEQ ID NO: 18224

SEQ ID NO: 48571 - DNA, 201 bp, Homo sapiens; identical to SEQ ID NO: 23002

SEQ ID NO: 48572 - DNA, 201 bp, Homo sapiens; identical to SEQ ID NO: 23193

SEQ ID NO: 48573 - DNA, 201 bp, Homo sapiens; identical to SEQ ID NO: 23003

SEQ ID NO: 48574 - DNA, 201 bp, Homo sapiens; identical to SEQ ID NO: 23005

SEQ ID NO: 48575 - DNA, 201 bp, Homo sapiens; identical to SEQ ID NO: 23194

SEQ ID NO: 48576 - DNA, 201 bp, Homo sapiens; identical to SEQ ID NO: 23007

SEQ ID NO: 48577 - DNA, 201 bp, Homo sapiens; identical to SEQ ID NO: 23009

SEQ ID NO: 48578 - DNA, 201 bp, Homo sapiens; identical to SEQ ID NO: 23011

SEQ ID NO: 48579 - DNA, 201 bp, Homo sapiens; identical to SEQ ID NO: 23014

SEQ ID NO: 48580 - DNA, 201 bp, Homo sapiens; identical to SEQ ID NO: 20890

SEQ ID NO: 48581 - DNA, 201 bp, Homo sapiens; identical to SEQ ID NO: 23026

SEQ ID NO: 48582 - DNA, 201 bp, Homo sapiens; identical to SEQ ID NO: 20893

SEQ ID NO: 48583 - DNA, 201 bp, Homo sapiens; identical to SEQ ID NO: 20894

SEQ ID NO: 48584 - DNA, 201 bp, Homo sapiens; identical to SEQ ID NO: 22629

SEQ ID NO: 48585 - DNA, 201 bp, Homo sapiens; identical to SEQ ID NO: 22632

SEQ ID NO: 48586 - DNA, 201 bp, Homo sapiens; identical to SEQ ID NO: 21174

SEQ ID NO: 48587 - DNA, 201 bp, Homo sapiens; identical to SEQ ID NO: 18247

SEQ ID NO: 48588 - DNA, 201 bp, Homo sapiens; identical to SEQ ID NO: 21176

SEQ ID NO: 48589 - DNA, 201 bp, Homo sapiens; identical to SEQ ID NO: 21177

SEQ ID NO: 48590 - DNA, 201 bp, Homo sapiens; identical to SEQ ID NO: 21178

SEQ ID NO: 48591 - DNA, 201 bp, Homo sapiens; identical to SEQ ID NO: 23044

SEQ ID NO: 48592 - DNA, 201 bp, Homo sapiens; identical to SEQ ID NO: 23045

SEQ ID NO: 48593 - DNA, 201 bp, Homo sapiens; identical to SEQ ID NO: 19515

SEQ ID NO: 48594 - DNA, 201 bp, Homo sapiens; identical to SEQ ID NO: 19519

SEQ ID NO: 48595 - DNA, 201 bp, Homo sapiens; identical to SEQ ID NO: 18263

SEQ ID NO: 48596 - DNA, 201 bp, Homo sapiens; identical to SEQ ID NO: 18264

SEQ ID NO: 48597 - DNA, 201 bp, Homo sapiens; identical to SEQ ID NO: 18265

SEQ ID NO: 48598 - DNA, 201 bp, Homo sapiens; identical to SEQ ID NO: 23209

SEQ ID NO: 48599 - DNA, 201 bp, Homo sapiens; identical to SEQ ID NO: 23210

SEQ ID NO: 48600 - DNA, 201 bp, Homo sapiens; identical to SEQ ID NO: 21183

SEQ ID NO: 48601 - DNA, 201 bp, Homo sapiens; identical to SEQ ID NO: 18268

SEQ ID NO: 48602 - DNA, 201 bp, Homo sapiens; identical to SEQ ID NO: 21184

SEQ ID NO: 48603 - DNA, 201 bp, Homo sapiens; identical to SEQ ID NO: 18269

SEQ ID NO: 48604 - DNA, 201 bp, Homo sapiens; identical to SEQ ID NO: 23211

SEQ ID NO: 48605 - DNA, 201 bp, Homo sapiens; identical to SEQ ID NO: 18270

SEQ ID NO: 48606 - DNA, 201 bp, Homo sapiens; identical to SEQ ID NO: 19547

SEQ ID NO: 48607 - DNA, 201 bp, Homo sapiens; identical to SEQ ID NO: 18271

SEQ ID NO: 48608 - DNA, 201 bp, Homo sapiens; identical to SEQ ID NO: 19548

SEQ ID NO: 48609 - DNA, 201 bp, Homo sapiens; identical to SEQ ID NO: 23216

SEQ ID NO: 48610 - DNA, 201 bp, Homo sapiens; identical to SEQ ID NO: 22660

SEQ ID NO: 48611 - DNA, 201 bp, Homo sapiens; identical to SEQ ID NO: 23217

SEQ ID NO: 48612 - DNA, 201 bp, Homo sapiens; identical to SEQ ID NO: 22661

SEQ ID NO: 48613 - DNA, 201 bp, Homo sapiens; identical to SEQ ID NO: 23219

SEQ ID NO: 48614 - DNA, 201 bp, Homo sapiens; identical to SEQ ID NO: 22662

SEQ ID NO: 48615 - DNA, 201 bp, Homo sapiens; identical to SEQ ID NO: 23073

SEQ ID NO: 48616 - DNA, 201 bp, Homo sapiens; identical to SEQ ID NO: 18301

SEQ ID NO: 48617 - DNA, 201 bp, Homo sapiens; identical to SEQ ID NO: 18303

SEQ ID NO: 48618 - DNA, 201 bp, Homo sapiens; identical to SEQ ID NO: 18305

SEQ ID NO: 48619 - DNA, 201 bp, Homo sapiens; identical to SEQ ID NO: 18306

SEQ ID NO: 48620 - DNA, 201 bp, Homo sapiens; identical to SEQ ID NO: 21197

SEQ ID NO: 48621 - DNA, 201 bp, Homo sapiens; identical to SEQ ID NO: 18307

SEQ ID NO: 48622 - DNA, 201 bp, Homo sapiens; identical to SEQ ID NO: 18308

SEQ ID NO: 48623 - DNA, 201 bp, Homo sapiens; identical to SEQ ID NO: 21198

SEQ ID NO: 48624 - DNA, 201 bp, Homo sapiens; identical to SEQ ID NO: 21199

SEQ ID NO: 48625 - DNA, 201 bp, Homo sapiens; identical to SEQ ID NO: 20960

SEQ ID NO: 48626 - DNA, 201 bp, Homo sapiens; identical to SEQ ID NO: 22687

SEQ ID NO: 48627 - DNA, 201 bp, Homo sapiens; identical to SEQ ID NO: 22688

SEQ ID NO: 48628 - DNA, 201 bp, Homo sapiens; identical to SEQ ID NO: 22689

SEQ ID NO: 48629 - DNA, 201 bp, Homo sapiens; identical to SEQ ID NO: 20090

SEQ ID NO: 48630 - DNA, 201 bp, Homo sapiens; identical to SEQ ID NO: 20091

SEQ ID NO: 48631 - DNA, 201 bp, Homo sapiens; identical to SEQ ID NO: 20092

SEQ ID NO: 48632 - DNA, 201 bp, Homo sapiens; identical to SEQ ID NO: 20094

SEQ ID NO: 48633 - DNA, 201 bp, Homo sapiens; identical to SEQ ID NO: 20340

SEQ ID NO: 48634 - DNA, 201 bp, Homo sapiens; identical to SEQ ID NO: 20342

SEQ ID NO: 48635 - DNA, 201 bp, Homo sapiens; identical to SEQ ID NO: 20344

SEQ ID NO: 48636 - DNA, 201 bp, Homo sapiens; identical to SEQ ID NO: 20345

SEQ ID NO: 48637 - DNA, 201 bp, Homo sapiens; identical to SEQ ID NO: 20346

SEQ ID NO: 48638 - DNA, 201 bp, Homo sapiens; identical to SEQ ID NO: 20347

SEQ ID NO: 48639 - DNA, 201 bp, Homo sapiens; identical to SEQ ID NO: 23232

SEQ ID NO: 48640 - DNA, 201 bp, Homo sapiens; identical to SEQ ID NO: 20348

SEQ ID NO: 48641 - DNA, 201 bp, Homo sapiens; identical to SEQ ID NO: 18339

SEQ ID NO: 48642 - DNA, 201 bp, Homo sapiens; identical to SEQ ID NO: 20350

SEQ ID NO: 48643 - DNA, 201 bp, Homo sapiens; identical to SEQ ID NO: 18340

SEQ ID NO: 48644 - DNA, 201 bp, Homo sapiens; identical to SEQ ID NO: 20351

SEQ ID NO: 48645 - DNA, 201 bp, Homo sapiens; identical to SEQ ID NO: 18341

SEQ ID NO: 48646 - DNA, 201 bp, Homo sapiens; identical to SEQ ID NO: 20352

SEQ ID NO: 48647 - DNA, 201 bp, Homo sapiens; identical to SEQ ID NO: 20104

SEQ ID NO: 48648 - DNA, 201 bp, Homo sapiens; identical to SEQ ID NO: 23087

SEQ ID NO: 48649 - DNA, 201 bp, Homo sapiens; identical to SEQ ID NO: 20105

SEQ ID NO: 48650 - DNA, 201 bp, Homo sapiens; identical to SEQ ID NO: 20106

SEQ ID NO: 48651 - DNA, 201 bp, Homo sapiens; identical to SEQ ID NO: 20107

SEQ ID NO: 48652 - DNA, 201 bp, Homo sapiens; identical to SEQ ID NO: 20113

SEQ ID NO: 48653 - DNA, 201 bp, Homo sapiens; identical to SEQ ID NO: 20116

SEQ ID NO: 48654 - DNA, 201 bp, Homo sapiens; identical to SEQ ID NO: 20120

SEQ ID NO: 48655 - DNA, 201 bp, Homo sapiens; identical to SEQ ID NO: 23238

SEQ ID NO: 48656 - DNA, 201 bp, Homo sapiens; identical to SEQ ID NO: 19638

SEQ ID NO: 48657 - DNA, 201 bp, Homo sapiens; identical to SEQ ID NO: 20362

SEQ ID NO: 48658 - DNA, 201 bp, Homo sapiens; identical to SEQ ID NO: 20363

SEQ ID NO: 48659 - DNA, 201 bp, Homo sapiens; identical to SEQ ID NO: 20365

SEQ ID NO: 48660 - DNA, 201 bp, Homo sapiens; identical to SEQ ID NO: 20366

SEQ ID NO: 48661 - DNA, 201 bp, Homo sapiens; identical to SEQ ID NO: 21924

SEQ ID NO: 48662 - DNA, 201 bp, Homo sapiens; identical to SEQ ID NO: 20368

SEQ ID NO: 48663 - DNA, 201 bp, Homo sapiens; identical to SEQ ID NO: 22241

SEQ ID NO: 48664 - DNA, 201 bp, Homo sapiens; identical to SEQ ID NO: 22242

SEQ ID NO: 48665 - DNA, 201 bp, Homo sapiens; identical to SEQ ID NO: 20372

SEQ ID NO: 48666 - DNA, 201 bp, Homo sapiens; identical to SEQ ID NO: 23240

SEQ ID NO: 48667 - DNA, 201 bp, Homo sapiens; identical to SEQ ID NO: 21702

SEQ ID NO: 48668 - DNA, 201 bp, Homo sapiens; identical to SEQ ID NO: 23242

SEQ ID NO: 48669 - DNA, 201 bp, Homo sapiens; identical to SEQ ID NO: 20375

SEQ ID NO: 48670 - DNA, 201 bp, Homo sapiens; identical to SEQ ID NO: 20377

SEQ ID NO: 48671 - DNA, 201 bp, Homo sapiens; identical to SEQ ID NO: 23244

SEQ ID NO: 48672 - DNA, 201 bp, Homo sapiens; identical to SEQ ID NO: 20379

SEQ ID NO: 48673 - DNA, 201 bp, Homo sapiens; identical to SEQ ID NO: 18380

SEQ ID NO: 48674 - DNA, 201 bp, Homo sapiens; identical to SEQ ID NO: 20134

SEQ ID NO: 48675 - DNA, 201 bp, Homo sapiens; identical to SEQ ID NO: 20136

SEQ ID NO: 48676 - DNA, 201 bp, Homo sapiens; identical to SEQ ID NO: 20138

SEQ ID NO: 48677 - DNA, 201 bp, Homo sapiens; identical to SEQ ID NO: 18848

SEQ ID NO: 48678 - DNA, 201 bp, Homo sapiens; identical to SEQ ID NO: 20142

SEQ ID NO: 48679 - DNA, 201 bp, Homo sapiens; identical to SEQ ID NO: 20143

SEQ ID NO: 48680 - DNA, 201 bp, Homo sapiens; identical to SEQ ID NO: 23633

SEQ ID NO: 48681 - DNA, 201 bp, Homo sapiens; identical to SEQ ID NO: 22721

SEQ ID NO: 48682 - DNA, 201 bp, Homo sapiens; identical to SEQ ID NO: 23246

SEQ ID NO: 48683 - DNA, 201 bp, Homo sapiens; identical to SEQ ID NO: 18415

SEQ ID NO: 48684 - DNA, 201 bp, Homo sapiens; identical to SEQ ID NO: 20397

SEQ ID NO: 48685 - DNA, 201 bp, Homo sapiens; identical to SEQ ID NO: 23634

SEQ ID NO: 48686 - DNA, 201 bp, Homo sapiens; identical to SEQ ID NO: 20398

SEQ ID NO: 48687 - DNA, 201 bp, Homo sapiens; identical to SEQ ID NO: 21725

SEQ ID NO: 48688 - DNA, 201 bp, Homo sapiens; identical to SEQ ID NO: 23636

SEQ ID NO: 48689 - DNA, 201 bp, Homo sapiens; identical to SEQ ID NO: 18419

SEQ ID NO: 48690 - DNA, 201 bp, Homo sapiens; identical to SEQ ID NO: 20399

SEQ ID NO: 48691 - DNA, 201 bp, Homo sapiens; identical to SEQ ID NO: 21213

SEQ ID NO: 48692 - DNA, 201 bp, Homo sapiens; identical to SEQ ID NO: 18420

SEQ ID NO: 48693 - DNA, 201 bp, Homo sapiens; identical to SEQ ID NO: 20401

SEQ ID NO: 48694 - DNA, 201 bp, Homo sapiens; identical to SEQ ID NO: 20404

SEQ ID NO: 48695 - DNA, 201 bp, Homo sapiens; identical to SEQ ID NO: 20406

SEQ ID NO: 48696 - DNA, 201 bp, Homo sapiens; identical to SEQ ID NO: 20408

SEQ ID NO: 48697 - DNA, 201 bp, Homo sapiens; identical to SEQ ID NO: 20410

SEQ ID NO: 48698 - DNA, 201 bp, Homo sapiens; identical to SEQ ID NO: 20413

SEQ ID NO: 48699 - DNA, 201 bp, Homo sapiens; identical to SEQ ID NO: 20415

SEQ ID NO: 48700 - DNA, 201 bp, Homo sapiens; identical to SEQ ID NO: 23255

SEQ ID NO: 48701 - DNA, 201 bp, Homo sapiens; identical to SEQ ID NO: 23257

SEQ ID NO: 48702 - DNA, 201 bp, Homo sapiens; identical to SEQ ID NO: 23258

SEQ ID NO: 48703 - DNA, 201 bp, Homo sapiens; identical to SEQ ID NO: 20154

SEQ ID NO: 48704 - DNA, 201 bp, Homo sapiens; identical to SEQ ID NO: 23655

SEQ ID NO: 48705 - DNA, 201 bp, Homo sapiens; identical to SEQ ID NO: 23656

SEQ ID NO: 48706 - DNA, 201 bp, Homo sapiens; identical to SEQ ID NO: 18889

SEQ ID NO: 48707 - DNA, 201 bp, Homo sapiens; identical to SEQ ID NO: 23657

SEQ ID NO: 48708 - DNA, 201 bp, Homo sapiens; identical to SEQ ID NO: 19715

SEQ ID NO: 48709 - DNA, 201 bp, Homo sapiens; identical to SEQ ID NO: 23659

SEQ ID NO: 48710 - DNA, 201 bp, Homo sapiens; identical to SEQ ID NO: 19716

SEQ ID NO: 48711 - DNA, 201 bp, Homo sapiens; identical to SEQ ID NO: 23113

SEQ ID NO: 48712 - DNA, 201 bp, Homo sapiens; identical to SEQ ID NO: 19331

SEQ ID NO: 48713 - DNA, 201 bp, Homo sapiens; identical to SEQ ID NO: 19334

SEQ ID NO: 48714 - DNA, 201 bp, Homo sapiens; identical to SEQ ID NO: 20431

SEQ ID NO: 48715 - DNA, 201 bp, Homo sapiens; identical to SEQ ID NO: 21238

SEQ ID NO: 48716 - DNA, 201 bp, Homo sapiens; identical to SEQ ID NO: 20432

SEQ ID NO: 48717 - DNA, 201 bp, Homo sapiens; identical to SEQ ID NO: 21240

SEQ ID NO: 48718 - DNA, 201 bp, Homo sapiens; identical to SEQ ID NO: 20433

SEQ ID NO: 48719 - DNA, 201 bp, Homo sapiens; identical to SEQ ID NO: 18452

SEQ ID NO: 48720 - DNA, 201 bp, Homo sapiens; identical to SEQ ID NO: 22267

SEQ ID NO: 48721 - DNA, 201 bp, Homo sapiens; identical to SEQ ID NO: 20436

SEQ ID NO: 48722 - DNA, 201 bp, Homo sapiens; identical to SEQ ID NO: 18454

SEQ ID NO: 48723 - DNA, 201 bp, Homo sapiens; identical to SEQ ID NO: 20438

SEQ ID NO: 48724 - DNA, 201 bp, Homo sapiens; identical to SEQ ID NO: 18455

SEQ ID NO: 48725 - DNA, 201 bp, Homo sapiens; identical to SEQ ID NO: 20440

SEQ ID NO: 48726 - DNA, 201 bp, Homo sapiens; identical to SEQ ID NO: 21972

SEQ ID NO: 48727 - DNA, 201 bp, Homo sapiens; identical to SEQ ID NO: 20442

SEQ ID NO: 48728 - DNA, 201 bp, Homo sapiens; identical to SEQ ID NO: 20444

SEQ ID NO: 48729 - DNA, 201 bp, Homo sapiens; identical to SEQ ID NO: 20446

SEQ ID NO: 48730 - DNA, 201 bp, Homo sapiens; identical to SEQ ID NO: 23673

SEQ ID NO: 48731 - DNA, 201 bp, Homo sapiens; identical to SEQ ID NO: 23677

SEQ ID NO: 48732 - DNA, 201 bp, Homo sapiens; identical to SEQ ID NO: 23680

SEQ ID NO: 48733 - DNA, 201 bp, Homo sapiens; identical to SEQ ID NO: 19348

SEQ ID NO: 48734 - DNA, 201 bp, Homo sapiens; identical to SEQ ID NO: 19350

SEQ ID NO: 48735 - DNA, 201 bp, Homo sapiens; identical to SEQ ID NO: 19351

SEQ ID NO: 48736 - DNA, 201 bp, Homo sapiens; identical to SEQ ID NO: 21050

SEQ ID NO: 48737 - DNA, 201 bp, Homo sapiens; identical to SEQ ID NO: 19356

SEQ ID NO: 48738 - DNA, 201 bp, Homo sapiens; identical to SEQ ID NO: 20472

SEQ ID NO: 48739 - DNA, 201 bp, Homo sapiens; identical to SEQ ID NO: 21051

SEQ ID NO: 48740 - DNA, 201 bp, Homo sapiens; identical to SEQ ID NO: 20475

SEQ ID NO: 48741 - DNA, 201 bp, Homo sapiens; identical to SEQ ID NO: 23052

SEQ ID NO: 48742 - DNA, 201 bp, Homo sapiens; identical to SEQ ID NO: 23053

SEQ ID NO: 48743 - DNA, 201 bp, Homo sapiens; identical to SEQ ID NO: 23054

SEQ ID NO: 48744 - DNA, 201 bp, Homo sapiens
ctccccgggtccccacaagtgtctgccctaaggcccaccaggctttcttgcagcctgtcccacatctgggtgtcactgccttcctctgaatcaccctcctytcaaaccagccgccagcgagcccagcccagcccagctagtgccctaccacacccgcccccaggataattaacacccagccacccagcatcggacctctac

SEQ ID NO: 48745 - DNA, 201 bp, Homo sapiens
tattttaaaggcaaattctcacgcctgtaatcccagcactttgggaggccaaggcgggcggatcacgaggtcaggagattgagaccatcctggctaacacrgtgaaaccccatctctactaaaaatacaaaaaattagccaggtgtggtggcacacacctgtaatcccagctactagggaggctgaggcaggagaatcact

SEQ ID NO: 48746 - DNA, 201 bp, Homo sapiens
cctttctgcacccctcttccacctgtcagggcacctagggctccccgggtccccacaagtgtctgccctaaggcccaccaggctttcttgcagcctgtccracatctgggtgtcactgccttcctctgaatcaccctcctctcaaaccagccgccagcgagcccagcccagcccagctagtgccctaccacacccgccccc

SEQ ID NO: 48747 - DNA, 201 bp, Homo sapiens
accttgaagagggcagagaaccagcccttctcaggccttgatcccttaccctctcctcccaggaacattcctcgtgaaggactgtgaccagcatagaaagrctgctcagtgtgatccttgcataccgggggtctccttctctcctgaccaccacacccggccccactgtgagagctgtcggcactgtaactctggtgaggt

SEQ ID NO: 48748 - DNA, 201 bp, Homo sapiens
tttggcggagacccttgtcatcactcctctctaccaccagtgctctcccctcctgcactgtcccaggcttcctcattcttcccttgcaggtccttatccawcatggctcacaattcctgggaagccacaaggaaaccaaattctagtagcaactcagagtcagcattcattagcaggtcacagggccataaggatgccaag

SEQ ID NO: 48749 - DNA, 201 bp, Homo sapiens
ccagccacccagcatcggacctctacacttgagcaaaatgtatattttaaaggcaaattctcacgcctgtaatcccagcactttgggaggccaaggcgggyggatcacgaggtcaggagattgagaccatcctggctaacacagtgaaaccccatctctactaaaaatacaaaaaattagccaggtgtggtggcacacacc

SEQ ID NO: 48750 - DNA, 201 bp, Homo sapiens
tcaggggtgagaagatgggtgggctgaatgagctcggccctctctgggccttagtgctggcatctatgagatgaggacatgcctgaagtcagcctggaatkttgagcccaggttatacctggtaaatagaactcccaggtctccggatactcaccactaaaacaatagcacctcattgtttttgttttgttttgttttgtt

SEQ ID NO: 48751 - DNA, 201 bp, Homo sapiens; identical to SEQ ID NO: 17797

SEQ ID NO: 48752 - DNA, 201 bp, Homo sapiens
tagcggtgataccccaaccagtactccccactcctacccctagataaggtcagcctgtttctgccttcccatcccatccagcacctctcaggccttcagakgtgccctatggggtcccctgctgctactcattctgtctctgtttttccagagatgctggaggccaggacagctgggcacatgcagactctggctgacttc

SEQ ID NO: 48753 - DNA, 201 bp, Homo sapiens
caaattctcacgcctgtaatcccagcactttgggaggccaaggcgggcggatcacgaggtcaggagattgagaccatcctggctaacacagtgaaaccccrtctctactaaaaatacaaaaaattagccaggtgtggtggcacacacctgtaatcccagctactagggaggctgaggcaggagaatcacttgaactcagga

SEQ ID NO: 48754 - DNA, 201 bp, Homo sapiens
cctaccacacccgcccccaggataattaacacccagccacccagcatcggacctctacacttgagcaaaatgtatattttaaaggcaaattctcacgcctrtaatcccagcactttgggaggccaaggcgggcggatcacgaggtcaggagattgagaccatcctggctaacacagtgaaaccccatctctactaaaaata

SEQ ID NO: 48755 - DNA, 201 bp, Homo sapiens
gcttggaggtgctaactccagaggccagcatcagcaactgggcacagaaaggagccgcctgggcagggaccatggcacggccacatccctggtggctgtgygttctggggaccctggtggggctctcagctactccagcccccaagagctgcccagagaggcactactgggctcagggaaagctgtgctgccagatgtgtg

SEQ ID NO: 48756 - DNA, 201 bp, Homo sapiens
aataacaataataatggcaaaggcattgggggaccgtgagcaaagggcaggcctttgcaggggtgggaatggaaagggaagcacgtccctagaggtgggcmtgggatgggggttgggggatgaagcaagtggaccttgaaggtctccacaggtctgagtgtcctatgctccctgggcctctcttcccccaggtcttctcgt

SEQ ID NO: 48757 - DNA, 201 bp, Homo sapiens
gtaatcaagtaactatttattatttatttattttagtgtatccacaggttgtgcagccatcaacactatctaattctataacattttcgttaccccagagraacttgtaccccttagcaatgactccccatttcttccccccaaccaaccccagccccagccccagcccctgggaatccctaatatactttgttttgtttt

SEQ ID NO: 48758 - DNA, 201 bp, Homo sapiens
aatgtatattttaaaggcaaattctcacgcctgtaatcccagcactttgggaggccaaggcgggcggatcacgaggtcaggagattgagaccatcctggcyaacacagtgaaaccccatctctactaaaaatacaaaaaattagccaggtgtggtggcacacacctgtaatcccagctactagggaggctgaggcaggaga

SEQ ID NO: 48759 - DNA, 201 bp, Homo sapiens
cccccaagagctgcccagagaggcactactgggctcagggaaagctgtgctgccagatgtgtgagccaggtaagagggggccttggtaagggccaggtgastggcgaaagagagaggactggggttaatacagtaaataggcgcagggtgagactgagctcaagcaaggagggaaatcctgcagctgtggggaggcaccac

SEQ ID NO: 48760 - DNA, 201 bp, Homo sapiens
caccaggctttcttgcagcctgtcccacatctgggtgtcactgccttcctctgaatcaccctcctctcaaaccagccgccagcgagcccagcccagcccayctagtgccctaccacacccgcccccaggataattaacacccagccacccagcatcggacctctacacttgagcaaaatgtatattttaaaggcaaattct

SEQ ID NO: 48761 - DNA, 201 bp, Homo sapiens; identical to SEQ ID NO: 17789

SEQ ID NO: 48762 - DNA, 201 bp, Homo sapiens
gagagaaaaaaaaaacagccacaatagagattctgccttcaaaggttggcttgccacctgaagcagccactgcccagggggtgcaaagaagagacagcagygcccagcttggaggtgctaactccagaggccagcatcagcaactgggcacagaaaggagccgcctgggcagggaccatggcacggccacatccctggtgg

SEQ ID NO: 48763 - DNA, 201 bp, Homo sapiens
acgtccctagaggtgggcctgggatgggggttgggggatgaagcaagtggaccttgaaggtctccacaggtctgagtgtcctatgctccctgggcctctcytcccccaggtcttctcgttcgcaactgcaccatcactgccaatgctgagtgtgcctgtcgcaatggctggcagtgcagggacaaggagtgcaccgagtgt

SEQ ID NO: 48764 - DNA, 201 bp, Homo sapiens
ttccaagctttattcttctgcgtataggtggattagaaagcttttcaaatctgtcccggatttggactctgactagacatacttagctcaggccccgccaygcagaggccttccttcctcattaacatgcatcccaacatgggacgtgggaaatcattttgattctttgttttgcgaggggagttgctatgtcaataatta

SEQ ID NO: 48765 - DNA, 201 bp, Homo sapiens
gatggaggctaaggtcaggatgcagcctaattagctgaacagtttgcagccctgctcagcaaagaaacccctggggtgcgggaagagagtgactcacattyttgtttccttgataaaggagaatgttttgagagtcattctagcgttgcagtctggggtcacaccatccagacacttggcttctcttccttccccagcatc

SEQ ID NO: 48766 - DNA, 201 bp, Homo sapiens
agggaggcaggcactggatagtgatccgagaatgcactgcatagacgctgccttcagaggattcagggagaggcaagggtagagcagtgtccgtgtgggcytcgaaacccttcctcagcaagtcaccacatctgactcagttctggatttcagggcctgtaggattgggacatggacccccttcagtcttcacaggccagg

SEQ ID NO: 48767 - DNA, 201 bp, Homo sapiens
tacaacagatatccataataattatagtaacaaagccatctttctatatttctttaaagtttgttttttccttttaagctccatcccaggaatttgggctstaattcagggacttgtagaacctcacagtgagagaggagtgaagtcctgtctgcttggatttattgctgtcttgattaatgagaattgctagcttttcct

SEQ ID NO: 48768 - DNA, 201 bp, Homo sapiens
tgggtaggcctcatctaatcagctgaaggcattaagagaaatgaccgaggtcccatggggaggaaggaattctgcctccagactgtcctggaactcaagastgcaacatcaactcctgccagcttttccagcctgccagcttactttgaaaattgccagcccccatgattgtgtgagccaattcctaatctcttctcatat

SEQ ID NO: 48769 - DNA, 201 bp, Homo sapiens
aggctgaggcaggcggatccaaccccagcgcggtgcttcacggacatgtgcgcatgcgcactggcagagagctgctgcggcacagggacttttcctctctgctcctccaacgcctcatctctgccattgggtggtgagcgaggaggcctcccctccacctccaagcggccttttcccctccccaggctgccccctcccagg

SEQ ID NO: 48770 - DNA, 201 bp, Homo sapiens
agagggttgggggcacaccttgacaaatttatgtccagctttttggtaaataggtgagggcggagagtttctcttgtatctgcttcttctcaattgccggmagctccacttaatccttatgccaaagtgacagattttaaggtggcatgttccgctccccttcacttgcaaagcactttgctttcttccaaactgcgtatg

SEQ ID NO: 48771 - DNA, 201 bp, Homo sapiens
catacatgattggaatttcctgcaggagagaagggggaggggagagagagagagagagagagagagagagagagagagagagagagagagagagagagagrgagaacatcaccctgtagtccccgccccatttttctgctgcccttacaacaaaactcctgagtgagtggcctgcatctgctgtctctctgttgtgtggcg

SEQ ID NO: 48772 - DNA, 201 bp, Homo sapiens
cactgcaacctctgcctcctgggttcaagcaattttcctgcctcagcctcctgagtagctgggattacaggcatccaccaccaagcccggctaatttttgkatttttttttttttttttttttgagatggattctcgctctgtcgcccgggctggagcgcagtggcgcaatcttggctcactgaaagctccgccccccggg

SEQ ID NO: 48773 - DNA, 201 bp, Homo sapiens
atgaggtcaggctctcagagaactgctgcttttgcttatggagtcagaacaagccctagcgaccttcacacctgcctaaggagctcaagtagagtccaccytctgaatcgagatcacttctttttctcccatggaggggcttgtgcacgcttggtaaagccatcctcagattgggatccacagtgaagtgagtgctagagg

SEQ ID NO: 48774 - DNA, 201 bp, Homo sapiens
tccatgtggctctgctttccctgaccacccatctcattggcaccatcattctcgcagagctggaaggcagaagctctgtcctgtaatcagtgtggtggggygagctggacagcctgtggcctgggctctgtgtctgcagccctcttgctgtgctgaatgcacactgttggatgtcacttgatggttccctagaataaatta

SEQ ID NO: 48775 - DNA, 201 bp, Homo sapiens
gatatagttgcagcagccagaaccaggccctgccatggcctctgcagggtacacaggccatgccctccatgtggctctgctttccctgaccacccatctcmttggcaccatcattctcgcagagctggaaggcagaagctctgtcctgtaatcagtgtggtggggtgagctggacagcctgtggcctgggctctgtgtctg

SEQ ID NO: 48776 - DNA, 201 bp, Homo sapiens
ggcttaaaacctcagggccagcatttgcttctagttttcctctagtgcttcccagttcaacagaagccctgccctttccacctccctggctaccaccctakcggctgctggggccccagggtctgcctatttatcctctgatgcggtgccatcgactgctggctgactgtctgccacacgacagccagggggtggctcaaa

SEQ ID NO: 48777 - DNA, 201 bp, Homo sapiens
cttcaggcaatgacaatagcagcacaaaggagacaggtggaagcaaaactacattgcagaaatgaaatgaaaccagatggtaacttgaactcaaagaaggrtatgaagagaactagaaatggcaaataaaaaggttaatataagaagtgaaaaatatatactcctttcttctttcagcttctttataagacttgattgtaa

SEQ ID NO: 48778 - DNA, 201 bp, Homo sapiens
tgcttcagaacagcctaaagcggctcatctcttctcagtcctggtccttgctttaagccttctgaggcttctaaattggctgataccattggcatctgccygtatctcaggcttaaaacctcagggccagcatttgcttctagttttcctctagtgcttcccagttcaacagaagccctgccctttccacctccctggcta

SEQ ID NO: 48779 - DNA, 201 bp, Homo sapiens
ccacctaataagaaatactaaagaaagctcttcaggcaatgacaatagcagcacaaaggagacaggtggaagcaaaactacattgcagaaatgaaatgaarccagatggtaacttgaactcaaagaaggatatgaagagaactagaaatggcaaataaaaaggttaatataagaagtgaaaaatatatactcctttcttct

SEQ ID NO: 48780 - DNA, 201 bp, Homo sapiens
actactgggcacagacatgatctgctagctaagcatgtgagcatctgtcctccaatctcttcttagcctgcaccctgtattcaagttcatgggcaccatcrgtttcttctgcttcagaacagcctaaagcggctcatctcttctcagtcctggtccttgctttaagccttctgaggcttctaaattggctgataccattgg

SEQ ID NO: 48781 - DNA, 201 bp, Homo sapiens
aaatgtatatgtgcatatacatatatatatatatatattttttttttgccaagtaagtcagcttggactcaaatgtcagtttctttgaacagatttgtcartgacctcaaattaaactctcccatttgaggaatggcaggtgctgcccttaatatatcttgcaggcctgggagtgacaggtgtggggcctgctcacctcgg

SEQ ID NO: 48782 - DNA, 201 bp, Homo sapiens
gaaaaattcccaagtcagatgaaaaacattaatatgaacatcaaagaaactcaattaatttcaagaataaatgcagagacctacattcagacacattttcrtaaaaatgttgaaagacaaagacaaagagaaaatcttgaaagcagtaagagaaaaatgactcagcacacataaggggaccccagtgagaataacagctga

SEQ ID NO: 48783 - DNA, 201 bp, Homo sapiens
cttatgctgacccagaagaaattctgaggtaaccagtctaaaagataaggacagggagcagggacatcagaagccaaacattggggaaaaagtgactgacytcatagaattagcccataccagtcaataaacaaacaaatgaataaacaaacaataacaagagaccaggtgaaaaaggagggagaatcagtatccagaact

SEQ ID NO: 48784 - DNA, 201 bp, Homo sapiens
ggctgtgtgccctccctgggggtcattccctctctcttgtcctaggagcttggggtgcccatgcttgaggcaggaggctgtgtgctcctgggagctggccrtggtgccatcttccagggccatttctcatgcctcccagtttccagtccctcctgactcccctccttctgggtcctccgcggcacaatgatatatttcata

SEQ ID NO: 48785 - DNA, 201 bp, Homo sapiens
atggtcaaagttctcatcagtgcactctatttcctcatggtcatggtaaaaaagtaaaaattaggagcagtactttaggactcagtagctcagatgccccrttttatagcaaaacaactattttactggagaaaatgacaaatattaattcatttaaatctctggaaattgtcctaagggcacacagcaaatggagaaaca

SEQ ID NO: 48786 - DNA, 201 bp, Homo sapiens
ggtttgcactcccagtctggggatgaacaggaggacctgtctgatgggagcagctgccaagcaagggtggggatgggagagaacccccaaacagagcaggygtggcgtccgggtgggccagatgagcaggggtccaaggtcagggttcacaggctcaacaagaagcttcctcttggaaacctaaaaaaggaatcaggaccg

SEQ ID NO: 48787 - DNA, 201 bp, Homo sapiens
cttgctgcatcccagcccaagcccatcagatgtgggggacttttgcccctctgaccctgctcctcatgaggcacagtctgcacgaagtgacagccccggcrctacctgagcccatgggactcagctcttcatcctctcagggcctcttttagtctaggtgcccagggcactgagagggacctggagtgacaggaacacttg

SEQ ID NO: 48788 - DNA, 201 bp, Homo sapiens
cccaccccacaataggccctggtatgtgatgttccccttcctgtgtccaagtgttctcattgttcaattctacagaatgggagaaaatttttgcaatctaytcatctgacaaagggctaatatccagaatccattattgcttctttacaaatggagaaacaggctcagaggagttccactagctggtcacacagctggtga

SEQ ID NO: 48789 - DNA, 201 bp, Homo sapiens
accagcttgaggggctgtgcccaaccctgcctccttcaggaaggtgtcccaagttctgtccttgcctaagcagctggcacctgtgctcaaaatatttattkcccccatgccagctgctctcccacttgtcctgtcaaagggagagtgggggcctgggggggatcttgctgcatcccagcccaagcccatcagatgtggggg

SEQ ID NO: 48790 - DNA, 201 bp, Homo sapiens
ttgttacatatggaaaataaatccacctgcttcagactctgatggacttggccatgcttcctttgtcccaagatagacaatgatgtgcatgataagattcyagctctgcttccgaagctcaactcaaatctaccttcccagacttccctctgcctgacttcctctctcatagcatactgtttgtgattttactgtagtgcc

SEQ ID NO: 48791 - DNA, 201 bp, Homo sapiens
cccgaacacttagcatcccaggtgacttagctggagggaacctgctatggactgaattgtattcccctaaatttatatgtagaagctctaatccccagtgkgatggcgttaggaggtagggcctttgcagggtgattggatcatttgcatggaaccctcttgcataggattagtgcttctgtaagcagagacataagagag

SEQ ID NO: 48792 - DNA, 201 bp, Homo sapiens
gcagtcagcagcagtcacaaccaaagtggggagtggctccatttgccttctccacctgagctagtgctcccctttctcatgcttcctttatcccccacatygatgagccactttttcctcctcttcatctgcactgccacaccccaccccgaacacttagcatcccaggtgacttagctggagggaacctgctatggactg

SEQ ID NO: 48793 - DNA, 201 bp, Homo sapiens
atattggtttaattctccttgatatttgcaaatgatttctgtgctttccctcagacatgccgacattcaggggaagaagaggaagagtgttccaatgaggytccgtttatttttttattttttgagacagggtctcactctgtttcccaggctggagtgagtggcacgatcacaactcactgcagccttgacctcccagga

SEQ ID NO: 48794 - DNA, 201 bp, Homo sapiens
cagaatggttagaagctaaaatcaagtagaacaaaaagacaaagggaaatagaagcgaaagaataaaacaaattatagggtttattctcaaggccagtctmctgacctacaagagttccagaaacagaacggggggaggaaagcttcaaagcgtaatgcaagaaaatttcccaaaactgaacaaaaggagtcttcaaagtg

SEQ ID NO: 48795 - DNA, 201 bp, Homo sapiens
gggctgcagaacagttggctctgctccccctgcagcacatatgggggccttagcagctgtcatttgccacctgatttctggtagggggatggtgcagtggyttttgagccagattacctgggggtgaatcctgattggagctaagggtcagtgggagcttgtgcagccacactttttgagcattggtttttctgttcacaa

SEQ ID NO: 48796 - DNA, 201 bp, Homo sapiens
agactggtctcaaactcctgggctcaaatgatcctcccgccttgacctcacaaagtgctgggattacaggcacgagccaccgtgcccagcccctttgtatwtgaattccctaaattaatgctgacatttcccaccagctgggaagatttgtaaaatcagaggtggtagatgatggaatgaatgcaggaggcttgtccaagg

SEQ ID NO: 48797 - DNA, 201 bp, Homo sapiens
ctgatatatatatatatatgtatatatatatatgatgtatttatatatatgtatttatatatacatatataatctatatgcaatagagagagagagagagatatgaagagttcattagcggaattggctcatatgattataaaggctaagtcacatggcaggttgtctacaagctggaggcccagggaagctggcagcttg

SEQ ID NO: 48798 - DNA, 201 bp, Homo sapiens
actgatatatatatatatatgtatatatatatatgatgtatttatatatatgtatttatatatacatatataatctatatgcaatagagagagagagagagatatgaagagttcattagcggaattggctcatatgattataaaggctaagtcacatggcaggttgtctacaagctggaggcccagggaagctggcagctt

SEQ ID NO: 48799 - DNA, 201 bp, Homo sapiens
atatttctatggaaggggtgtcatgtctcagcccccacactggcacacacacaaaaatgtatatgtgcatatacatatatatatatatatattttttttttgccaagtaagtcagcttggactcaaatgtcagtttctttgaacagatttgtcaatgacctcaaattaaactctcccatttgaggaatggcaggtgctgcc

SEQ ID NO: 48800 - DNA, 201 bp, Homo sapiens
tcaagagtctgcccgaataaagactcttctgtgtccacaggctcaatgtgagcatccctgtccacacccgggcctggccagacccaagggctttcttacaagatgtgtgaaacgtcagcattgaaagggctgggcagagcatctagtctaatgggaatttgacaggggtaaactgtgcctgagaacccaaaagaggcaggg

SEQ ID NO: 48801 - DNA, 201 bp, Homo sapiens
ttttgagagtcattctagcgttgcagtctggggtcacaccatccagacacttggcttctcttccttccccagcatccctcaagacctttttttttttttttaaatcctcactccccccaacccccctcaaatgcaccaataggctcagtcagaacaagggctcaagagtctgcccgaataaagactcttctgtgtccacag

SEQ ID NO: 48802 - DNA, 201 bp, Homo sapiens
agagacgtgagatggttctgtaggaaacactatgataggacagtcagcaggagcctagtacagcactgagtatgtgtgtgtgtgtgtgtgtgtgtgtgtgtttgtgtgtacactcagaaaaaagcaagttcctactgtggcaaagaatagagggtaaaaatgcaaacatgcgagtacccctctgacacaatgagttctttc

SEQ ID NO: 48803 - DNA, 201 bp, Homo sapiens
gattttatgacctcacgtaataaaaatccccagcaatgggtagctccagacttggtttattcagtgtctcaaagtaatcttgaaggacccaagttcgttckttctttgctcattgccatcttcagcatattggtttaattctccttgatatttgcaaatgatttctgtgctttccctcagacatgccgacattcaggggaa

SEQ ID NO: 48804 - DNA, 201 bp, Homo sapiens
tctctgtctttttaccttgaaaatgaatgctctcaaaataatgaataagctgtcgaccttacaactgagacagaattagaatgattagtgtattaatcagrgttattccagagaaacagtatatatatttacatatatctcccattgaggtcaagaaagacatgggtgtagctagctaggtagttcactatacagctagat

SEQ ID NO: 48805 - DNA, 201 bp, Homo sapiens
tgaaagctcgaaagctgcccccaccccaactcattcacccagtcacaaagataggtgacctgtcatcagatggcttctgtttcccgctaacagtctagtakcacagatgagcccattctccttagcaccattctctccaccaccaacacttactggtcacctctggatactggaaggaagaggtgaactggaaagacaaga

SEQ ID NO: 48806 - DNA, 201 bp, Homo sapiens
tcaacccataccagaggcaggctagaaatgataatttattctccaaatgcacataaagtttaatgatgtatgctgcataagtgccttcttgttaaacacamacacacaagtgcacagattttatgtattatttttccattatgattatgctttagaaaagcctttgcatgccaccctgcagaactaataagtgcctgagca

SEQ ID NO: 48807 - DNA, 201 bp, Homo sapiens
gagtgacagggacgagggaggatgcaaacagctgagactgtggagagccggctcgtttccaggcggtgttgctgccttcgccttgccaatgaggacagtcsgacacagggaagaaggggctccaccagcagcacccagcgagcacccggcatgcctgggattcgagtgcaggcctgtctgattctgtagggaggagaaaat

SEQ ID NO: 48808 - DNA, 201 bp, Homo sapiens
ttcctacctcagaaagacttaggaaatgctgttattctgcaaacagtttggactgacttgtaagatccgtaaaaagacaaatggaaacactcatgagccartgtttttatgaaagagccgcaaaggataaatttatgtttaattcgcaagtagggaagctcataagagcctaagagcttgataaaggctactgggcccatc

SEQ ID NO: 48809 - DNA, 201 bp, Homo sapiens
ggtgcccacagggcagcagcgtccccgggacaccctcagacatagggagtgacagggacgagggaggatgcaaacagctgagactgtggagagccggctcrtttccaggcggtgttgctgccttcgccttgccaatgaggacagtcggacacagggaagaaggggctccaccagcagcacccagcgagcacccggcatgcc

SEQ ID NO: 48810 - DNA, 201 bp, Homo sapiens
gggagtgagggaaaaacaacatctacctctaatggaacacactgggtctcaggggagccaaggccacacagaagttcctgcaagactccttgctccagggygccgccccagtaaaggaggcctttgggagtccattaagtgagcagggtgtcctgttcgtcttgggcaattgcattctttttggccttcctacctcagaaa

SEQ ID NO: 48811 - DNA, 201 bp, Homo sapiens
cctcagacgagcagcccgcatacctctcgcatccctttcaaccatccctcacctgtcctttcctgccactagaggaaggggagttaattatctcagcttgkgcttccaatcactgacctcatatgtcctctgggactctagatcatcaattaagtctctgtcccatgtcttccaattttcccctctacctcttcccaccag

SEQ ID NO: 48812 - DNA, 201 bp, Homo sapiens
ttttcagtgaagctagaagtggccatacgacctacttctggacgcagagatgggggaaggtgtcctgggggaggagagatctgagggatggtgaagataayttttgcttttctggtagaaagaacagatgtctctcctgcctgcctgtctcaaatgaggacatgatgtgtaatgtctggagcactggcagccatgttgaga

SEQ ID NO: 48813 - DNA, 201 bp, Homo sapiens
tcgggggaggatgaaacaggggtgtgtgttactcttcagctgtggggtgaggaaatttccacaacacagcaggaaggtcatgggcattactcaacgccagkggctgtccctggagacaagtcaccagagctaacctaagccttttatttcttctgaaccccctccactacctcatccctcaactcaacgtcagcagaagaa

SEQ ID NO: 48814 - DNA, 201 bp, Homo sapiens
ctcctctccttcccatgtccacactctttataatgtggctttgcagcagcttctctcccctctgaatctgggctggactgtgtctggctctggccaatagyggagtgatgaggggccagctctggacctgcatctggctgcaagacctccatgccctgcattctctctctccctgaacccaccccgttgcctctggagcaa

SEQ ID NO: 48815 - DNA, 201 bp, Homo sapiens
taaatggttcaagcatggctgggcatagtggctcacacctgtatgatcccagcactttgggagactgaggcaggaggattgcttgagttcaggagttcaasaccagcctgggcaacatagtgagacactgtctctacaaaaagtttaaaaaaattagctgggcatggtggcatgtgcctgtggtctcagctacttgggagg

SEQ ID NO: 48816 - DNA, 201 bp, Homo sapiens
acacagtggccacatgtgccttccaggtcccgggttgggaaggttggtgaggtagcagcagcagctccccagtgcagaaactgaaggctctgctcctggaygccgctcttcctgatgggcagccaatacttctcacaagataccctctctgcagctctcagctgctgaggttcactttgtggcttccaatgtcagtgggcc

SEQ ID NO: 48817 - DNA, 201 bp, Homo sapiens
ggggttagtcagcagtttctgataggcctagaatatgactgtttatgctgagtcggcttgtggattgctaacgaaggagttggaggcactgcagctgcctsagcccaatggcctcccgattaatttttgtttttaacacaggtatgacaacacagtggccacatgtgccttccaggtcccgggttgggaaggttggtgagg

SEQ ID NO: 48818 - DNA, 201 bp, Homo sapiens
cacaagtctcccagccttgactggagcttctattaatataaatagatgctttgtagacattcccagctgtaggggatggacataaattgtgcaccattgayagtagcacacaaatgccaaatgcctgggtggctctggggagcatgagaagtcgggggaggatgaaacaggggtgtgtgttactcttcagctgtggggtga

SEQ ID NO: 48819 - DNA, 201 bp, Homo sapiens
gacagtgctcagtaagccttcctttgcatcctttgttgtttgcaaactggctcttatttgtgagcctcaaggaaacctgtggcagaagtaaggcttgagcmccacacatgagacctgagagttgccccagaggtggcccgtgtaggtctgggttggctttagagattatttttaaaaataaagatctaggacacatatttt

SEQ ID NO: 48820 - DNA, 201 bp, Homo sapiens
cttcaggtcagctggttagcagccttaattctgtctgcagcctgaattccctttatacagcaacacaacactcacaggtgccggggattaggacctggacrctattctgccccatctgctctccatccttcctccacacactctgcctctgctgaagattggggtggggaagttcagcacaagaagtcagagtgctttggt

SEQ ID NO: 48821 - DNA, 201 bp, Homo sapiens
atatcaactgggaaacatttaaaaaaataataaagcaggctgcccccgtgccataagccagagtctctggggagggggcctgagcattgcaggtggtaaamgtccccaggtgattgtactgaagcacagcagggttgaaaccctggcaccacgggctgtggtgctgtctcttgctggctgtgtacagtccctgggctcagc

SEQ ID NO: 48822 - DNA, 201 bp, Homo sapiens
tacagatactgcagaaaagaatgaggccctgtacagttcacagcaataaaggctacatgaattgagtgccataagggagaaataagcaggctgagctgacycagggaggcttctcagagaaggtgttttcaggaatcaccccaagtcacaaatgggaggcctcagcacccaagaggatgaaatcagcccaggatcatgcca

SEQ ID NO: 48823 - DNA, 201 bp, Homo sapiens
gagagacgtgagatggttctgtaggaaacactatgataggacagtcagcaggagcctagtacagcactgagtatgtgtgtgtgtgtgtgtgtgtgtgtgtgtttgtgtgtacactcagaaaaaagcaagttcctactgtggcaaagaatagagggtaaaaatgcaaacatgcgagtacccctctgacacaatgagttcttt

SEQ ID NO: 48824 - DNA, 201 bp, Homo sapiens
gccaccccaaccttcagcaaccactgccctgattaatcaacagccgtcaacatgtcaacatcaagcctagaccctccaccagaaaaagattacaagtctcygaaggctcggataatcattagtatttctcagcaatgaagtatttttgaattagggtatgtgcactgcttttttagacataatgctattgtacacttcata

SEQ ID NO: 48825 - DNA, 201 bp, Homo sapiens
cgggaccaaaaattctatgaccccctggtgaagccaataagtctttgaaatcttcaacactcacgtgtaataatttcaatcagtttttcagggcattgtcytaggtatgaggacagcccaaagtcagctggtatttgaggaaaggatccaacatgaagcacagaaaccaggacaaacggaaaaaggggacctggagagggc

SEQ ID NO: 48826 - DNA, 201 bp, Homo sapiens
gtaatcccagcactttgggaggcagaggcaggaggataacgaggtcaggagatcgagaccatcctggctaacatgatgaaactctgtctctactaaaaatmcaaaaaaaaaaaaaaaaaaattagccgggcatggtggcaggaacctgtagtcccagctactcaggaggctgaggcaggagaatggcgtgaacttgggagg

SEQ ID NO: 48827 - DNA, 201 bp, Homo sapiens
gaggtgaactggaaagacaagaccactctctgccctcaagatggggctgtgtctagctaagtgagatgtgtgtgtgtgtgtgtgtgtgtgtgtgtgtgtgkatacacatatatgtataaagacaaccatatttatttgtctatatgggactacatctctgcataaacactaccatatgcaggctctgaggtcaaagttcat

SEQ ID NO: 48828 - DNA, 201 bp, Homo sapiens
tgtgaaaatggactaatacagggatactaacatttgcgggaccaaaaattctatgaccccctggtgaagccaataagtctttgaaatcttcaacactcacrtgtaataatttcaatcagtttttcagggcattgtcctaggtatgaggacagcccaaagtcagctggtatttgaggaaaggatccaacatgaagcacagaa

SEQ ID NO: 48829 - DNA, 201 bp, Homo sapiens
cttcaagtaagatatatgagcacagtgtgtattatctttacaacagatatccataataattatagtaacaaagccatctttctatatttctttaaagtttsttttttccttttaagctccatcccaggaatttgggctgtaattcagggacttgtagaacctcacagtgagagaggagtgaagtcctgtctgcttggattt

SEQ ID NO: 48830 - DNA, 201 bp, Homo sapiens
caagctctgtaggggagcaaagcctatgctttgcttaacacatagaatggaattgcattaatgtgagaaagcatttcgaaaatgatggagtctgtagagawgctaggaattgttttcatgatcattacctgaagcttcatcctaaaatgtgctgactcttaatttaagtatatgcaacccaaagttatctaggcctgtcag

SEQ ID NO: 48831 - DNA, 201 bp, Homo sapiens
ggcaggagaattgcttcagcctgggaggtggaggttgcagtgagcagagattgcaccactgcactccagcctgggaaaaagagcgagactccatctcaagaaaaaaaaaaaaaaagaaatatacaatacattgtcattaactatagtcactcaatgccactgtctttcctttcatctcctttccaggcctgactccatttg

SEQ ID NO: 48832 - DNA, 201 bp, Homo sapiens
gtcacaagggtttgttctgttttccagcactgcccttaactcaaaccttgctgtgcagcatctaattttggctttctgacacccttctttaaaaaaaaaaattaaattaagaaaatggatacatatttgtacatatctatgaggtacacgtgaaattttgttacatgcgtgtaacatgtaatgttcaggccagagtattgg

SEQ ID NO: 48833 - DNA, 201 bp, Homo sapiens
ggtcacaagggtttgttctgttttccagcactgcccttaactcaaaccttgctgtgcagcatctaattttggctttctgacacccttctttaaaaaaaaaaattaaattaagaaaatggatacatatttgtacatatctatgaggtacacgtgaaattttgttacatgcgtgtaacatgtaatgttcaggccagagtattg

SEQ ID NO: 48834 - DNA, 201 bp, Homo sapiens
cctgcgtggcaaaatgagaaatatatatttggtctttgaacctagatctggcagagagctcctaaaactcttggaatttcctgagtgacaggaatgttttyttttgtttttcataatgagcccctttgactatacccaagtttattccaaggaggcaatgcctggcaggccccgagacagcctcaggatggagctggttgc

SEQ ID NO: 48835 - DNA, 201 bp, Homo sapiens
cccaggctctagccctggaacctggagtggagacaggagctcttggacctgaactggccttgccacagacgcaagtcagggtggtgcttcctcagtgcccmctcacggcgagtcccccgtagggatagggatgtagtgcaatcacagtgacttgtttgtagttctgaaaagcacttgcccatgtcttgttgagttactgct

SEQ ID NO: 48836 - DNA, 201 bp, Homo sapiens
acatcagacacaggtgtccattgtcagcgtcctcccctcagaaggggagggtccattgtcagacccctcagaaggaggggtcaccttttctttcagggttyagtagaactgggtgtggtctccagctcacttatggtggaggctacagatactgttggttgccagccaatgtccatttccttctttggaaaaaagaaagag

SEQ ID NO: 48837 - DNA, 201 bp, Homo sapiens
tgacttgtcatgacacatttgctcttccacagccctcatcaaagctgagacaaataatcgggtgcttccaaaggttttttaaaagtgggtaaaattcaatrtaactgtcaacctctgagcatgagatcctaagaatttaatcactcctgataggagaagtaaacatagcaccagggtgacataacagtttccctgggctct

SEQ ID NO: 48838 - DNA, 201 bp, Homo sapiens
tgggaacagttcagtgtttctggggtgtgggggtgtcaaggtgggggatggggttgatggaaaacatttgcaatttctgctttacctcacgattcccagcyctgacctctggacctgttctctcccacccctaacataaatcattttagtttcattcagtgtgcgtttcctaatatttttagggtctcatggccattttag

SEQ ID NO: 48839 - DNA, 201 bp, Homo sapiens
ggcttatcagtaaagcccagagcatttgctatttattgctcaaggggcacctttgtacagtctggccgtttgcttggcatggcctcttagaactccttatygtttaagaaatccgatctggtgaataagaagttagtctttctctcccagtcactgcctcctggacgaatatttgccagcacggaggcagagaggacagaa

SEQ ID NO: 48840 - DNA, 201 bp, Homo sapiens
ttcagcctgggaggtggaggttgcagtgagcagagattgcaccactgcactccagcctgggaaaaagagcgagactccatctcaagaaaaaaaaaaaaaargaaatatacaatacattgtcattaactatagtcactcaatgccactgtctttcctttcatctcctttccaggcctgactccatttgtcccactttccaat

SEQ ID NO: 48841 - DNA, 201 bp, Homo sapiens
tccgtgggtctctcctttttattagcttctccatcaagaaggctttcattactttccaatgctctgagcttctcaagttcccccttcctaggaaaagtgcrtttttaaagacagttcttcagcccaccactgcaccctcaggatgcatgccacctggggctggaggctggtgtccagggtgaggggagttaaaggatctcc

SEQ ID NO: 48842 - DNA, 201 bp, Homo sapiens
tgtaagtccagtaaacctctttcttttgtaaattgcccagtcttgggtatgtcttcatcagcagtgtgaaaatggactaatacagggatactaacatttgygggaccaaaaattctatgaccccctggtgaagccaataagtctttgaaatcttcaacactcacgtgtaataatttcaatcagtttttcagggcattgtcc

SEQ ID NO: 48843 - DNA, 201 bp, Homo sapiens
ggactagaggcagaggtgttgatctcactgttcctagatctgcagagctgatgatggatttggggaaggctcccatcatcttccttccaggtggtccaggygaataagctcccccagcagtcaagaccacaagtctcccagccttgactggagcttctattaatataaatagatgctttgtagacattcccagctgtaggg

SEQ ID NO: 48844 - DNA, 201 bp, Homo sapiens
tttccttttacctttgtcatgttctccttattcttttgtttcctccttctccttttttccctcaacattctcttcttctcatcatcattacacacattatycaaagtccagatcagtcaccccccgacagttgttgatccttacagtcagagtgagttacctgccctccagcccccagcactcatctctttgtattttttt

SEQ ID NO: 48845 - DNA, 201 bp, Homo sapiens
actttcatctgtcataggtgaatttcatctcggacctgcctttccagacttgctgtctctgggtgctctcctcacaaggatttgctggctcccatggcttyccacaaccagcacagcacggacctttggagtccccaatagaaacattgcaggggcagtgcatcggcctgctgactagaagtctttctgtccctaactgat

SEQ ID NO: 48846 - DNA, 201 bp, Homo sapiens
ccccaaacacagcaagaggcctgccctgaggcgggagggtggaggctgctaaaagcacaggtcagctgccacctgaaggtagaggtggatcctgaggaggkgggggagtggaggtcacagcctggtggaccctgtaggcagaacaggacatttgtggggcagcctggcaaattgttatctgttgcttctcagttcagtaag

SEQ ID NO: 48847 - DNA, 201 bp, Homo sapiens
tggccactggctccttttgttgtctccctttcaattcagtaccagaacatcccttcaccggcaactttcgagtgggcctgctgaaacaatcaaggcagtgyctccacttaactttgagaaggtagtgtgtgagagatttagaataagcagctctggaactactcccagtttactcttataattacatacacaaaaaaatca

SEQ ID NO: 48848 - DNA, 201 bp, Homo sapiens
cctgagcaccataagcacaaggactgttcctagcaaggatttacaccagcatttctcctcagccatgagctccatttccacctgcctattggtcacctctstgtcacactcaatgtattccaaatcaaaccatctttccacctcaattcctttccgcttcctggactttacatcttggccactggtttaattattaccctt

SEQ ID NO: 48849 - DNA, 201 bp, Homo sapiens
gccttgccacagacgcaagtcagggtggtgcttcctcagtgccccctcacggcgagtcccccgtagggatagggatgtagtgcaatcacagtgacttgttkgtagttctgaaaagcacttgcccatgtcttgttgagttactgctgtgatttgcacttaataggggaacctgagccagagatgcgaaggggcttgaacaag

SEQ ID NO: 48850 - DNA, 201 bp, Homo sapiens
cctctacccctctaggttctctggctggggctctgaaagagactgacaaaggcagattaacgagagaaaaacagacacgagtttattaccacgtgcatcaygcacacccatgggaacgtccgcagtgagtaactccaaggggcggccagagctcgagctttcatagcacctcacaagagaatgcttgtttagagaagtgac

SEQ ID NO: 48851 - DNA, 201 bp, Homo sapiens
tttggtttacctttttaaccctgcaatgtgtatcaaagggtgcttagcacatagtgaatggagatattagtagttcttctctgatgctttccaagttcggygaaatcttgaggctctccactcacatttgcaaatgctaaacgctcctgtggtggagagagcaggggggctggtgtgtggacaccctctgaggtgttctca

SEQ ID NO: 48852 - DNA, 201 bp, Homo sapiens
tctccgctctcttcctggttattgctaaggggctctgtggcctgagcaccataagcacaaggactgttcctagcaaggatttacaccagcatttctcctcmgccatgagctccatttccacctgcctattggtcacctctgtgtcacactcaatgtattccaaatcaaaccatctttccacctcaattcctttccgcttcc

SEQ ID NO: 48853 - DNA, 201 bp, Homo sapiens
caagtaatctacctgccttggcctcccaaagtgctgggactataggcatgagccaccacacccggccatttccttctttttatttataattcatcaacaaygtgccttgttcagcaaggattcttccacctttataagtttgtatttaaaaaattcctatatgtacttttattccactggaagttttatatttatcctttt

SEQ ID NO: 48854 - DNA, 201 bp, Homo sapiens
ataagaccttggtcactctctcactcatgggttgctctcttagggggaagccagttgcctccatggggagccctgcagagaggcccatgcagtgaggaacwgagggctcttgccagcagctgccatgttagggagcttaaaggctgatgccccagccccagttgaaccttcagattatggcagccccagctgacagcatgg

SEQ ID NO: 48855 - DNA, 201 bp, Homo sapiens
agattgcaccactgcactccagcctgggaaaaagagcgagactccatctcaagaaaaaaaaaaaaaaagaaatatacaatacattgtcattaactatagtyactcaatgccactgtctttcctttcatctcctttccaggcctgactccatttgtcccactttccaatattccatgtggatagcctagaaccatctaagag

SEQ ID NO: 48856 - DNA, 201 bp, Homo sapiens
ggtggctcatgcctataatcccagcactttgggtggctgaggcaggtgggtctcctgagctcaggagttcaagaccaccctgggcaacattgtgaaacccygtctctactaaaatgcaaaaaattagctgggcatggtggtgcatgcctgtagtaccagctactcaggaggctgaggcacgagaatcgcttgagccccaga

SEQ ID NO: 48857 - DNA, 201 bp, Homo sapiens
catcatcattgtctcattgtaaccactaatatttctttttcttttcttttctttttttttgagacagtctcgctctgtcacccaggctggagtgcagtggygcaatctcggctcactgcaacctctgcctcctgggttcaagcaattttcctgcctcagcctcctgagtagctgggattacaggcatccaccaccaagccc

SEQ ID NO: 48858 - DNA, 201 bp, Homo sapiens
cagttcccattgcctggactttttagcatttgaaaccaccctgtccttctggacaatctcccatatatattattctctggtaaacatcctacacgcaatgrggcttgcattctttcttttttctgtgcatgctttacagactcacctttctgtgctgtttcctgggttggtgatctgtggttggcagccttcaatgaacca

SEQ ID NO: 48859 - DNA, 201 bp, Homo sapiens
tagatttatagcctaagatagtgtctgtctttgttttctgttgcttataacagaatactcaaaactgggcgattgataaagaaaaggatttttttttttttatggttatagaggctgggaagcccaaggttgagggctgcatcgtgtaaggaccttcttgctggggcggacttgctgcagagtcctgagatggtgcagggc

SEQ ID NO: 48860 - DNA, 201 bp, Homo sapiens
tcacttgagcccaggagcttgagactgcagaaagctgtgatcgcaccactgcactccagcctgggcaacagagcaaaacattgtctcaaaaaaaaaaaaaagaaagaaagaaagaaaaaaaggcctaagcattcagaagaggctctctggcattcattccacactgaaattctgaaatcctctttgcaaatccagaggttt

SEQ ID NO: 48861 - DNA, 201 bp, Homo sapiens
agatctgcagagctgatgatggatttggggaaggctcccatcatcttccttccaggtggtccaggcgaataagctcccccagcagtcaagaccacaagtcycccagccttgactggagcttctattaatataaatagatgctttgtagacattcccagctgtaggggatggacataaattgtgcaccattgacagtagcac

SEQ ID NO: 48862 - DNA, 201 bp, Homo sapiens
tcagcattaacagcagtccctgtgcggagataaaggctgtggttaagacgagccctatgtgcgcgcgcacgggtttgtgtgtgtgtgtgtgtgtgtgtgtkcgtgcacatgggagtgtcaggggctgcagactcttccggtgactgagataaatcagactgttaaactgtctctagctaatccattagaaggataggtaca

SEQ ID NO: 48863 - DNA, 201 bp, Homo sapiens
aaaaagagagagggagaaataagagtgagagggagaaatgagagtgagagagagaaagagagaaaggaagagaaagagagagagagagagagagagaaaaagagagagagagagaggcacaacagccccagctggttcagcattgcacaggacaaatgatggaagaagttatctttgacattccagctccagcagatgtga

SEQ ID NO: 48864 - DNA, 201 bp, Homo sapiens
tgtaaaaagagagagggagaaataagagtgagagggagaaatgagagtgagagagagaaagagagaaaggaagagaaagagagagagagagagagagagaraaagagagagagagagaggcacaacagccccagctggttcagcattgcacaggacaaatgatggaagaagttatctttgacattccagctccagcagatg

SEQ ID NO: 48865 - DNA, 201 bp, Homo sapiens
cttgtaaaaagagagagggagaaataagagtgagagggagaaatgagagtgagagagagaaagagagaaaggaagagaaagagagagagagagagagagagaaaaagagagagagagagaggcacaacagccccagctggttcagcattgcacaggacaaatgatggaagaagttatctttgacattccagctccagcaga

SEQ ID NO: 48866 - DNA, 201 bp, Homo sapiens
acagcctgaggggagggctttcactacaaggcggggctcagggacatgtctccccttccctccatgcccagcctggacggcctgagaggtgcctcctctgycccacaaagggggctcttcccatgctcttcctggccacctcagcaggggctggggagtggcaaaggagttattcaagattcccctgaggttaaagggtaa

SEQ ID NO: 48867 - DNA, 201 bp, Homo sapiens
tcaccgctttctgctcagtcctcccacttttggggttcgtgttcctggatgcagagcatgccaggttgaaacaacacggactcgcaccgagtccctcctctgtcccctgctctgtttgcctctggtctcaatgttcaggcagctctgctgggagcggcaggcccaccctccttggggggcggctcctggccgcttctccga

SEQ ID NO: 48868 - DNA, 201 bp, Homo sapiens
gtcaccgctttctgctcagtcctcccacttttggggttcgtgttcctggatgcagagcatgccaggttgaaacaacacggactcgcaccgagtccctcctctgtcccctgctctgtttgcctctggtctcaatgttcaggcagctctgctgggagcggcaggcccaccctccttggggggcggctcctggccgcttctccg

SEQ ID NO: 48869 - DNA, 201 bp, Homo sapiens
aaagctagatttgtaccatttccaagactatggagttgctggaaacagttgctgtgaattcactgggacagtaaggtagtagccacaggcttcttagctcrgaagttgtggcaaacagtaagcatggtggggaggtttacctacgtgtggagatcagttcagctgatatacatgagccagggttcagagacagtgtgggaa

SEQ ID NO: 48870 - DNA, 201 bp, Homo sapiens
ttacctacgtgtggagatcagttcagctgatatacatgagccagggttcagagacagtgtgggaaaagggaaggatttcatggcagatatttctggacatycggttggaagagacttcagattgagctcctattgaaactgtatagcaatttgggggagaactgatgtcttaacgatattgagccttctgacccatcaaca

SEQ ID NO: 48871 - DNA, 201 bp, Homo sapiens
tcgcctggtgtctcaagctgaagggggcccttcgtccaatgctgaaatgcctcttctagagagcagggaagagccttgcactgaagctaccagcactccayccctcgattctgggggtggggggtgggaggggcgatcatggagatatggggccggggaaaggggacagagcacttggatctaggcaggtgagaagaggcg

SEQ ID NO: 48872 - DNA, 201 bp, Homo sapiens
atttatagcctaagatagtgtctgtctttgttttctgttgcttataacagaatactcaaaactgggcgattgataaagaaaaggatttttttttttttatrgttatagaggctgggaagcccaaggttgagggctgcatcgtgtaaggaccttcttgctggggcggacttgctgcagagtcctgagatggtgcagggcatc

SEQ ID NO: 48873 - DNA, 201 bp, Homo sapiens
ctcagtgttcagggagaatgcatctgctcactcatccacatggcaggtttccagaaagcattgtccatgctcccattgttctctgtccattccacacacaycaggcttcttcatctgacccttacctggtctcctgggggtttcctgagccccttcttcacagtgtcagccacttatgtcagacaacatttctttttgttc

SEQ ID NO: 48874 - DNA, 201 bp, Homo sapiens
ctttacagtgtagccccttcctccttccagcctcatgagtcacatactgctttgctcctttcctcggatcttccttcttcttccttccaacaaaaggagcygataactcatgctacacagttccatgccctgcacgttcctctaaaattagcccatgctgagtgagaatctatgtgccaggcagcttgctactttagccat

SEQ ID NO: 48875 - DNA, 201 bp, Homo sapiens
aaaattagcccatgctgagtgagaatctatgtgccaggcagcttgctactttagccattgtttcattgagccctcacaactccagagggtagatacagtgrttgtcccaggacacagacccacctcccaaacactacgctgcagtgcttggtgctcggatgtgcacttactagtttgcttctctgtccagcccatacactc

SEQ ID NO: 48876 - DNA, 201 bp, Homo sapiens
tctgcaaagtgaggccctctatttccggtcttatttcctctctagcagcagtgcccttgtaaatgaagcctggatttctcaacagaagatttcaacaaaaragaggcttaggagaataaggaatttgcaaatcctatgtactggaaataggccaggagttcagtgatgctggaagaaactcgagatttgcccaagaacacc

SEQ ID NO: 48877 - DNA, 201 bp, Homo sapiens
ctcggacgggtcccccgctgtggcatccccgctccacgtggccctgggtgccttgccctctctcactcccagtcttaggaacctattctggtaacgtgagygatgggagtgcaccggagtgtgtgagtttgccggtggatttgcagagggctggcgagccaggcctggagctggcaggcgtgaggggctccctggaaaaga

SEQ ID NO: 48878 - DNA, 201 bp, Homo sapiens
agtcactgccagccagcaggggctccaggctcagggcacaattgccagggcagaatgccaggaaggagtgtcaggcattgggcaggtggaaatgggtggamggtgcttgggcacccaacagaatgagtgaagcttggaggcgaggccatgctggtgagtttgaaaaagagtcagaagcctcctgctgtacatgagtggcaa

SEQ ID NO: 48879 - DNA, 201 bp, Homo sapiens
ggtgttgatctcactgttcctagatctgcagagctgatgatggatttggggaaggctcccatcatcttccttccaggtggtccaggcgaataagctccccyagcagtcaagaccacaagtctcccagccttgactggagcttctattaatataaatagatgctttgtagacattcccagctgtaggggatggacataaatt

SEQ ID NO: 48880 - DNA, 201 bp, Homo sapiens
tacctgctggtcaccaggatggacacccactgcctgtgttccagccttaaacctggacctgttcctgaccctttccttcttccttttcctattatccaaayagtcaccaggagctgttgattacattccttcaataccttccaaatcgctcctgttctctgacctcatgggcattgcctgggttcaggccctgccccctgg

SEQ ID NO: 48881 - DNA, 201 bp, Homo sapiens
aggaaccaaaggccacaccctaaaatagaagttggaagagaaggtggtgaagccccagacatccatgtctgacccagcagttgctaatggacccagaggtraaagagaaggggcatttcctggagaaatcagcgaacgcccggggagctctgcttctaacaggctgtgagacgggggaggacagagggaaggacagagagc

SEQ ID NO: 48882 - DNA, 201 bp, Homo sapiens
tggcctcctgacatcacatctacagccaatggactcacctggattcccccagacaacattcaccacgggctgtctccaggacatggcgtgttccggactgkgccatgctggggagaggtggggtctggggttcagagatgggtggggagggcaccgtggccagcaggtgacatggccttcacctggcaccctgtgtgacac

SEQ ID NO: 48883 - DNA, 201 bp, Homo sapiens
cctgtgaaagaggctgctctcatgtttctcctgttaactccaggatctgggctacccagacttcagacaaggcccttggtgtgtccaggcagctacgccakggctgggaacagctttgctctccccacctctgtgtggggctgcagcctcagtgtgtagagccctgcaaagggcattgtagttgtccccccaacccctgcc

SEQ ID NO: 48884 - DNA, 201 bp, Homo sapiens
aaatggggctggatgtgtgcttgctacagtgtgtgtggacactagaggcaccatgagctgatgtgccaggctttggcaactgctgtgcaggagagggcacygtgtgcacagggagtgaaggtggggacagagaaggtctgtgagcctaggctgaatgggcctggcaaggaagcagaggctgccaaagaaatgcatagtgct

SEQ ID NO: 48885 - DNA, 201 bp, Homo sapiens
aaatgcaaagtgcttgtcacattacaggcaatcagtgaaaggaagctgcctcatggtgtcagcatgggttgcatgtcttataaatatacattggatctctygcaacaaaggctctgtagagtttgaagggacgtgggagggatctagttttgacttctgatggtggaacatcgggcatcaacgtgacaaggcactttgggc

SEQ ID NO: 48886 - DNA, 201 bp, Homo sapiens
gggtcaccgctttctgctcagtcctcccacttttggggttcgtgttcctggatgcagagcatgccaggttgaaacaacacggactcgcaccgagtccctcctctgtcccctgctctgtttgcctctggtctcaatgttcaggcagctctgctgggagcggcaggcccaccctccttggggggcggctcctggccgcttctc

SEQ ID NO: 48887 - DNA, 201 bp, Homo sapiens
atttcctgatcacctgcagcgtgcaagccctgtgtgaggtgtcggtatacctgctcactcttctagaacagccgtaggatggggtaggtgagggaggtggstttcaaatggaaaaaatggctgcacaagagaacacaagtagcttcaagatgagagtagctcagttcattcatggatttatttttcctgcaaatgttcacc

SEQ ID NO: 48888 - DNA, 201 bp, Homo sapiens
gctattttgatgccttttgttttgcactctttagacaaacagagggtcagcggtcagaggggcatttgaggaacactgtagagagagtgctggtttgcatwaaaaaaatggcaacagagaaatgagagccggatggaaatcccagttctgtgtgttattacatacaagtggcaagtacttaactcatccaagctgtgtttt

SEQ ID NO: 48889 - DNA, 201 bp, Homo sapiens
ggccagtaattacatgaaagaagctcaacaccattggtcattaaggaactacaaagccacagtgcatgtatgactataataaaaaaagacaatgacaagtrttggcaaggaggtggagaaatcagaaccctcatacactgctggtgggaaagtaaaatggcgcagcccctctagaaaacagtttggcatttcctcaagaag

SEQ ID NO: 48890 - DNA, 201 bp, Homo sapiens
cctcacttgatggctgtgacagcctcagctcacttggcttcccacacaggagacctgcaaggccactcacaaaaggcgattgatttagtggctcagggcgytgggatggaagggcctggggagtccttcagtgacgacccttctctctgcgtggcctcaggccccagcctccccacttctcccagttctagcaactgacac

SEQ ID NO: 48891 - DNA, 201 bp, Homo sapiens
ctagctgctctattgagggccagtgacgggcaggggtgaaggcggcggggatcggaccagacactaaatcactccggcttgagctgggtctgtagctatayaggtggtgagaagtggttggattttgggtaaattttgaagatgtgcttgacaaatttgtcaaaggatttgaaagtggggaacgagaaaaagagaggggcc

SEQ ID NO: 48892 - DNA, 201 bp, Homo sapiens
ttgctgcaatctcatgataaaacttgaacagatgaggagttgcttcttacaggtgagtaaagaaagtgctttcttgagatgggatctatttcaggtgaaartgctgtgaacattgtgaaatgacaacaaaggatgaataattttatataaatgtagattacaataaagtagtgggagtgcttgaggggattgactccaatt

SEQ ID NO: 48893 - DNA, 201 bp, Homo sapiens
tcatagcactgtctatcttggcataggtttggtgggcacttgaaaagaatgttcattctgctgttgagtggagtgttctataaatgtcaatgagctcttgytgtttgatggtatccttgattattttttgtctagtttttttttaccaatggttgagagggggtgttaaagtttccaatgataaccgttgacttgtctatt

SEQ ID NO: 48894 - DNA, 201 bp, Homo sapiens
gggggcccagatgttgaacttagctgataaagacatcaaagcagctgttataaatatgttcaaagaactaaaggaaactacatttaaagaatgaaataaaagtatgattatatcttatgaaataaaagagatataaattatttttaaaacagaccaaatggaaattctagatttgaaaattacaataatgaaattaaaact

SEQ ID NO: 48895 - DNA, 201 bp, Homo sapiens
tcttgcctctgccacttactggctgtgtgcctgtttctaggcctcagtttcctcctctgtaaagtggggatgacagtactacctgcttcatgcagattatraaacattagacaagataatgagtaaagtttttagcatactactttgcatgtaggttttggtggtttctggttattattcatagtgattttttcagtaatt

SEQ ID NO: 48896 - DNA, 201 bp, Homo sapiens
tgtcctagtttaggtctcccttccttttcttgtaaagccaccagtcccacctctatgacaacttattaaccaattaatccatgaatgaactagtccattcmtgatgacagagcctttatgacccaatcacctcttaaaggtcccacctctcaatactgccacattggggattaaattttacaatgagttttgaaggggaca

SEQ ID NO: 48897 - DNA, 201 bp, Homo sapiens
cagaaaagcccccatgggctgctggaggctcggggaggtggcagtgagctctgggctcagggcacaagaggcttttggaggctgggtgctggctggactctgtttgccagccttctctgtaagtcccaggcattagagcacagcaagcaggaataacaggagccctgggcccttagaaggaaactgaggagaagcctggat

SEQ ID NO: 48898 - DNA, 201 bp, Homo sapiens
attgctaatctttataagtggttccgtaagatgggaagagaaagttgtgtagctcattttatgagtctaatgtaattcataactcaagtatcagataagamcaataaatacaaagagaagaagacttcaattgattagtatatcaacattgaaggaaaaactaaatcttggctaagtgaatcaaatcttttgttaagaata

SEQ ID NO: 48899 - DNA, 201 bp, Homo sapiens
cctcctgcttctttcaggtgggaggataactctggtcccggttatccattttggccattcaacctcatggcaatctaacaggtagcggctgttcttccccscacgtgacacaggagaaatcttccgcaggctgttttcagtgacttcccagggcagccctctgggaggcggcggtgtcggatggagtcggcttcgctcaga

SEQ ID NO: 48900 - DNA, 201 bp, Homo sapiens
ccagaaaagcccccatgggctgctggaggctcggggaggtggcagtgagctctgggctcagggcacaagaggcttttggaggctgggtgctggctggactctgtttgccagccttctctgtaagtcccaggcattagagcacagcaagcaggaataacaggagccctgggcccttagaaggaaactgaggagaagcctgga

SEQ ID NO: 48901 - DNA, 201 bp, Homo sapiens
ctgggtggagtgtggctgggggaactgtgggattcttggcattttacagatttggaaaccaaagcctagagggagcagggtggactcagatcaacagacayggaaacctatttagggtggccttcctctccccaggatggcttttttgcttgttgggggtcttggccatcattctcttatgtgtagacgacaacgtggttc

SEQ ID NO: 48902 - DNA, 201 bp, Homo sapiens
gctttttccctttgtcctcacctccctatcttcctgctactggaaattatttatctatctatctatctatctatctatctatctatccatccatctatctrtctagatatagatatagatttatccaacagaacaaaggctggaaaaggacatctctccactttcctaggctgcccctgcctccccaggactgtgtcacct

SEQ ID NO: 48903 - DNA, 201 bp, Homo sapiens
ttgatagctttttccctttgtcctcacctccctatcttcctgctactggaaattatttatctatctatctatctatctatctatctatctatccatccatctatctatctagatatagatatagatttatccaacagaacaaaggctggaaaaggacatctctccactttcctaggctgcccctgcctccccaggactgtg

SEQ ID NO: 48904 - DNA, 201 bp, Homo sapiens
aatctcctatcaaaaccaagagggaggcccattctcagcattaacagcagtccctgtgcggagataaaggctgtggttaagacgagccctatgtgcgcgcrcacgggtttgtgtgtgtgtgtgtgtgtgtgtgtgcgtgcacatgggagtgtcaggggctgcagactcttccggtgactgagataaatcagactgttaaac

SEQ ID NO: 48905 - DNA, 201 bp, Homo sapiens
gttgatagctttttccctttgtcctcacctccctatcttcctgctactggaaattatttatctatctatctatctatctatctatctatctatccatccatctatctatctagatatagatatagatttatccaacagaacaaaggctggaaaaggacatctctccactttcctaggctgcccctgcctccccaggactgt

SEQ ID NO: 48906 - DNA, 201 bp, Homo sapiens
tgttgatagctttttccctttgtcctcacctccctatcttcctgctactggaaattatttatctatctatctatctatctatctatctatctatccatccatctatctatctagatatagatatagatttatccaacagaacaaaggctggaaaaggacatctctccactttcctaggctgcccctgcctccccaggactg

SEQ ID NO: 48907 - DNA, 201 bp, Homo sapiens
gacctctgtctcctggccatgtgacctctgccaggttacctcaatgttctgagcttcagtttcctcatttgtaaaataggactgagcccagcactctagcstctcaggcatttgtggggctggagcgagacaatgaccataatgcatgcagtcagccctgcacctctggacccatcaaggcaagccctactgtgatagttc

SEQ ID NO: 48908 - DNA, 201 bp, Homo sapiens
gacattttcttggccactttttatctgcatggtgttggggagaccctgctgaggctagggttcttgttctggtcttggaggtggcacggctggggcctggwgggagagcttggcacagctcccaggctctgctggggcccagctccgctcaggaattatcagtcactcagagaaaactcaaagggcactaggcctccagca

SEQ ID NO: 48909 - DNA, 201 bp, Homo sapiens
aggaaagcagccagggaattcctgggcattgagaccacacgggaacgtgagcatctattgctagagagctgtgcagtgtgggacaggcagtccgaagattkttgaaagaagcagctgcacacattgtctgtttcaccactcatgggcaggtggaaagctgagcctggagaggtaaagttgttggctggccacaggcagggg

SEQ ID NO: 48910 - DNA, 201 bp, Homo sapiens
aatatagaaataaatcttcataacctttggttaggcaatagtttctcagatttgaccacaaaagaataaacaacaaagaaaaaaagaaaaattgaatttcmctgaaattaaattgtttcttcctcaaaggacactatcaagaaagtaaaaaaagccggcgcagtggctcacgcctgtaatctcagcactttgggaggtcga

SEQ ID NO: 48911 - DNA, 201 bp, Homo sapiens
gggctgatgggagagggagacagaggacccacggtgtgacccccagggtgcagctgctaggaaatgtggggtccactatgactttcctctgaggtaggcaytgggggctgtaccctccccaggctctagccctggaacctggagtggagacaggagctcttggacctgaactggccttgccacagacgcaagtcagggtgg

SEQ ID NO: 48912 - DNA, 201 bp, Homo sapiens
agagtcaagtgggaccatactcctggactcctgacttcctggatgctgctattctttctatgcagctgtctcacccttgtcataatgggaaactcagggcrtaacattccacttaactgcaacttggcttctcgaaatacctcttctcttctgtgcaaagatcatgactcggttcttccttcttctgtggaccgtaacaag

SEQ ID NO: 48913 - DNA, 201 bp, Homo sapiens
aagcagacagtgccaggatcccatccgaggcttgcgtgtggggctctttgctgggacctgcgggcagtctccctgcagccaacccccagggagctccctcrgaggtcctgccaccccccggagcagtgcaggtgcctgctgctcacacaaccccatctaatgtgtcctttttagtgctggggactctctttctccctcttt

SEQ ID NO: 48914 - DNA, 201 bp, Homo sapiens
tactgtaaaaagaattgcacagcatatgtttagactcagtgctggattttccttgggcttgctcttaagtttgggcaaatgccccctggtaatgtgcacasctgggcatccctgaggcttggagctggcaggaccttttgggatggccttatcccttgggtttcatgtggggaatgacccaagactccaaatcccagcaga

SEQ ID NO: 48915 - DNA, 201 bp, Homo sapiens
tggatgagagaggacttcaggtagctttttttctccctaatcaattgcttcataaaatgcatacatgattggaatttcctgcaggagagaagggggagggsagagagagagagagagagagagagagagagagagagagagagagagagagagagagagggagaacatcaccctgtagtccccgccccatttttctgctgc

SEQ ID NO: 48916 - DNA, 201 bp, Homo sapiens
tcttaactgatgacaatctccaggaagcctatgtgcctcagaattccatcgcatcatcactggaactcccggcacacactaagacacctccaaaagggtgytcccaacacacatctctaaaacacacccaaaacaacactccacacttgggtttactgaagtgtttattaaacgggatctgacatctctgccatcacactt

SEQ ID NO: 48917 - DNA, 201 bp, Homo sapiens
gtacaaccctgatgtatccatacaaattaaaaataataagttaaacactaaatggaatcaccatgggatccagcaatcccacttccaggtgaagctcactsaaataagtcatacacaaaaggacaaatgtagtatgatgtgtttacactgatatgaagctacctagaataggcagattcttagggacagaaagtcagatag

SEQ ID NO: 48918 - DNA, 201 bp, Homo sapiens
aaaacacacccaaaacaacactccacacttgggtttactgaagtgtttattaaacgggatctgacatctctgccatcacactttctggtttgcttcttgcratctggtcatccagctctgctgactggggcttcgaggacagaactactctgatgcagaggaacgtcagaggctggccatgtctgtgccatgagggtgtct

SEQ ID NO: 48919 - DNA, 201 bp, Homo sapiens
gaaaataaatccacctgcttcagactctgatggacttggccatgcttcctttgtcccaagatagacaatgatgtgcatgataagattccagctctgcttcygaagctcaactcaaatctaccttcccagacttccctctgcctgacttcctctctcatagcatactgtttgtgattttactgtagtgccatgtctgcctca

SEQ ID NO: 48920 - DNA, 201 bp, Homo sapiens
tctgaatctcctatcaaaaccaagagggaggcccattctcagcattaacagcagtccctgtgcggagataaaggctgtggttaagacgagccctatgtgcrcgcgcacgggtttgtgtgtgtgtgtgtgtgtgtgtgtgcgtgcacatgggagtgtcaggggctgcagactcttccggtgactgagataaatcagactgtt

SEQ ID NO: 48921 - DNA, 201 bp, Homo sapiens
aaatatgtacaaccctgatgtatccatacaaattaaaaataataagttaaacactaaatggaatcaccatgggatccagcaatcccacttccaggtgaagytcactgaaataagtcatacacaaaaggacaaatgtagtatgatgtgtttacactgatatgaagctacctagaataggcagattcttagggacagaaagtc

SEQ ID NO: 48922 - DNA, 201 bp, Homo sapiens
ttagaagccattgaagagtcagtggactgaatacaaattaaccattagatcaactgaaaatgtcaagtttagatgaatctgagttctcatttagatatttkctggctgttggcccagccccacaaataaatacacatttgaaagttatcctgttactttgataaaagaatttggtctcttacaaatgataattcagctctc

SEQ ID NO: 48923 - DNA, 201 bp, Homo sapiens
cctctcctgctctcctctgtgtgttttgcatcctgcatcttggggtcatcaaaatactatgggacatgctttttaatcctgattcaggtggaggaaataaygattaggagtggagtctcaggagcagaccatcatcaggtggaactttgtcttcttgcttcctggtgtgagaccctgagcaagatgcttcgctccatcagg

SEQ ID NO: 48924 - DNA, 201 bp, Homo sapiens
ttgttgatagctttttccctttgtcctcacctccctatcttcctgctactggaaattatttatctatctatctatctatctatctatctatctatccatccatctatctatctagatatagatatagatttatccaacagaacaaaggctggaaaaggacatctctccactttcctaggctgcccctgcctccccaggact

SEQ ID NO: 48925 - DNA, 201 bp, Homo sapiens
cacaatccttctcagtgcaagactccagacaactgctttcaataggcaggagccagcataggcatgccacttaatagctgtccaggacttaagatggtaastgggggccgaaaaatttgtaggtatacctgatttggcagaaaccatttgattttaggctattctttagaaaattctttattgaaaaatatctagatttca

SEQ ID NO: 48926 - DNA, 201 bp, Homo sapiens
agcatgtgtggcaatcttgagatagagaatggatagctgcaatgaatatcggtgtcttgagatttagaaagtgtttggtgatccttgactatgtgcttcastgtacgtgtgtcctcaccatgaccccacctgactgatcagaactgaccaagggcaggagcatgagggtagaggatggggaagttctgatcaagcctctcc

SEQ ID NO: 48927 - DNA, 201 bp, Homo sapiens
ggcctggtttgttgatagctttttccctttgtcctcacctccctatcttcctgctactggaaattatttatctatctatctatctatctatctatctatctatccatccatctatctatctagatatagatatagatttatccaacagaacaaaggctggaaaaggacatctctccactttcctaggctgcccctgcctcc

SEQ ID NO: 48928 - DNA, 201 bp, Homo sapiens
tctatgaggtacacgtgaaattttgttacatgcgtgtaacatgtaatgttcaggccagagtattggggtgtccatcacctggagcatttatcatttctctrtgttaggaacattaaaagtcctctcttagctattttgaaatatacaggcctggcgtggtggttcatgcctataatcccagcactttgggaggctgaggcg

SEQ ID NO: 48929 - DNA, 201 bp, Homo sapiens
ggagaactctgataaatacaaacagcattagaatccaatctcagcaatttctcatttagcccaagctcagctgcacaatccttctcagtgcaagactccasacaactgctttcaataggcaggagccagcataggcatgccacttaatagctgtccaggacttaagatggtaactgggggccgaaaaatttgtaggtatac

SEQ ID NO: 48930 - DNA, 201 bp, Homo sapiens
caaagttgtgaaaaaagaaatgtttgaaccaaatcctattgcctgttggtggtaggtggggggaacagagggaggcagattccatttacttgtggagccarttgtaacagaaaaggaaaacagtcaacattcacttggaaggtctgaaaatacaatgtgggctcacttgggtgataaatctcttgcgaggcgttggagtgc

SEQ ID NO: 48931 - DNA, 201 bp, Homo sapiens
taggcctggtttgttgatagctttttccctttgtcctcacctccctatcttcctgctactggaaattatttatctatctatctatctatctatctatctatctatccatccatctatctatctagatatagatatagatttatccaacagaacaaaggctggaaaaggacatctctccactttcctaggctgcccctgcct

SEQ ID NO: 48932 - DNA, 201 bp, Homo sapiens
caagcggccttttcccctccccaggctgccccctcccaggttccacgccttcccagctgttgactgcaggaatgggtccctgacctggctgagaggcatgrtcacaagggtttgttctgttttccagcactgcccttaactcaaaccttgctgtgcagcatctaattttggctttctgacacccttctttaaaaaaaaaaa

SEQ ID NO: 48933 - DNA, 201 bp, Homo sapiens
  misc_feature (1)...(201): n = A,T,C or G, or insertion/deletion polymorphism (see Tables 1-2)
tactttgaaaattgccagcccccatgattgtgtgagccaattcctaatctcttctcatatatatatatatatatatatatatatatatatatatatatatntatgtatgtatacatataccgtatggctctgtttttctggagaactctgataaatacaaacagcattagaatccaatctcagcaatttctcatttagccc

SEQ ID NO: 48934 - DNA, 201 bp, Homo sapiens
aggagggggctgcaccagagcagaaagaatatggggcctgcatcagaaaagctgagtcctgcatcctcaggaaagtgattaactctttggtctgcatcttmttctggaaaatggggaaaataaaaacatgcaaaatggtgccgaccactgctcagtctaagtaaatgagagtgctgcacaaatgcagacgatggctaggaa

SEQ ID NO: 48935 - DNA, 201 bp, Homo sapiens
ctaggcctggtttgttgatagctttttccctttgtcctcacctccctatcttcctgctactggaaattatttatctatctatctatctatctatctatctatctatccatccatctatctatctagatatagatatagatttatccaacagaacaaaggctggaaaaggacatctctccactttcctaggctgcccctgcc

SEQ ID NO: 48936 - DNA, 201 bp, Homo sapiens
actaggcctggtttgttgatagctttttccctttgtcctcacctccctatcttcctgctactggaaattatttatctatctatctatctatctatctatctatctatccatccatctatctatctagatatagatatagatttatccaacagaacaaaggctggaaaaggacatctctccactttcctaggctgcccctgc

SEQ ID NO: 48937 - DNA, 201 bp, Homo sapiens
tctcccagcacagggtatctgctagtttctttgttgacttgggcttgaagcacagttctggctgtggctcctggtggtgtggtgcaggtggctttactgtycagtggcacagcagggcgcttggcatagaggcccagaagagtggagggtctgttctgtctggggacccagagaaggaggcttcccaggcataaagcagaa

SEQ ID NO: 48938 - DNA, 201 bp, Homo sapiens
tcagcgagggcagtaacccaagctggacgagggactcacccaggagctctggggccagacaggaggggccactcgtgggactatcagggaagatgaataamgatgaaggtagagtggactaggaaagcagcaggaatagacctgtgcagatggaggggccaggcactgcagggtgtgggggcccctaacagcagaagcagg

SEQ ID NO: 48939 - DNA, 201 bp, Homo sapiens
cttagcacatagtgaatggagatattagtagttcttctctgatgctttccaagttcggcgaaatcttgaggctctccactcacatttgcaaatgctaaacrctcctgtggtggagagagcaggggggctggtgtgtggacaccctctgaggtgttctcactggccactggctccttttgttgtctccctttcaattcagta

SEQ ID NO: 48940 - DNA, 201 bp, Homo sapiens
ttcttcctcttccgttctgccaatcctcatcctcattgctccacatctgccatctctcatctgtggctcccatccctctcatttcttgtacagatgctgcmccagtctcctaatgagcctcccagcctccagcatcatccctctccaatctgtcctccaactgctggaattcactttggaaacagcaggtcttcacaatta

SEQ ID NO: 48941 - DNA, 201 bp, Homo sapiens
tctcctgaggaatgtgtagaattcatggctcccaggccacccctagactcacatcagaatccttggaaatggaatatgtacttacggagggtctcactgcmtatcctccatgttcccttgacaacacaagaagctatcaggtgccacagggcttttgcacaagtgagcttttcctggaaggccttccccttccctctccag

SEQ ID NO: 48942 - DNA, 201 bp, Homo sapiens
taaaaatttttaatggattttggccactgtcttggatagtgcagtgagaagcaaaccatatggattcaaaacctgtctctagcaaatgtatactggctgtktgcctcatgtcccatttcctcatttattaaaggtaatagtatatgtactcttgttttttgtggtgattaaattattaatctgctttggttatctattgct

SEQ ID NO: 48943 - DNA, 201 bp, Homo sapiens
gcctgaataccgatcttcctgcagctcagccaggctgaggcaggcggatccaaccccagcgcggtgcttcacggacatgtgcgcatgcgcactggcagagmgctgctgcggcacagggacttttcctctctgctcctccaacgcctcatctctgccattgggtggtgagcgaggaggcctcccctccacctccaagcggcc

SEQ ID NO: 48944 - DNA, 201 bp, Homo sapiens
acctacgtgtggagatcagttcagctgatatacatgagccagggttcagagacagtgtgggaaaagggaaggatttcatggcagatatttctggacatccrgttggaagagacttcagattgagctcctattgaaactgtatagcaatttgggggagaactgatgtcttaacgatattgagccttctgacccatcaacaag

SEQ ID NO: 48945 - DNA, 201 bp, Homo sapiens
tctgggtgggaggtagtcctggggaaatcccttgagctgaggaagcttcgcctggggaatttgagggctcgggtgtggacgggaaaagattctctaaggaygccccctagagcaaccctggacatgaggagtggggggaatgaggcagaactgtcccaggtgcccacagggcagcagcgtccccgggacaccctcagacat

SEQ ID NO: 48946 - DNA, 201 bp, Homo sapiens
aatcagagctaggaaggtcctgctcatgagtgagtgttcaactgggagagggaaggccgggttggaggggaagtaaggtaaataaaaaaggaaagaaggaraagagagagggagggaggaaagaaagaagggagtaaaatggagaaaaggggagactttagatttgaggtcgtggctagaccccaggaaacccagcaggca

SEQ ID NO: 48947 - DNA, 201 bp, Homo sapiens
aaagggaccccaccatctcccccatcaacagctcttccctttattagacccccacctctaacccaacaccctgatcagagcctgctgctgagcttatccayacacctgccttccagtggcctctccttcctcccagctctcatccctcccttctcttcactcttgccacgcctcaggcactgatcgtttcttaccatgacc

SEQ ID NO: 48948 - DNA, 201 bp, Homo sapiens
cccattagacacctgctctctaccaggagaccaagcaggaaggtttccttagcacccttgggaaatcttctgttcttggggtacatttggagtgatttccrgaacgacaccatcccctacctcctgatgtcctcacccaggtgtcccacaggcatgtctgtccttccctgcccaaaagggaccccaccatctcccccatca

SEQ ID NO: 48949 - DNA, 201 bp, Homo sapiens
agcatgccaggttgaaacaacacggactcgcaccgagtccctcctctgtcccctgctctgtttgcctctggtctcaatgttcaggcagctctgctgggagmggcaggcccaccctccttggggggcggctcctggccgcttctccgaggcccacctggtcttctgtggttaccggttgggccaggcactgggctcatggct

SEQ ID NO: 48950 - DNA, 201 bp, Homo sapiens
atcttggtctcgctgatggcactgttttccagtggctgaaggagcaggtgatgctctgttttgcatgttctgtgctttctgcagactcccctggtcacacktgggcctgggagctgcatggtcacccagacagggcatgtctcagcctgccagccttggaaggaaacatccccaacccatcagtgagtccttgccgcatcc

SEQ ID NO: 48951 - DNA, 201 bp, Homo sapiens
ccctttgatatccaggccaacgggtcaccgctttctgctcagtcctcccacttttggggttcgtgttcctggatgcagagcatgccaggttgaaacaacayggactcgcaccgagtccctcctctgtcccctgctctgtttgcctctggtctcaatgttcaggcagctctgctgggagcggcaggcccaccctccttgggg

SEQ ID NO: 48952 - DNA, 201 bp, Homo sapiens
gcattgagaccacacgggaacgtgagcatctattgctagagagctgtgcagtgtgggacaggcagtccgaagatttttgaaagaagcagctgcacacattktctgtttcaccactcatgggcaggtggaaagctgagcctggagaggtaaagttgttggctggccacaggcaggggagggggaacctgctcccttgggcct

SEQ ID NO: 48953 - DNA, 201 bp, Homo sapiens
aactcacagtcattgcttggattggagaaaattgcttggattggagtctgaaatgcacggcttagtgcctgatagatgtcaggtgatcaatgcaaagaggygactccttcccccaacttggccctggcagctttgccagtgtccagtcagccactttgtactaaggggcgtgaggtcactcccacaagctccctccaacca

SEQ ID NO: 48954 - DNA, 201 bp, Homo sapiens
atggcatcagtgagggagactaaatggcagtggagtgttgcttagaggcgttttatgcattttatgatgttttgtgcatttgaaaatactggtaacaggargagagggaccctatcacaattctggtctctcattatttgtacataataagcatatccattatcgttatttagaccacttgctagtctgaatttttccaga

SEQ ID NO: 48955 - DNA, 201 bp, Homo sapiens
aggcagaaagcataaaccacccgtgtgagcagaggaaggtggcgtggagaagtcgtgtaagaaccctttaatggatatgtaaatggcatcagtgagggagrctaaatggcagtggagtgttgcttagaggcgttttatgcattttatgatgttttgtgcatttgaaaatactggtaacaggaagagagggaccctatcaca

SEQ ID NO: 48956 - DNA, 201 bp, Homo sapiens
gccaaggtaggttcttctcttcatgatacaggcagctgtgactagcaaggtgcaagagagcaggaagcctcctggattgctccctggaactccaggcagargcccagaggtcttctgattaagcttccccagagcagccacccttagtgcccccagcaactgcccacactaatgtggcaccagccccttgattcacagctg

SEQ ID NO: 48957 - DNA, 201 bp, Homo sapiens
tcttctcagcacagactcttacaaagactgcattcctgactatgtcacagagcccaggagggcaggcagaaagcataaaccacccgtgtgagcagaggaargtggcgtggagaagtcgtgtaagaaccctttaatggatatgtaaatggcatcagtgagggagactaaatggcagtggagtgttgcttagaggcgttttat

SEQ ID NO: 48958 - DNA, 201 bp, Homo sapiens
cacgccgatcaacactaaggggcaagagaagaaggaagagtgggcctggtgctctacaccacagcactgccctgttgagggtaccttggctgtggagtgastcttcttcctggggactgacagccaaggtaggttcttctcttcatgatacaggcagctgtgactagcaaggtgcaagagagcaggaagcctcctggattg

SEQ ID NO: 48959 - DNA, 201 bp, Homo sapiens
gacattgtctggggaaaaaaagggtcttgggtttgaatctggatcctgctgctcatgagcttggtgatgtgggctaacctgcttactccttctgaattttytcatctgtaaaactaggccaatatgcccttctcctacagtgctgtgaaagttaaataacataatgcaattaagacatttaactgtatttggcatgtagag

SEQ ID NO: 48960 - DNA, 201 bp, Homo sapiens
ggcagaacaggacatttgtggggcagcctggcaaattgttatctgttgcttctcagttcagtaagctcttcaggatttggggggctagaacacacagcctycctatatcatttggaagaaactgctagaagcccctcaggatggggctgcagagatgctggggcagagacccaggttcttctaatcccctgggacaccact

SEQ ID NO: 48961 - DNA, 201 bp, Homo sapiens
gtcccaggtgcccacagggcagcagcgtccccgggacaccctcagacatagggagtgacagggacgagggaggatgcaaacagctgagactgtggagagcyggctcgtttccaggcggtgttgctgccttcgccttgccaatgaggacagtcggacacagggaagaaggggctccaccagcagcacccagcgagcacccgg

SEQ ID NO: 48962 - DNA, 201 bp, Homo sapiens
aatggaatatgtacttacggagggtctcactgcctatcctccatgttcccttgacaacacaagaagctatcaggtgccacagggcttttgcacaagtgagyttttcctggaaggccttccccttccctctccagtctgtctggtgacctcctcttacttctccatgtggtaccatatgaccagagtcactagtctgtgaac

SEQ ID NO: 48963 - DNA, 201 bp, Homo sapiens
tcggtggggggctcctgtccacagtggcttcaggagcaggacatcccctggttgtgggctcttgggtggagacatctgtggtgtctggggctggggtggamaatggaggggtctctctggaaactacttactggaagcagatggccagcagctgagccacaaagtaggccccttcacatatggagacagcggctcctgtaa

SEQ ID NO: 48964 - DNA, 201 bp, Homo sapiens
aaccctgggtagaagaattatcaggtctggagggagcacaagcaaactatcccattttatggacgtggaaaccgaggcctgagggagagacgcaccaggartcaggagatctggctctgatcagctgtacaaattgagaattgtgacctgaccttgtccaacccaagtggcccaactcctaattctgtgagtgacatgtct

SEQ ID NO: 48965 - DNA, 201 bp, Homo sapiens
tctgcaatctgaatcttccctatgaaatttccacctggtgccctccagcgcagattctcgcacccacagtcctgccttacagggcagaccatttcctctcygacagtactacctgtctgaatgttctgcttcaaactgagtcaagatatgtgaaccctgggtagaagaattatcaggtctggagggagcacaagcaaacta

SEQ ID NO: 48966 - DNA, 201 bp, Homo sapiens
taattcagggacctgtagaagttcacagtgtgagaggaatgaagtgtccaatctgcaatctgaatcttccctatgaaatttccacctggtgccctccagcrcagattctcgcacccacagtcctgccttacagggcagaccatttcctctctgacagtactacctgtctgaatgttctgcttcaaactgagtcaagatatg

SEQ ID NO: 48967 - DNA, 201 bp, Homo sapiens
ggaatgtaaaacattccccaagggggaagggccaaactgccccacagctagctagacttgacctgttaaccctgtgtttaaagatgcttcagttgagttgwcctcacctcccagcctgccatcaaagccacctctgttcagcctcccgtttgatgggggctgcccatgcccaagctgccttcccagtcctcctaactgtga

SEQ ID NO: 48968 - DNA, 201 bp, Homo sapiens
aagggacaggaaacacatgtttattttgcattaaactgaacttcaccagggtagaaatgcttatgatctcctgagttatggtgcttgggttctccatgaamgtgtgcctaattactgggattgcttctttgcacaaaggcgatccattatggaacatgctgtctccataaagaacagggaataagctaagcagctcaggct

SEQ ID NO: 48969 - DNA, 201 bp, Homo sapiens
caggctctgaggtcaaagttcatccttacctcagctagacaggaggatccagcattttctaattaataaaatacctcacagctttccttatcctgctgtarttggacatggaattcttttggttattctgcttaggaaaagtagcctctgcattaaatgccaagctctgtaggggagcaaagcctatgctttgcttaacac

SEQ ID NO: 48970 - DNA, 201 bp, Homo sapiens
tatgaaagctcgaaagctgcccccaccccaactcattcacccagtcacaaagataggtgacctgtcatcagatggcttctgtttcccgctaacagtctagkaacacagatgagcccattctccttagcaccattctctccaccaccaacacttactggtcacctctggatactggaaggaagaggtgaactggaaagacaa

SEQ ID NO: 48971 - DNA, 201 bp, Homo sapiens
cctggtaaccatgttgcctttacacccatgagccctgctgtggtgcccttgccaggcacagtgagaaacacaagggtgacctgtagacgaactgggctgayatgggtggatcaaggcccagagctgttgtatagacgcgtcagaaatacatgcgtatgagaagggagagtaatgagaagaacctcattcactggcgagtgg

SEQ ID NO: 48972 - DNA, 201 bp, Homo sapiens
ggtgagcccacaaggctggctgcctctgaaggtccctcctggttctcaatagtaaacctcatcatcagcagagagtatggtggggctcctcttcctgtgtkctgcggctcatgagcacacacatacagtttgtctaagacctggatcagatatttagatgtaagtgaaagagaaggggttattactgagttcaggtttgga

SEQ ID NO: 48973 - DNA, 201 bp, Homo sapiens
atcaccaccaggatattgacatcagaacagccaagctacagggcattccactgccgcaaggattcctcatgtggtctatttatagtcatacccactttctytcctatctccacccctccttagaccctggataccacgactctgtgctccacatctataattctgtcatttttgagaatattatgtaaattgaatcagata

SEQ ID NO: 48974 - DNA, 201 bp, Homo sapiens
ttttaagctccatcccaggaatttgggctgtaattcagggacttgtagaacctcacagtgagagaggagtgaagtcctgtctgcttggatttattgctgtyttgattaatgagaattgctagcttttccttacttttggaaggaggctgggaaatgcaaacttcccacctgcccttgaaggagaaaggaatctggactgga

SEQ ID NO: 48975 - DNA, 201 bp, Homo sapiens
cacacaaccccagcctgggctggagccgctcagccccagcgcagcccagccgcctgagatcggcgattagggctgggctggaggcagtctggagctggcarttaaccgtttctggctgggaggagggagccaaggagtgggccaggcccttcctcaccaagccatgcctagaaagtcacacctggatttcacacttgctgg

SEQ ID NO: 48976 - DNA, 201 bp, Homo sapiens
atgtgcaagtatctttttcaaataatgacttcttttcctctggttagatacccaggagtgggattgctggatcagattcacacattcaggttttcataccrgtagttcatttccttttattagaccacaattcatttagccattcacccattgtttctaggacttttttggctgttatgaagaaaattgctgcaaacattc

SEQ ID NO: 48977 - DNA, 201 bp, Homo sapiens
ggcatttggtttgattccatgattttgcttttgtgaattgtgctgctataaacatgcatgtgcaagtatctttttcaaataatgacttcttttcctctggktagatacccaggagtgggattgctggatcagattcacacattcaggttttcataccagtagttcatttccttttattagaccacaattcatttagccatt

SEQ ID NO: 48978 - DNA, 201 bp, Homo sapiens
tgcagaattttgataatcatttatacctgtttaactacactcaaaacaaaatgtgaaacattgtcagcctctaagaagcccctttctacccctttccaatyggccaccaacaaccatactttatttcagtctctgtggattcattttgatgattctagatgtagtataaaaggaaccataaaatatgtacctttttgtgtc

SEQ ID NO: 48979 - DNA, 201 bp, Homo sapiens
tggcagatggctcagacactggggcccagtgactggctgctcctggtgagggggagctggacttttctggggattctgggcaaggacaggccctgaatgamtgtgtcagttggttctcttggttgggaccagggcaaagaaggcaatggagccccttgggcctgtgcccacctccaggccaggctgattgtacctcggtgg

SEQ ID NO: 48980 - DNA, 201 bp, Homo sapiens
gctctacacagccacatcctgcccctctagctttgagggagtgctcaggctgtccaggtggcccaaagcactgctctcttatgctcgcaggctggactgcyatggctcactggtgccccctggtgcccattcctgcgtgtgtgtggtggcagggtgcggtggagtccatccagggtccattcctccccagccttctcccca

SEQ ID NO: 48981 - DNA, 201 bp, Homo sapiens
ggctgaacagaaagccctagcggtccttggtgtgggttccacaatgagtggatttgcctgagtccctctagagggtccacaagtttttgaaaggctgcccmgacctgtttttctggtcgaaggggaagcaagttaaatgttctcaggatgctgcatgagttagtgaggaagacagctggaggctcagggctcactgggaag

SEQ ID NO: 48982 - DNA, 201 bp, Homo sapiens
cccagacattctcctggccctctgtatcttgtctctttgtctgcccaccagcgtgagcatcccagcacccatgagcccttccctgaccaccccaatagacrtggccatttatcttcaatgctgccagaaaatctcatccatttgctatggttgcccttatctcattgtaatcatcatcattgtctcattgtaaccactaat

SEQ ID NO: 48983 - DNA, 201 bp, Homo sapiens
aagccctggactctggtaaaatgccatttgaaattgttatatggttttccattaggagaagtccaaggaattggtaagacttatggtggacattgtacagrtcattgcataataatttttctttgcaattaattaatcttcatctctgatattcacttcaaatatgtgatgataaaacgggaagggacccttgcttgggca

SEQ ID NO: 48984 - DNA, 201 bp, Homo sapiens
gctggcttgaggtggcgtgagccttgtttgtgcctccctcgaggcctctccagaaatgctggccagtcacacctcctgatggcctcaggggcccagccagygtgggggtgtctggttaccccttgaaaagctgaccagagaagaccctgaaactccagggagggccattgagctaggtagacccctcactgagcgtcctcc

SEQ ID NO: 48985 - DNA, 201 bp, Homo sapiens
cagagtgcagatggatttgaaaagccctggactctggtaaaatgccatttgaaattgttatatggttttccattaggagaagtccaaggaattggtaagasttatggtggacattgtacaggtcattgcataataatttttctttgcaattaattaatcttcatctctgatattcacttcaaatatgtgatgataaaacgg

SEQ ID NO: 48986 - DNA, 201 bp, Homo sapiens
gggcttcgaggacagaactactctgatgcagaggaacgtcagaggctggccatgtctgtgccatgagggtgtctgtggccatcacattccccttccacagwtgacaggggaaagatgcctggcttctctgcacttaggctctttctgtgcacagggggcctgcctgagacacccggcccatcagccatggggcacgatcct

SEQ ID NO: 48987 - DNA, 201 bp, Homo sapiens
tttgcagggattcttctggacaaggatgtggtcatagaggtcacaggctgagaatcaatggagacacgtggtgctcatctgcttatgaggaagatgccacyttcttgcttggtccactgatgggtgagaattctggcctatttaatgatctcactccagctttttgtttttgttttgtagccataagagtgtttgagaact

SEQ ID NO: 48988 - DNA, 201 bp, Homo sapiens
agctactcaggaggctgaggcaggagcatcgcttgaaccctgggggcagaggatgcagtgagccaagatcacaccactgcactccagcctggtgacaaaasgagactccatgtattaaaaaaaaaaaatctactagaaactgtttagctgtacacttttttttaatttaaaaattttttaaagattattttgagacagggt

SEQ ID NO: 48989 - DNA, 201 bp, Homo sapiens
tgtctctatcaaaagtaacaaattaggtgtggtggtgtgcacctatagtcccagctacttttcaggctaaggtaggaggattgtttgagcctgggagctcyaggcagtagtgagccgtgattgtgccactgcactcagcctgggcaacagataaagaccctgtctcaaaaacaaaatacaaaacaaaaagactgtaactaa

SEQ ID NO: 48990 - DNA, 201 bp, Homo sapiens
tatcaatataaaaaagcaaaatgagatatataaatcctatcatatcaataacataaaatgtaaatgaattcaatgatcagatcaaaaggtggtggttactstattggataacaaaacaagatttaactctatgttgtctacaggatacacactttagtttcaaagacacaaacaggttgaaagtaaaagatgaaaacctga

SEQ ID NO: 48991 - DNA, 201 bp, Homo sapiens
ctaagttctctgttacatttcccttggcttcttcctgtgtcttcaggaaatttccactaaaagataccatctgggctcagcagcgtggcaggctgctgggrggactggcagggttttgtgcatgtggcttggtgagcagcccagagggacagagcctgcttcctaggacagcaaggcttaccacagggcagagccctgtgg

SEQ ID NO: 48992 - DNA, 201 bp, Homo sapiens
ggcaggggcaggccagtgtgggtggtcctggctgcacttgggtctgtgtggctctgggcatggtcggagcacatctccaaggccacatcttgagcagaggrggcttctcctgaggggaatgggcctttattgtcaccatcctgggaagtggagactcttagggaagggcatggactcgggagggcctgggatgtctgggca

SEQ ID NO: 48993 - DNA, 201 bp, Homo sapiens
tctgtccaatttcccacctgtttctattctttattgtttagtttgtgatcttaaatgctggtttaaaatgatgctaacttactctcttttcctgatgggaktgtgtgtgtgtgtgtgtgtgtgtgtgtgtgtagacagagagagagagagagaaagagagaggggttgcatctagttcacttggttcatcagacttgttag

SEQ ID NO: 48994 - DNA, 201 bp, Homo sapiens
catatttttctccctagatcacaggtctgaggaagcagtttccccaagattttgtaaaagtggctttataattaaaaacattgattttcctattagaaagrctactatatcctttggaaaaagcttagaagtagtccgtgagtcttggcttcttgccgtggctcccccaggatatgatcttgggcgagtaacccagcagcc

SEQ ID NO: 48995 - DNA, 201 bp, Homo sapiens
tcagggcatcatatggcagggggctgagcgtgccatctcaagtctcttttccctttttataagccaacagtcctactgcataacacattaatccatcaacyccttcatcaatccattaatccaggaatggactaacctattcaagagggcagaaccttcatcacccagtcacctcttaaaggccccacctctcaatactgc

SEQ ID NO: 48996 - DNA, 201 bp, Homo sapiens
aaggtaccaggaccacacacaaatgagtctaggaggaagcaggatgtgggaaagcagagaacacataaacatatatctcttcctgccaatcccaagttaayagtcactcctgtttacactttggtcttggcatgtaattgggatcttccattttggttccccacctaaccacctactactttcttccctccaagccccaga

SEQ ID NO: 48997 - DNA, 201 bp, Homo sapiens
tgctgtgatgaccaggagaatcatttaaatttttatttggaggactcacttccaacttggaacacaagctgcaaaggaattccctaccagcatgccagcamatcatttggaagttcaaggtattcttgctcaacagctgcacacacattaaaagtccctggggtacatggcgcctgctgcctggggttggactctgtcgcc

SEQ ID NO: 48998 - DNA, 201 bp, Homo sapiens
ctcttacattagacagttgtctagttcctaatcactaaagagctggtcagaatgcttataaaattgaacagaaaggaagagagtttgaccagattgaagtrctctttcagatcctaggaatcctcttgtatgtgctctaaattattttttaatttttttaaaattctgagtcaagattttgctctgttgcccaggctggag

SEQ ID NO: 48999 - DNA, 201 bp, Homo sapiens
tttcttggtgtgtgtgcaggaggaagaggatagtattgttggaaagtggaagttcattattgactacaaactacaagtctgggttcagtaataacacttayatcctttctagataacccaaccccaagatattgctgctgttaccaaagagggagtgaaggtctctgaaaatgtaggagtccctttagtagatggggagaa

SEQ ID NO: 49000 - DNA, 201 bp, Homo sapiens
tctaccttatggtgagtaccttataattgtttcattatatacttcaatgtaataataataaagtgcacaataaatgtaatgtgcttggatcatcccaaaaycatccccctctgtgggaaaattgtctttatgaaactggtccctggtgccaaaaaggttggggaccactgatttataggatccactagaaaggatggaatg

SEQ ID NO: 49001 - DNA, 201 bp, Homo sapiens
tgaaccctccttttagactggctggtaccatctgttctagctaggtattatactttacttagccattcccctgctgttggacatttaggacgtttctaatytgaaatttaacattgggtggttttccaagtatttatgtatatatgtattggtgctgattatgacgacgtcaaatttctctccgtctctgcctgccggctt

SEQ ID NO: 49002 - DNA, 201 bp, Homo sapiens
cgacttcctgcggctcagaagcagcacaggctggacccaacccctgcctcggaaaaccactgtgctgatgcgccagcagagggccgagaggacagccgcgkcggaacccaggggcgacagttccctggggccaaggggagccatgtggagcccggcccaggcttggcgcccaggctcggccgggctgctgtgcgcgcgggg

SEQ ID NO: 49003 - DNA, 201 bp, Homo sapiens
tgaagctctaatccccaatgtgactgtattttgggatgaggactttgaacaggtaattaaggttaaatgaggccatgaggacagggacctaatgccacagygctgatgtcctgagaagaagaggaagagacagcagttttcttagtccatttgtgctactataaaaaataccacaaactgggtaatttataaataatagag

SEQ ID NO: 49004 - DNA, 201 bp, Homo sapiens
tatcagtgaagccatttggcctgcagttttctttgtgtgaaggtatttgaaattctttattagatatagggatattggattttctatttcttttcttttcytttttttttttttttttttttttggtggagacagggtctcagtatgttgcccaggctaattttaaatgcctggcctcagggtgatcttcctgtcttggtc

SEQ ID NO: 49005 - DNA, 201 bp, Homo sapiens
ctaaattattttttaatttttttaaaattctgagtcaagattttgctctgttgcccaggctggagtacagtgactcaattatagcttgctgtgactttgawctcctggactcaacggatcctcccacttcagcctcccaaataactaggactacaggtaagcaccaccaagcctggctaatttttaaaaattattttaact

SEQ ID NO: 49006 - DNA, 201 bp, Homo sapiens
tgaagtgaattattggctttgaaaggacttttagttcctttgaaaggattggctgccctagaagtttccatgagactgtgaaggtctagggaagctgaagycttcacttgctgccatagttctgaacaaatacagtcatttggtgcttagtgatggggacaccttctgagaaatgcatcgttaggcaatttcatctttgaa

SEQ ID NO: 49007 - DNA, 201 bp, Homo sapiens
ggctggtctccaactcttggcctgaagtgaccctcctgcctcggcctcccaagacatgtaggcatgagctactacacctggcccacatgatctattttttwaaaaaaatatttcttcttacttcaggatcctaattactgaattcttatacttttaagaaatgcagtggttcaatgcatactccttgtttccctctaattt

SEQ ID NO: 49008 - DNA, 201 bp, Homo sapiens
ccaagacatgtaggcatgagctactacacctggcccacatgatctattttttaaaaaaaatatttcttcttacttcaggatcctaattactgaattcttayacttttaagaaatgcagtggttcaatgcatactccttgtttccctctaatttgtcctatcaaaatgctggccttctgatttaatgaaataatagtatgat

SEQ ID NO: 49009 - DNA, 201 bp, Homo sapiens
agagcaacaggaacacaggcagtccagtcgtcctgagatactgggaggagcatggttgcttttgaacacgtaggagataaagcctctctaataatgcctgttttttttttttccttcactctgtctcccaggcttgagtgcagtggcacggtgtcgcctcactgcaacctccgccttctgggctcaagtgattctcctgcc

SEQ ID NO: 49010 - DNA, 201 bp, Homo sapiens
cattctaggtagatgaaacagatttgggtctttacttgggcatataatatggtgctgtgatggggaaaaattttagacttgcaaaggcacattaattttayaaactacactttatcatgatgtattatgtattttatgtattgtttgattagatttgctaaaatattaagtatttttgtgtctatgttcatgagggatgct

SEQ ID NO: 49011 - DNA, 201 bp, Homo sapiens
gagatactgggaggagcatggttgcttttgaacacgtaggagataaagcctctctaataatgcctgttttttttttttccttcactctgtctcccaggctkgagtgcagtggcacggtgtcgcctcactgcaacctccgccttctgggctcaagtgattctcctgccccagcctcccaagtagctgggactacaggtctgt

SEQ ID NO: 49012 - DNA, 201 bp, Homo sapiens
tcaagaccggctgtggacactaggacaagtttcagatcctgccgtgaaggtacatgacaaagcattggtgggaaaaggtggctgtgaggggggaccatcgkcacttttatagatctgcataaattcccttaaggcgtctcaggaaagtggacacattgaagggcccaaagcaggggagaaagctgttaggattggggttga

SEQ ID NO: 49013 - DNA, 201 bp, Homo sapiens
tttaatttccaaacaattgggggaattttctagatattttattattattgattactaatttaatgctgtagtggccaaagaatatactctgtataattcaratgttttaaatttattgagacttgttttgtggcccagcatatggtctgttttggtgaaggtttcatgtgcacttgaaaggaatgtgtatgctacttttga

SEQ ID NO: 49014 - DNA, 201 bp, Homo sapiens
ccagctgtgcccttctttaacctcttgatggaattgtttataagccagaaagtgggagggaaagtgtggggtggagcagatgacccacacctagtacaaawttgcatttgttttcagcactgtgggctaagccaacatttcctgcagaggctctgatacccagatctgattaccctgtttggtgtcacttagtggggctgc

SEQ ID NO: 49015 - DNA, 201 bp, Homo sapiens
atattatacaaatatatgcacatttatacagatatatgtattatatatacatatatagatacatatatatatatacagatgtatgtattatgtatacatayatagttgattctcattattcacagtagttatgttctgtaaagtctctgtgaacattgattagcaaatatggaaccattgttcctaggagaaatacagggt

SEQ ID NO: 49016 - DNA, 201 bp, Homo sapiens
aattgtggtctaactcacccttttctttcacctcctgttctctctccagccttgcagcttcaggactgctgatcctgattatgctgtgcaaagggtgttcrttccacggtcacactgtctctatgaggcagcaacgtctaggagtgttatccccattgagggggcagataaaccaaggaaggaggagggcaggtgctggcc

SEQ ID NO: 49017 - DNA, 201 bp, Homo sapiens
acctctgcctcccaggtcaagtgattctcctgcctcagcctctcgagtagctaggattacaggcacccgctgccatgcccagctaatttttgtatttttartagagacggggtttcactatgttggtcaggctggtcttgaactcctgacctcatgatccacccatctcggcttcccaaaggcatcatggtaataattaat

SEQ ID NO: 49018 - DNA, 201 bp, Homo sapiens
ctctgacacttcataaaacatggcacgcagcagctgctggtagcgcccctgacatctcttgagctcaccttgtgctttggtggccaatgtccctgtatgtygagggctccccacctcaagaacttgagctccctgcttgaggcctttcagtggccacaggaatttgcctgccctgtgggtgtgcccagcttcaggtgctgg

SEQ ID NO: 49019 - DNA, 201 bp, Homo sapiens
aaagataatttgagagcagtgagatgaagtgtgaatgtttgcacttaaaaatttttattctttgctgttaaaatagtgtttatgcaaaaataatttagaaraccataaaaatccctgaagaaagtctgagaaagaggtgcaaggagagagggagaatttccagcttcatcaaaactgtgtgcagatggagcctctgcaggt

SEQ ID NO: 49020 - DNA, 201 bp, Homo sapiens
actcatctagggctttttgtttgtttgttttaaacggcaatgttctcattcactactcaacaatttgcatgaaaccattgcataattttgacacacacacrtaatacacttgggataatattttcagaaatggcttatttgggtttgcctttgctcttgaagctggctattctgaatgtaacacttgttgatcctcccaaa

SEQ ID NO: 49021 - DNA, 201 bp, Homo sapiens
agaaagagagaggggttgcatctagttcacttggttcatcagacttgttagtaatatatcctctcttattgcagtttagtgattttctttaattcttcatyccttccagtaagtggttttggactcatctagggctttttgtttgtttgttttaaacggcaatgttctcattcactactcaacaatttgcatgaaaccatt

SEQ ID NO: 49022 - DNA, 201 bp, Homo sapiens
ggggtttcactatgttggtcaggctggtcttgaactcctgacctcatgatccacccatctcggcttcccaaaggcatcatggtaataattaatagtaaacwgctgaccttgtttgtgtttcactagtttcccccctaacgatcattttctttccaaggatccaatccaggatcctacattgcacccacttgttgtgtctcc

SEQ ID NO: 49023 - DNA, 201 bp, Homo sapiens
tctttggatgagtgagccacattccatttgcttccatctcttactaagggtcagccaggaaatcagcccagttttgatcctatggttgttatcctaaaacmgtatcagtctcatttaaaatatatctacaattggcaacaaacacacaaaacttggtctgccctttatggaagcgtaagtctttaatgattttcggtttcc

SEQ ID NO: 49024 - DNA, 201 bp, Homo sapiens
acttaattggaaacattttacatttagaagtacttctaataaaattagagacaatatttttctgcaatttttctacagcagaaggagaagttgttacttcwgttttgggcccctggcattggtccatacctggaggtcctcctgggaaggtgttcccatggcctaggttctgtgatgttggtgaagggcaccataaggcag

SEQ ID NO: 49025 - DNA, 201 bp, Homo sapiens
acactcacaccatagcacaagggatgcatgttcatcaaaagaaggccatgtgaggatacagcaagaacgtgtttgtctacaagccaggaagggagccctcmccaggaaccaaactgcccagcactctgatctcaaacttccagcctccagagctgtgagaaataaatttctgttgtttaagacacgttcaaatagtttgtg

SEQ ID NO: 49026 - DNA, 201 bp, Homo sapiens
tgctcaaatataaatataatttaaaaaatgggcttggaaacagtccacgtctgtcgctcttggtcacagatgtgtgtatgtagccattgctgcatagaatstataatttcatcctttgtagtaggcattgttcttccctccatggtttggagaggttaccacacatatccaagatctcacaaccagtgagcagtcgatgtg

SEQ ID NO: 49027 - DNA, 201 bp, Homo sapiens
gttgcttcatctcagaggattttgtactcttaattcataaagagaacttctcttcaggaaagtggtcaaagggtgagcctctgtgagcagcttcgctggtkcacagccagactccctctctgggtgaagctttttccacactggccgcacagatagggtgtctctcctgtgtggattttgccatgcagaatacaattcccc

SEQ ID NO: 49028 - DNA, 201 bp, Homo sapiens
tttcttttttttttttttctttgagacagagtttttgttcttgttgcccaggctggagtgcagtggtgcaatctcagctcactgtgacatctgcgtcctgrgttcaagtgactcttctgcctcagcctcccaagtagctgggattataggcatgcgccaccatgcctggctaattttgtatctttaatagagacagagttt

SEQ ID NO: 49029 - DNA, 201 bp, Homo sapiens
ccccaggtttttctttttcttttttttttttttctttgagacagagtttttgttcttgttgcccaggctggagtgcagtggtgcaatctcagctcactgtracatctgcgtcctgggttcaagtgactcttctgcctcagcctcccaagtagctgggattataggcatgcgccaccatgcctggctaattttgtatcttta

SEQ ID NO: 49030 - DNA, 201 bp, Homo sapiens
tcataaaacatggcacgcagcagctgctggtagcgcccctgacatctcttgagctcaccttgtgctttggtggccaatgtccctgtatgtcgagggctccycacctcaagaacttgagctccctgcttgaggcctttcagtggccacaggaatttgcctgccctgtgggtgtgcccagcttcaggtgctggggatttaatg

SEQ ID NO: 49031 - DNA, 201 bp, Homo sapiens
gaatctgtggcattttctcattttaaagaagaaaataaaatctgttggtagcaatgatggtaaactgcaagataactgtagggacacacaaatgatctgcycttcttgcttcttgccttcttattctttttctgtcccaagcaaaacttaaaattaagtttattttcatttgctatcaccaaagtatgtcataatttttat

SEQ ID NO: 49032 - DNA, 201 bp, Homo sapiens
agttctgaccaagtgtaaacacttgtcaattcttggaaaagaaagacctactctggactccaagcccaaggcactccaactaggttaagtaacttgcccaraaacccacagaaaataaggagtcaaagtggagcaaaggttcaaatccaagactttctggatccaaaatgtatgctcttacattagacagttgtctagttc

SEQ ID NO: 49033 - DNA, 201 bp, Homo sapiens
atctggtgaactggacttggtggatggtgtggaagggactttgggagagacctgtgcccatgataaaagggaagatgaagatgttcctttgagtttgcatrtgtggggcctttttggcatggttgacttgtctgtactccttcctgtgacttgacatcaaaattaggtaagaaatcatgtatttattcatccttgttgact

SEQ ID NO: 49034 - DNA, 201 bp, Homo sapiens
caaaagcacagtaaattgattcgagggttacaaataaaacttagcaagtaggtatatttgtaagaatggaatgtatgaataatgaagatcagctctacagmcacacacacacacacacacacacacacacacacccctacatatatacattttcttaattatcgacattctaggtagatgaaacagatttgggtctttact

SEQ ID NO: 49035 - DNA, 201 bp, Homo sapiens
aatagaagttgagagtggaaatgactaagtaaacagaactaataagttggaaatacatagacgaatcattgtatgtttttaaagaacagacaatgcatatsccatatacattttgcaagacagccacatgcacacaaacataaaagccttcttcctttactgtagctagcagaaccatcatagtaaaatctgaaacatgct

SEQ ID NO: 49036 - DNA, 201 bp, Homo sapiens
atcaagggcttggtcacttcatgttggacaaggggttgggtgagtcatgacactcagcctttcccatgcagtgtctctttcccaagggttctagaaggagstgaaggggccaccagacccccatgcactgccctcccccacaaagacctctactgcacccccagaggacccattgtacccacgcaggcgtcttcgtcctga

SEQ ID NO: 49037 - DNA, 201 bp, Homo sapiens
tggtggtgtctatatttcctttgttctctcaatttttgctttatgtatttgggacctgtgatattgcattatatatatattttttaattttaattttaatwtatttttttgagacagagtctcattctgtcacccaggctggagtgcagtggcacaatcttggctcactgcagcctccatctcctggattcaagtggttct

SEQ ID NO: 49038 - DNA, 201 bp, Homo sapiens
ctactgggccggaaacctacaatgaccctcacacatggctggcaggctgttgggagctcagctgaaactgttggctggagcatttatatgcagcttgtccrtgacagtgatttcaggataactggactttttacatgggctggtttcacctgagaggaagtgtctcaagagaaccaggcagaaatttttcagaccttttag

SEQ ID NO: 49039 - DNA, 201 bp, Homo sapiens
gccagtctgctctgcccagagaagcgcactgtgtgagaacaaatgggaaggagcttgagctgctggaacctcttccctatggattgattcatggcataatyggtgttaaaaaaaataaaatagaagacctctggattgtaaaaaaaagaaaattatgagcacccctccagaagataaacactatgtaatccttgcttttaa

SEQ ID NO: 49040 - DNA, 201 bp, Homo sapiens
ggcccagctttctgtcttctttctctatttgctgtctttggatgagtgagccacattccatttgcttccatctcttactaagggtcagccaggaaatcagmccagttttgatcctatggttgttatcctaaaacagtatcagtctcatttaaaatatatctacaattggcaacaaacacacaaaacttggtctgcccttta

SEQ ID NO: 49041 - DNA, 201 bp, Homo sapiens
aagaggaaggttgcgaggacccatgttggggggagcatgggaggtgagggagcccctgccccattagtggtgcctaccatggacacctgcagagtaggccyagctttctgtcttctttctctatttgctgtctttggatgagtgagccacattccatttgcttccatctcttactaagggtcagccaggaaatcagcccag

SEQ ID NO: 49042 - DNA, 201 bp, Homo sapiens
ctgactttgtcctcagcttctggcaggtgatctatctccaagcccttggagtatagtgcttaataggattgtcttcatttgccagtggcctgggctcacgmtgggtagtctagatgtgatttacggtggggctgccccactgggtagtctcaggatgggacctggacactccaggtggtaacgacatgctatgggtggggg

SEQ ID NO: 49043 - DNA, 201 bp, Homo sapiens
gcatttcctataagttcccaggtgatgctgatgtcctcaggaaccactaggttggatttatatgtatttctgcagaagaatgtttttgataccgtggaggrtacaccccaagtgttatgggttcaattctgtcctccaaaaagatatgttgaagtcctaactgccagtacctcagaccatgtcctgcttggaaataggatc

SEQ ID NO: 49044 - DNA, 201 bp, Homo sapiens
ctttgcagggtggccctgctgcatgcctactgttacacagcgatgctgggaaagccacgccttcctcactccatggggaggggacagtgggaactgcatgyggtactttccctgcaccctgcccttggccaattttaatctagactttcactgtaataaaccctacctacaatgacagcagctctcagtcggttctgtgtc

SEQ ID NO: 49045 - DNA, 201 bp, Homo sapiens
agaaagatgatattgtagacattaaaggagtgggcactgttcaagaaggaatgccccacaagtgttatcatggcagaactggaagagtctacagtgttacscagcaggccgtcggcattgttgtaaacacacaagttaagggcaagttcttgccaagagaattcatgtgggtattgagcactttaagcgctctgagagctg

SEQ ID NO: 49046 - DNA, 201 bp, Homo sapiens
ggttgaggctgcagtgagctgtgatcatatcactacactccagcctgggcgacagagtgagaccctgtctcaaaacaacaacaacaacaaccattaaagtrtatataacttaatctagcaattctacttctacgaatgtattttatgtttaactgttcacagttacatgaaaagatatgcataaagatgttccctgcggca

SEQ ID NO: 49047 - DNA, 201 bp, Homo sapiens
gtgttctattgtttgaagcagtcacaagcgtgtccagattcaagtggtggtgacataccccccatctcttcatgggatgagtgtcaaagagcttgtgggcaatacatttatactgtttcatggttactgaagtatatcttacatgtaataaaatgcacggatcttaagcatcgagttcaatgaattttggtaattgtttag

SEQ ID NO: 49048 - DNA, 201 bp, Homo sapiens
tggtggtgacataccccccatctcttcatgggatgagtgtcaaagagcttgtgggcaatacatttatactgtttcatggttactgaagtatatcttacatrtaataaaatgcacggatcttaagcatcgagttcaatgaattttggtaattgtttagacccctgcatcaactgcctgatgtcaggtacagaacattgtttt

SEQ ID NO: 49049 - DNA, 201 bp, Homo sapiens
atgcacatattccttctagaattttttctttggggaaaaataatcagataattgtatcctaattgtggaatgaaagccttagggtccaggttgctgaagtraattattggctttgaaaggacttttagttcctttgaaaggattggctgccctagaagtttccatgagactgtgaaggtctagggaagctgaagccttcac

SEQ ID NO: 49050 - DNA, 201 bp, Homo sapiens
acttacacaaacctagatggtacctcccattacacactcagtgtaagactcagtgtaaggctcagtggtttagactctattcagtacagtcacatgctagyaactgtactgaatactgcatgcaattgtaacacaatggcaagtatttgtgtatctaaacatagaaatgctatagtaaaaatatggtggtataatcttctg

SEQ ID NO: 49051 - DNA, 201 bp, Homo sapiens
ttgatctccaaaaagatgaaaatgattgagaatccttgaatatgcagagacagatcattttaaacttttttcttttaacttttcattttgaaatgattttmgacttacagaaaagttgcaaaaacaatgcagaggattcacatatatttttcactcaccttcccctaatattaacaactcacagaattataataacaccag

SEQ ID NO: 49052 - DNA, 201 bp, Homo sapiens
taggagttcctggaggactatcccagctcacccccttttccgtgagtcagtcctgccgtgtttcatgttctcttacagtgcctcagtgggattgtacccartttgccacagtggtaccccactcattcttgcacctgtgtgtggcacagcttctggttctggctcattgctcagtggctgacagtgcttcccaaacgacta

SEQ ID NO: 49053 - DNA, 201 bp, Homo sapiens
cgtgccactgcacttcgcctgggcaacagagtgagaacctgtctcaaaaataccaaaccatagtgatggtttggtattatatttatatttgagcaccactrtgctcaaatataaatataatttaaaaaatgggcttggaaacagtccacgtctgtcgctcttggtcacagatgtgtgtatgtagccattgctgcatagaat

SEQ ID NO: 49054 - DNA, 201 bp, Homo sapiens
ccctaaagaccggcttgcggccgggcgcggtggctcacgcctgtaatcccagcacttcgggaggctgatgtgggtggatcacttgaggtcaggagatctaractagcctggtcaacatggtgaaaccccgtctctactaaaaatacaaaacttagctgggcgtggtggtgcattcctgtaatcccagctactcaggaggct

SEQ ID NO: 49055 - DNA, 201 bp, Homo sapiens
tgtatatatgtattggtgctgattatgacgacgtcaaatttctctccgtctctgcctgccggcttcagctgcggcccctcctctcggaaggttcctcaggrgttctcctgtccagttagaggttttggggtttcctccttacgctggtctcagcgacttcctgcggctcagaagcagcacaggctggacccaacccctgcc

SEQ ID NO: 49056 - DNA, 201 bp, Homo sapiens
tcaacatgaaactgaatgtcggcagggacacaaacactcacaccatagcacaagggatgcatgttcatcaaaagaaggccatgtgaggatacagcaagaasgtgtttgtctacaagccaggaagggagccctcaccaggaaccaaactgcccagcactctgatctcaaacttccagcctccagagctgtgagaaataaatt

SEQ ID NO: 49057 - DNA, 201 bp, Homo sapiens
gcacaggagtaatataattaccaaagcatattgaaatgaatgttttgcatttttttgtgtgtctaaattacatctccactaaaaattaccaccaaagaagytgtatcagtgaaagtagattagattatactgcagcaaaaacagtaaaatcctagtgacaagtcaaaaaggtgtatttcttctctattccattctcatgct

SEQ ID NO: 49058 - DNA, 201 bp, Homo sapiens
ttactcagccccacccctggacactaatctatttatgaggggtccacccttatgacccaaacaccttctattaggctcttaccttcaacactggggatcaratttcatcatgaggttttcaggggtcaaatattcaaatcatagcagctcacaaattgttgtccagaactaattacacaatctaattcatccctaagtgtg

SEQ ID NO: 49059 - DNA, 201 bp, Homo sapiens
atgtgggaaagcagagaacacataaacatatatctcttcctgccaatcccaagttaatagtcactcctgtttacactttggtcttggcatgtaattgggaycttccattttggttccccacctaaccacctactactttcttccctccaagccccagaggaattcagaatctaagaaaacaacatttcagccttcatgatt

SEQ ID NO: 49060 - DNA, 201 bp, Homo sapiens
cttcctgccaatcccaagttaatagtcactcctgtttacactttggtcttggcatgtaattgggatcttccattttggttccccacctaaccacctactaytttcttccctccaagccccagaggaattcagaatctaagaaaacaacatttcagccttcatgattggttggagccaatcagctctccagttatctgtagt

SEQ ID NO: 49061 - DNA, 201 bp, Homo sapiens
accataaaaatccctgaagaaagtctgagaaagaggtgcaaggagagagggagaatttccagcttcatcaaaactgtgtgcagatggagcctctgcaggtytgtcatcccagcagtgatgtggacaacacgaacacagcagaggcagccactggtctttaacggcaccaccagcccatcccgaagtccatcagaggcacct

SEQ ID NO: 49062 - DNA, 201 bp, Homo sapiens
gtagctgggattacaggtgcatgccaccatgcctggctaatttttgtatttttaggagggatggccaggttagtcttgaactccttacctcaagtgatccrtctgcctcagcctcccaaagcgctgggattaaagacgtgagccactgtgccccatctgtttgcccactttttaatgggttgtttgtttttctcttgtaaa

SEQ ID NO: 49063 - DNA, 201 bp, Homo sapiens
gacatgctgcaccctggactactccaagggggacaggtgaggtgggaggagcagcttcgaggctcctatccatgggaatcttggctttgaactcctatgayaagggtgccccagctgaaaatccaaatggggaaatgtcaacgtttgccagacaatctcaacttcttaatcatgatacccacctgcaggtggacagtggga

SEQ ID NO: 49064 - DNA, 201 bp, Homo sapiens
agcggcttcccgagaccgcgtagcctccccaggggattccacgtcttagggcctcggctcccgggagggccccgaggtgctgagctccgttgttcgtgggkttttttttccccaaataagggacagttaagaggaaaaaaaaagtctcttggtcaacatattttaataatccaagatggaagaaaatatgccctcttccag

SEQ ID NO: 49065 - DNA, 201 bp, Homo sapiens
agtccatatgcatcagctttaataagcttattatcatacggggtcattttaaggatactttttctctctaatgcacatgcgcatctctgaggagctgcccytgacaggtttggtccagacctagctggccacaggagcttcttactcactttttaatcttatttgtgttttggttgctcaacttctgtttcttgtcttgct

SEQ ID NO: 49066 - DNA, 201 bp, Homo sapiens
aggcaagtttaaataaaaggcttaaggtcacacagtcttaaacaacagagaggcccatctggtcccaagttcccctgcagactcagccccctcctgaagcmtggtccatgctgccccgccctgctgagtgctgacctggttttcttggccacatagggctgtgggccacctggagcaagctgacatctcctgtgacaattt

SEQ ID NO: 49067 - DNA, 201 bp, Homo sapiens
atttttatttcatgtttaatgactagaaatgtcattatatacacaatgctttggtttttattttatttaaaatatgttttaaatttcaatagctttggggrtacaagtgatttttgtttacatagatgaattacatcgtggcaaatgctaggactttagtgcactcatcacccaagtagcgtacattgtgcctcatttgta

SEQ ID NO: 49068 - DNA, 201 bp, Homo sapiens
tcacaggtttaatgttcttataattttaatacaattaaaataaaaacctgttcaccagagaccatctagaaccctgtttaccaccaggggtacataaacaygttttggggagctgtggctcagctaaccctcctagcaaaccttcagctcacagcctcggaagcagaggcacagagaagttaagcagcttgcctcgctact

SEQ ID NO: 49069 - DNA, 201 bp, Homo sapiens
aagagccaggctttaggacttttcatgtccctccagccaggagaaaatttaatccactccttggaaatcctgctgagaatcccacataagatcagtccccmaaaaggctctggggacagacagctctgcctcctgctcttgtgtggctggaaccaagtcccttcagctctctgccctcaatgccttgacattccgaatggg

SEQ ID NO: 49070 - DNA, 201 bp, Homo sapiens
gtggcgataggttagccctcttgtccacttggcctcagagcacttctcccactccttacatcccagcccctgcccctaatgctcccttggaccatcttatmcacacacacacacacacacacacacacacacacacacacacacacaccaccttctcagatagcaacaggcttctctgcctcaatatagaacagttaatcc

SEQ ID NO: 49071 - DNA, 201 bp, Homo sapiens
atcgcttgaacctgggaggtggaagttgcagtgagccgagatcacgccactgcactccagcctgggtgacacagcaagactctgtctcaaaaatttttttwaaaaaagacaggaagaactgacatcttaactatattgagtcttcctgtccttgcacgtaattatcgtgcccacagttgggatgggaggtgtcttagtctg

SEQ ID NO: 49072 - DNA, 201 bp, Homo sapiens
gacttctgcctccatcccctatgaccctcacctgaacccctgcctatgcttcttcctgaactttgtctctgaaaacgtatctgtctctttgccactccctygtctctgtcctctgaagaagatggtatagtgtgtctatttggagaccttcaccatccattatctatttcattcttcataacaatcctctgaggcaaggat

SEQ ID NO: 49073 - DNA, 201 bp, Homo sapiens
attccattccatatacatatataaacgttatatatatgtaacgttttctttatccaatcatctgttgatggatagattccatatctttgctactgtaaacrgctgtgataagcatacaagtgcaggtttctttttgatatactgatttcttttcctttgggtagataccagtagtaggactgctggatcaaatggtagctc

SEQ ID NO: 49074 - DNA, 201 bp, Homo sapiens
ggccctttaaaagggagggcctggctgtgggaagccagagacagctgggccactggcagtgagggagagtgaggatggcagagaccagtgccctgcccacyggcttcggggagctcgaggtgctggctgtggggatggtgctactggtggaaggtgagccaggcagaacctggggtgcagcgggggcccagtgggttctga

SEQ ID NO: 49075 - DNA, 201 bp, Homo sapiens
gctgacatctcctgtgacaatttctccccaggtaaacaccactctgccagcaaggacgctgctgctcggctggggcccctatgccatcctgtatctatacrcagtcatcgcagacgtgacttccatctcccccaaactgcagatggtacagatacttctagtacctaaaactagacccctctccatctttgttctctgtct

SEQ ID NO: 49076 - DNA, 201 bp, Homo sapiens
tctgaaaactggccaggtgatgggaatgctgtgaaaattgggacccagagttgaacccaaaaagagacatcatacagggagccattggcttgtgtcagtgrtaacagtcaccaagccgcaccacctcttagccatcttcagcacagtcgaccatcatggctctgacctcatcaatttctagagggagccacgcccttggta

SEQ ID NO: 49077 - DNA, 201 bp, Homo sapiens
gaagcaggggcagtggcctgattctgagcaagtgctgaggatggtggtaagtccagacttctgcctccatcccctatgaccctcacctgaacccctgcctrtgcttcttcctgaactttgtctctgaaaacgtatctgtctctttgccactccctcgtctctgtcctctgaagaagatggtatagtgtgtctatttggaga

SEQ ID NO: 49078 - DNA, 201 bp, Homo sapiens
gcccaggctcctataatagaatgccatcgactcggtggcttgaacaatagaaatttatttctcagttattcaggctgggaagtccaaatgcgaggtgtcarcatggtcaggttcggtgagggcttgattcttggtttatagatgttcaccttcttgccatgtcctcacattaaaagagagagattgtcactcttgtgttcc

SEQ ID NO: 49079 - DNA, 201 bp, Homo sapiens
tgtgtcagtggtaacagtcaccaagccgcaccacctcttagccatcttcagcacagtcgaccatcatggctctgacctcatcaatttctagagggagccaygcccttggtacaatagattcaaagaacattaaggtccttgcattgggagggaatgccctgagcatacgctatgaggcaatccctggagaaataggacaga

SEQ ID NO: 49080 - DNA, 201 bp, Homo sapiens
tgcagcaaaagcttattcagcacagtattacactctcagagaggggagggtggaccaatctctgcgaagtgagatcagcaccagtttggtgtattttgggytcttttatatgtttatttttcttctcttcccaaggctgcctaatctctagccagcatctgccttttgattgataggtgggttgcttatgttactttggcc

SEQ ID NO: 49081 - DNA, 201 bp, Homo sapiens
catgggatggccctttaaaagggagggcctggctgtgggaagccagagacagctgggccactggcagtgagggagagtgaggatggcagagaccagtgccytgcccactggcttcggggagctcgaggtgctggctgtggggatggtgctactggtggaaggtgagccaggcagaacctggggtgcagcgggggcccagtg

SEQ ID NO: 49082 - DNA, 201 bp, Homo sapiens
aacttctgtttcttgtcttgcttcttgctcactgcctcttcaccttgcttctgcttctactcattccgccctttaacctccaattccctctgctattctcytgcctcaagagcagcagtaatttctcgtttcctctcagggacaccagggaatatgaacaatgtgacagacagcaaccaggggttttctgcgttttcagtg

SEQ ID NO: 49083 - DNA, 201 bp, Homo sapiens
ggctccctactggacacatccgtgctgttccacttaactcttgccaaggatgtgaggtttggcacaaagttacaggctttttaaatgctacttttaaaccrctttgagatgtttaatttaatcacagtcacagggtggtgcccaaaagataaaaatcaacctataagcacatttgtccaagaaatacaatacttcaaaata

SEQ ID NO: 49084 - DNA, 201 bp, Homo sapiens
tgcaggtagccagctggcctggaactcagccgtctctctggtgctcttcgtgtggctgtcttctgccttctgggcagctctgccccttctgggttggggtmactatgactatgagccactggggacatgctgcaccctggactactccaagggggacaggtgaggtgggaggagcagcttcgaggctcctatccatgggaa

SEQ ID NO: 49085 - DNA, 201 bp, Homo sapiens
ttaataagcttattatcatacggggtcattttaaggatactttttctctctaatgcacatgcgcatctctgaggagctgcccctgacaggtttggtccagmcctagctggccacaggagcttcttactcactttttaatcttatttgtgttttggttgctcaacttctgtttcttgtcttgcttcttgctcactgcctctt

SEQ ID NO: 49086 - DNA, 201 bp, Homo sapiens
tgggaccagaatccagtcccctggctcccagctggctgctggcataggcgccgcttctaggctgtcctccgcgatgccggtcccaagccctgtctggaggygcaaagttcacatttactggaggctcaggcagccgggagacaaggctgccaccatgatctcctcatttttctgcgttgactttaaaccattgtctctggt

SEQ ID NO: 49087 - DNA, 201 bp, Homo sapiens
cctcaataccctgaccatcttctctttctgcaagaccccggagctgcggactccctgccacctactggtgctgagcttggctcttgcggacagtgggatcmgcctgaatgccctcgttgcagccacatccagccttctccggtaccagccccctccccagtccacaggctctggggtcctgcctggggcctgacccctggg

SEQ ID NO: 49088 - DNA, 201 bp, Homo sapiens
gccccttctgggttggggtcactatgactatgagccactggggacatgctgcaccctggactactccaagggggacaggtgaggtgggaggagcagcttcraggctcctatccatgggaatcttggctttgaactcctatgacaagggtgccccagctgaaaatccaaatggggaaatgtcaacgtttgccagacaatctc

SEQ ID NO: 49089 - DNA, 201 bp, Homo sapiens
caacgtttgccagacaatctcaacttcttaatcatgatacccacctgcaggtggacagtgggactggaaaaagcctgttctgaaaactggccaggtgatgrgaatgctgtgaaaattgggacccagagttgaacccaaaaagagacatcatacagggagccattggcttgtgtcagtggtaacagtcaccaagccgcacca

SEQ ID NO: 49090 - DNA, 201 bp, Homo sapiens
acccaaaaagagacatcatacagggagccattggcttgtgtcagtggtaacagtcaccaagccgcaccacctcttagccatcttcagcacagtcgaccatyatggctctgacctcatcaatttctagagggagccacgcccttggtacaatagattcaaagaacattaaggtccttgcattgggagggaatgccctgagca

SEQ ID NO: 49091 - DNA, 201 bp, Homo sapiens
tctccccaggtaaacaccactctgccagcaaggacgctgctgctcggctggggcccctatgccatcctgtatctatacgcagtcatcgcagacgtgacttycatctcccccaaactgcagatggtacagatacttctagtacctaaaactagacccctctccatctttgttctctgtctcatctcatctcactttctggat

SEQ ID NO: 49092 - DNA, 201 bp, Homo sapiens
agaatcccttgaacccaggagttcgagaccagcctaggaaacatagtgagaccccttctgtatttgacaaacaaagagtacagacccaggaggaagcgctyattatccacccagtctcggcctccagccacgttgggtattgtcaggccattttacagacacagcagctgaggtcaggcaagtttaaataaaaggcttaag

SEQ ID NO: 49093 - DNA, 201 bp, Homo sapiens
aagccaggcaagggtcagggagggagggactttgaaaggggacatctgcccaggagatgatcaagagccaggctttaggacttttcatgtccctccagccrggagaaaatttaatccactccttggaaatcctgctgagaatcccacataagatcagtcccccaaaaggctctggggacagacagctctgcctcctgctct

SEQ ID NO: 49094 - DNA, 201 bp, Homo sapiens
tcaccgcagaagagggagaaggaccgaaccaagtgagcctgccaccctggagtgagccccaggccaggaggctgttccaggagtcctgcccagcagcctcrgtggccaagcccagacactcacccaccttccccagtggccccgtggatcctggtcctaggctggacacaggattcagaaagacaccaggctgcacagaaa

SEQ ID NO: 49095 - DNA, 201 bp, Homo sapiens
gagcctgccaccctggagtgagccccaggccaggaggctgttccaggagtcctgcccagcagcctcagtggccaagcccagacactcacccaccttccccagtggccccgtggatcctggtcctaggctggacacaggattcagaaagacaccaggctgcacagaaagagccagatggacctgagtgtcggtcacagcccc

SEQ ID NO: 49096 - DNA, 201 bp, Homo sapiens
gattttctttttctttttgagacggaatcgctctattgcccaggctggagtgcagtggtgtgacctcggctcactgcaacctcggccttctggtttcaagygattcttttgcctcagcctcctgagtagctgggactacaggcatgtgccaccacacctggctaatttttgtatttttagtagagatggggtttcaccata

SEQ ID NO: 49097 - DNA, 201 bp, Homo sapiens
ggcttttagtgtaaccatcaccctaataatatacgttgtacccattaagttatttctcatccctcaccccctcccaccttgtcacccttctgagtctccartgtctattattccacactccatgtccacgtgtacacattatttagctcccacttacaagtgagaacatgtggtatttgactttctgtttttgagttattt

SEQ ID NO: 49098 - DNA, 201 bp, Homo sapiens
actaatttacagtcccaccaacagtgtataggtgttcccttttctctgcatccttaccaatatctgtaattttttgactttttaataatagccattctcayttgtgtgagataaggtctcattgtggttttaatttccatttctctgatgacttttgatgttaagcattttttcatatgcttcttagccacgtgtatgtat

SEQ ID NO: 49099 - DNA, 201 bp, Homo sapiens
cttcaacttcgccatgcccctcttcatcacgatcacttcctacagtctcatggagcagaaactggggaagagtggccatctccaggtaaggacccccttcyggagtgttatctgatggtgcagcgcagctccaggctcttggtgtcccgaacaaagaattggatgtgacacacacaaacagcaaaacaaatattcattgct

SEQ ID NO: 49100 - DNA, 201 bp, Homo sapiens
tctgcgttgactttaaaccattgtctctggtgggcatcgccaaggtcacacgcaggggtccagggacctcatcccaagctgagcggcttcccgagaccgcstagcctccccaggggattccacgtcttagggcctcggctcccgggagggccccgaggtgctgagctccgttgttcgtgggtttttttttccccaaataag

SEQ ID NO: 49101 - DNA, 201 bp, Homo sapiens
aggggtccagggacctcatcccaagctgagcggcttcccgagaccgcgtagcctccccaggggattccacgtcttagggcctcggctcccgggagggcccygaggtgctgagctccgttgttcgtgggtttttttttccccaaataagggacagttaagaggaaaaaaaaagtctcttggtcaacatattttaataatcca

SEQ ID NO: 49102 - DNA, 201 bp, Homo sapiens
gtagccagctggcctggaactcagccgtctctctggtgctcttcgtgtggctgtcttctgccttctgggcagctctgccccttctgggttggggtcactaygactatgagccactggggacatgctgcaccctggactactccaagggggacaggtgaggtgggaggagcagcttcgaggctcctatccatgggaatcttg

SEQ ID NO: 49103 - DNA, 201 bp, Homo sapiens
cacccaatttggtatattaacagcacatactcaaggttcactacaaaacaaacagttcctggtaatgatttaaatgtagttatagaaataaataatatgtwtggagtcattacttctgaccttgaaatagcctgctggtgactggcattaacatacataactaactattcaattatttccattattaatgttgctgctgct

SEQ ID NO: 49104 - DNA, 201 bp, Homo sapiens
tactgcccatctactattccaacctgcttaactcacccagtttctgctagttttcagcctccctttggataagcacccatcagcatttgatcaggcttctrctcaatgtccttcaagtggctctggccttgccttgagagcagggtaaagataatctcttgtttgttgataaggaaaactcaggctcagcaaggttaatta

SEQ ID NO: 49105 - DNA, 201 bp, Homo sapiens
gagtcattacttctgaccttgaaatagcctgctggtgactggcattaacatacataactaactattcaattatttccattattaatgttgctgctgctacytttgggcctaaaaccaagtcacctgttgtgtatcaattaccttctttgataaaaggaaataaataaataatgttatcctatttttttgtcataaaggcag

SEQ ID NO: 49106 - DNA, 201 bp, Homo sapiens
tagctgtttgatatgaaagttaaggcttccttttaaattagtttcagtaaaactaatgtttaatgataaaacacctcagtcaactcaagttaggattcatyggggtaaggagatagttcagtaatcccaagttaccttaaaatagtgggcttttagaggaaaggctttactgaagctctcactgtatctaccccatgggga

SEQ ID NO: 49107 - DNA, 201 bp, Homo sapiens
tgtaatcccagcactttgggaggccaaggtgggtggatcacaaggtgaggagatcaagaccatcccggccaacatggtgaaaccccgtctctactgaaatmcaaaaaaaaaaaaaaaaaaaaaaaaaaaaaaaattagccaggcgtggtggcgcgcacacgtagtcccagcttactggggagactgaggcaggggaattgc

SEQ ID NO: 49108 - DNA, 201 bp, Homo sapiens
taacatgaagatcgctgaggccccaaagactcattagtttcccgaggtcacagactaattgtactaaccacacaacctttagaatttcagtctcctcccayatgaagaaacgccggcaccttacaccgacaggaaaactacaattaagtgaggctgttctcctcaagcccgactgagttctctgtaattgtagggcatacc

SEQ ID NO: 49109 - DNA, 201 bp, Homo sapiens
ctattccagggaacccaccaagacagaagaggagaaaaaaggaggggacgtgaggagaggtgtgagttctcacctggagctggagggctgtcgctttcggsggggttggggagactcttccttctcacggcctccagggacagatgtgaagaaaaggcggaaacctaagattcaatggggcagagtcaaacaaaaacaaaa

SEQ ID NO: 49110 - DNA, 201 bp, Homo sapiens
gtaggaaggcgccatctgtactgggaagagggctctccccagacactgaatctgctggtgccttgatcttggacttctcagcctccaaaatgtgagaaatmcatttattttgtttataagctacccagtttatgttattttgttatagcagcccatatggactcaaacaggttgtatccttgacacctactttaggaatgc

SEQ ID NO: 49111 - DNA, 201 bp, Homo sapiens
tggtggcagcgacagccgagtcgacactggccaccttcttggctttctttttcaacttccttttcttctttgcctccttctccactgttccagggctgtgratggctgactcctgtaggatgtcggacgccgacacagctgcctcccggcaccgccgccactcctcgtcactgtcctcactgctgcaacgagagggtaccc

SEQ ID NO: 49112 - DNA, 201 bp, Homo sapiens
gcaactatgatcaagtgaggtgtctggcccaagacaggtgctcaaaagcagtaaacatccaaagctgccgccaagagggctttccctcccgctgagctcaygatttctccagctgcctgacagggccactgccttggcctggtcctgactggagtctgcttggctattccagggaacccaccaagacagaagaggagaaaa

SEQ ID NO: 49113 - DNA, 201 bp, Homo sapiens
caggtatagctgtagcactctttgctggtgggaatggagaggtctcgctggccttctttgcctttttcttctttttggtcccaagcgacacctggtccccrttgagctcacctgacttctgcttctggactgtggccatgctggtgggggtggtggcagcgacagccgagtcgacactggccaccttcttggctttctttt

SEQ ID NO: 49114 - DNA, 201 bp, Homo sapiens
tctactgcagaaacatctctgtgactcagtgcaatgccaagcaggccctgttcagcctgaagccagagagtcacaaaggaaaactgctcccacaggctgawatgcagctgccttcctaaacacctcctctactttctccaattgaggggaaccctgtgggattcaggctgcggggctctggcccatcattctgtctcagaa

SEQ ID NO: 49115 - DNA, 201 bp, Homo sapiens
ccatgctggtgggggtggtggcagcgacagccgagtcgacactggccaccttcttggctttctttttcaacttccttttcttctttgcctccttctccacwgttccagggctgtggatggctgactcctgtaggatgtcggacgccgacacagctgcctcccggcaccgccgccactcctcgtcactgtcctcactgctgc

SEQ ID NO: 49116 - DNA, 201 bp, Homo sapiens
gcgggaggatagcttgaggccaggagtttaagaccagcctgggcaacatgacagaaccctgtctctaaaaaaaaatacaaaaattagccaggtgtggtggkgcacgcctgtagtcccagaactttggaaggctaaggtgggcagatggcttgaggccaggagttcaagaccagcctgggcaacatagcgagatcctgtctc

SEQ ID NO: 49117 - DNA, 201 bp, Homo sapiens
ggaggactgcttgggtccgggaggttgaggctgcattgagctataattgctccactgcactccagcctaggtggcagagagagttcctatctcaaaaaaaraaaaaaaaaaaagaatataccaaaactgtttcgcccacctccagacacacattaggtgcttaataaatgatagcttctattaagtataaccactcaccat

SEQ ID NO: 49118 - DNA, 201 bp, Homo sapiens
aaaatggatatcaagcacttgtggcacacggcctagccacaagtagctgctcagcaaatggtagctatgatgacgatgcagatgatgactgtcatcaagaraagcttcagccttcacaggctctctaacataaaaataaaccacatttctctagaggcacaaggccaggaagcatgtgtctggtgagtgcagatggagatg

SEQ ID NO: 49119 - DNA, 201 bp, Homo sapiens
ttgtggcacacggcctagccacaagtagctgctcagcaaatggtagctatgatgacgatgcagatgatgactgtcatcaagaaaagcttcagccttcacargctctctaacataaaaataaaccacatttctctagaggcacaaggccaggaagcatgtgtctggtgagtgcagatggagatgccactgtgcacagcagag

SEQ ID NO: 49120 - DNA, 201 bp, Homo sapiens
tgtcctcactgctgcaacgagagggtaccctgggttagctggagtcaggacacagccccagagctgcctctcgctgtcctcccttggtccaggtcaccagraggtggccgcagagagaggcaggtagtgagttcaggcttgggagtgaggccaacctggcttccaatactggcttctgggcgtagcagccttgtgacctcc

SEQ ID NO: 49121 - DNA, 201 bp, Homo sapiens
cctacctctcagggtcatcagaaggattaaatgagaaaatggacatcaagcacttagcacagagcctggccacaaacagttgctcagtaaatggtagctgygatgatgatgtgacttcaggcacacctgtctccttgctgacagcctgtttcctcacctggaggataaaggtaacaacaggacccacatgataatgttctt

SEQ ID NO: 49122 - DNA, 201 bp, Homo sapiens
agatctagaccagtgtatccccagacctgttccgcaggttgttgactggttttccatgaaacaaaggcactgtggccaaacaagtttggaaaatgctgggytaaacagttacacaggtctcttcactacaggaattctcagagccttgaatatactactctggcttgcagtctgcaaggacacgtggaggtatgtagattg

SEQ ID NO: 49123 - DNA, 201 bp, Homo sapiens
aatgccaagcaggccctgttcagcctgaagccagagagtcacaaaggaaaactgctcccacaggctgaaatgcagctgccttcctaaacacctcctctacwttctccaattgaggggaaccctgtgggattcaggctgcggggctctggcccatcattctgtctcagaagaatagctggttcacactttgggaaggctcat

SEQ ID NO: 49124 - DNA, 201 bp, Homo sapiens
ctactgcagaaacatctctgtgactcagtgcaatgccaagcaggccctgttcagcctgaagccagagagtcacaaaggaaaactgctcccacaggctgaamtgcagctgccttcctaaacacctcctctactttctccaattgaggggaaccctgtgggattcaggctgcggggctctggcccatcattctgtctcagaag

SEQ ID NO: 49125 - DNA, 201 bp, Homo sapiens
tggtggccatcaggggcatttggcaatgtctggagacatttttggatgtcacaactggtggggtgagtgctactatcatctagtaggtagaggccagggaygttggtaaacatcctataatgggaagaaggatagacccccacgacaaatgctagtcaaagatgtcagtagcgccaaggttgagagacactgacctaacac

SEQ ID NO: 49126 - DNA, 201 bp, Homo sapiens
tagaggcacaaggccaggaagcatgtgtctggtgagtgcagatggagatgccactgtgcacagcagagaacaaggctctcagcaatgccctcgaggcagaygcagcaatgccctgggtgctttccctaacctcccttcctgtatgccaaaggtgccccccaagccctgttcaggaaaagcaacccggggagagggagtaga

SEQ ID NO: 49127 - DNA, 201 bp, Homo sapiens
aagataaagagaaacaaaaaaaaaattttaagaagacacaaaataaaaaaatttaaaaaagaaacaataacaaaaaaacccaaccaagcaaacaaacaaaraaaacaaaggagcagagtcagcacccccagatgccagcccctcctcccaggtgccaggtgctgaagctgccccgcctctgccctcaggagctcctggtcc

SEQ ID NO: 49128 - DNA, 201 bp, Homo sapiens; identical to SEQ ID NO: 24565

SEQ ID NO: 49129 - DNA, 201 bp, Homo sapiens; identical to SEQ ID NO: 24567

SEQ ID NO: 49130 - DNA, 201 bp, Homo sapiens; identical to SEQ ID NO: 47663

SEQ ID NO: 49131 - DNA, 201 bp, Homo sapiens; identical to SEQ ID NO: 47709

SEQ ID NO: 49132 - DNA, 201 bp, Homo sapiens; identical to SEQ ID NO: 47700

SEQ ID NO: 49133 - DNA, 201 bp, Homo sapiens
tcagctcacttgatccacagcctggcacctccactgtctggctagggagcctcgaatgggtcccaaggccaccctgctcctcagttacatcatctgcatartagtggtggttgtgaggaattcaggagctgcagcataagggccctgcaggtactatgtgctcagtaaatgccagtggttcttaagggtctgagctcccat

SEQ ID NO: 49134 - DNA, 201 bp, Homo sapiens
ccactaacatttttgagctcttaccacgtgctcagaaaaaatccctaagaagacactgagagaattagatgaggaaacataagaacagagacctcaaatastttccccaaggtcacacagcttataattagaactagaattggaactccaggctggcttcagatctgcctctctctcacgccctctttaagatcctttgca

SEQ ID NO: 49135 - DNA, 201 bp, Homo sapiens
tcttccagagggaggccgagaacatgttgctcacctgctgttccttagggacaccaagaccttgatgtttggttcctacctggacgatgagaagaactggsggctgtctttctatggtaggcatgcttagcagccccaaactcatgcccctctcaggcctcaccccccattcacccacccctgggctggcccctagaaccc

SEQ ID NO: 49136 - DNA, 201 bp, Homo sapiens
caccatgtccccagtcagtctccttgctccccctgcagctgacaagccagagacgaccaaggagcaactgggagagttctacgaagctctcgactgcttgygcattcccaggtcagatgtcatgtacaccgactggaaaaaggtaaacgcaagggattggacagtgcccaccttgtccatggcccaacttgggcagcccca

SEQ ID NO: 49137 - DNA, 201 bp, Homo sapiens
ctgcagctgacaagccagagacgaccaaggagcaactgggagagttctacgaagctctcgactgcttgtgcattcccaggtcagatgtcatgtacaccgaytggaaaaaggtaaacgcaagggattggacagtgcccaccttgtccatggcccaacttgggcagccccagaggcccagagcaggaaagctgccaggcaagg

SEQ ID NO: 49138 - DNA, 201 bp, Homo sapiens
tagtggtggttgtgaggaattcaggagctgcagcataagggccctgcaggtactatgtgctcagtaaatgccagtggttcttaagggtctgagctcccatkgtagaggcaagtaagctgaggttcagagacagaaaatgacttgcccaagatcacccagctgggaagtgacagtgccagggttggagccctggttgagctg

SEQ ID NO: 49139 - DNA, 201 bp, Homo sapiens
acggggttgggggattggcaattggaggggacgtaatgcggggagttaccacctacagacgcgtcccaaaccccaggctttcaccccacctccactccccrctcatttttaatacccgtgcagtggggaattgatactgtggttttcaatgtcacccacactgcagcacggccacagtcaccatcccgatttttgctacaa

SEQ ID NO: 49140 - DNA, 201 bp, Homo sapiens
aatgacttgcccaagatcacccagctgggaagtgacagtgccagggttggagccctggttgagctggttccacaggccagagctcattctgccctctcccyggaagacctcccaccctgtccccatgcctctgcttctccctcaccccaattccccgctgccttctaggataagtgtgagccactggagaagcagcacgag

SEQ ID NO: 49141 - DNA, 201 bp, Homo sapiens
cccattccaatgcacccccatctcagcttctggccagaagacctgagcaagtccctccttcttcctggccttggccttcccatgggtggaaccgggagggytggctttaatctccaccagactcttgccccgggactgtgatgggcgattggccacttctcctcgataacattactgtttttcttccgccttctggttgac

SEQ ID NO: 49142 - DNA, 201 bp, Homo sapiens
tttaagatcctttgcaaaccaatggtagaagcctgtatgttggagaggtggtaccttcaactatgtcccccatcaccgcagaggtggcacatggcagggakctgatggagctgaactgacatcatttagcatcccgagcctcctctctgggcctcattttcctcctctgtaaaacggggagaaaggccctgacagccacag

SEQ ID NO: 49143 - DNA, 201 bp, Homo sapiens
acccgtgcagtggggaattgatactgtggttttcaatgtcacccacactgcagcacggccacagtcaccatcccgatttttgctacaaatgaaaattactktataatgagctccttaacacttttctttaaacctgtgtttggaagacttgtgttggtgtggccctgtgccctaatacctgtgaaatcacagcaccgatga

SEQ ID NO: 49144 - DNA, 201 bp, Homo sapiens
agcacggccacagtcaccatcccgatttttgctacaaatgaaaattactgtataatgagctccttaacacttttctttaaacctgtgtttggaagacttgygttggtgtggccctgtgccctaatacctgtgaaatcacagcaccgatgagctggttccaatttttaaaatatatacatgcagtacttccatgactattca

SEQ ID NO: 49145 - DNA, 201 bp, Homo sapiens
tgtgaaatcacagcaccgatgagctggttccaatttttaaaatatatacatgcagtacttccatgactattcaaagaaaaacaattccttccatttgccayctgagatgaccaccagggatgtgaactacctcctgccccatccccagccccaggatcctgggacagggcttatgaacgcaaccactgtagtcagctcact

SEQ ID NO: 49146 - DNA, 201 bp, Homo sapiens
gccacagtctgtgtgaggctcctgagatctcatgtacagaaagtgcttggcgtggagctgggcacgcagcaggggctgggcacacggtggcccaaaggagrcccgggccttcactgatgggctttgtggccccggacacacctaggactcctcacctgtaagacaggcaccattgtgccatcccatgttctcacccagagg

SEQ ID NO: 49147 - DNA, 201 bp, Homo sapiens
aaacaattccttccatttgccacctgagatgaccaccagggatgtgaactacctcctgccccatccccagccccaggatcctgggacagggcttatgaacrcaaccactgtagtcagctcacttgatccacagcctggcacctccactgtctggctagggagcctcgaatgggtcccaaggccaccctgctcctcagttac

SEQ ID NO: 49148 - DNA, 201 bp, Homo sapiens
cctggccttggccttcccatgggtggaaccgggagggttggctttaatctccaccagactcttgccccgggactgtgatgggcgattggccacttctcctygataacattactgtttttcttccgccttctggttgactttagccagaaccagtgcttctataactccagttacctgaatgtccagcgggagaatgggacc

SEQ ID NO: 49149 - DNA, 201 bp, Homo sapiens
tcctcagttacatcatctgcatagtagtggtggttgtgaggaattcaggagctgcagcataagggccctgcaggtactatgtgctcagtaaatgccagtgrttcttaagggtctgagctcccatggtagaggcaagtaagctgaggttcagagacagaaaatgacttgcccaagatcacccagctgggaagtgacagtgcc

SEQ ID NO: 49150 - DNA, 201 bp, Homo sapiens
acatcatctgcatagtagtggtggttgtgaggaattcaggagctgcagcataagggccctgcaggtactatgtgctcagtaaatgccagtggttcttaagrgtctgagctcccatggtagaggcaagtaagctgaggttcagagacagaaaatgacttgcccaagatcacccagctgggaagtgacagtgccagggttgga

SEQ ID NO: 49151 - DNA, 201 bp, Homo sapiens
gcgattggccacttctcctcgataacattactgtttttcttccgccttctggttgactttagccagaaccagtgcttctataactccagttacctgaatgyccagcgggagaatgggaccgtctccagatacggtgagggccagccctcaggcaggagggttcaccgtgggaacagggcaggccagcataaggtgggggct

SEQ ID NO: 49152 - DNA, 201 bp, Homo sapiens
gataacattactgtttttcttccgccttctggttgactttagccagaaccagtgcttctataactccagttacctgaatgtccagcgggagaatgggaccrtctccagatacggtgagggccagccctcaggcaggagggttcaccgtgggaacagggcaggccagcataaggtgggggctggatgtagagccctggaggc

SEQ ID NO: 49153 - DNA, 201 bp, Homo sapiens; identical to SEQ ID NO: 25364

SEQ ID NO: 49154 - DNA, 201 bp, Homo sapiens; identical to SEQ ID NO: 25340

SEQ ID NO: 49155 - DNA, 201 bp, Homo sapiens
gagctgtggtgggcaggaacaccagcttttcagagtttacctcaacactgtccaactcagttggcctagagtcaggcaacctggttttaagcccatgttcmccacctttgattggaggaacccaggcaaactgcacttctctgggcctcagaatccttctataaaatgaaagggtctcctctgattatttccaaggccctc

SEQ ID NO: 49156 - DNA, 201 bp, Homo sapiens
ttgagtgctagagaatcttatggctgcaaaatgagtaagcagagacttcaaccactgtcttctgactcacagcccaagggaaagaccaggcaagagtaggrgtgaagtaagtagctcggtgacagcacagaacctgtgagccagggctcaggctgaggctcctggcctccctgactcttccttcaaaggcacacagtaggc

SEQ ID NO: 49157 - DNA, 201 bp, Homo sapiens
atttgtacactgttttgagcagtgcctgctgtacagtaaggaccatatatgtgtttataaaataaatcttagttgctataggcaacaccacgcagctgagrgtggccgcacattgactctcttaaagaacacttcctctcttgctcatcctactcagctcataaaagttccagggaaaatcatacattggacaagacaagg

SEQ ID NO: 49158 - DNA, 201 bp, Homo sapiens
aggcaaactgcacttctctgggcctcagaatccttctataaaatgaaagggtctcctctgattatttccaaggccctccatcagctcaaacatgctatcaytttcatggcatcacaaagaggcgaatgaatggggcttccttcctcatttccaactgattatattccagactcaaaagagaaacgaataaataaaacatag

SEQ ID NO: 49159 - DNA, 201 bp, Homo sapiens
atctaacctagtcaaggaagtcaggggccaattccctgaagtagcagtgattgagctgagttcagaggtaaggaggagttacagagagggttcgtgagaasactccaggtagagggaacggcatacataaagtctggctcatgatctgcagagcaatgggacacctctgtagaatcaggcaggggagtgatattaactggt

SEQ ID NO: 49160 - DNA, 201 bp, Homo sapiens
tgtatttatctggcagttcagtttgtcagttcaagggggaaaaggaccattggggaggggaggggaggagaaactctaaggacaaattacaatgggcattytgaaaagacagtaactttttatttttctatggcatttaaaacccagacttgaattctttattcaattaaaaacacccactaaggtcaggcaaaatttaac

SEQ ID NO: 49161 - DNA, 201 bp, Homo sapiens
aaagagaaatgaccagaagacaatttagacaaatagatatgaatactttctccaaggacagctaaactcgcatgttctaactgtggaatcaggggattttyaccttttatagtccatgagaatagaacttgggccaagaaaggggttgagaagtaataataatgaaagctgactcttataaaatgcgtattatgtgccagc

SEQ ID NO: 49162 - DNA, 201 bp, Homo sapiens
tattactattatttcccctatattagcagaaaaggaaacagagggtcaggaggttaagtcgtgtgcccagggtcctgtagctagtgaaaggtggtgctggkatcgaaattaggtgtcctggctctgatgtccacagcattagccactgctggacactgcctctctgatgggctgtgtggaatgagggataccgtgagctgc

SEQ ID NO: 49163 - DNA, 201 bp, Homo sapiens
gcactccagactgggtgacagagagagactctgtcaaaaaaaaaaaaaaaaaaaagtctgcatggtattgtttgcttatatgatgtttagaacaaggaaaygactgaggctgaccatgctctggctctggaggctctctggggatacctggaggagtctttgggtcacaccaaaacactaggatgcagcctaatgtgaaga

SEQ ID NO: 49164 - DNA, 201 bp, Homo sapiens
ggtgattagagtaggtggatggtggccccgagagacggcccaataaaggaagtgattgggggtatggatactggatcggttggtttgcataggaaaggtgsgccctcccacgtgagtcatttactgtttctcggaattggctaaccctgggagtggcagtccctccagggtcatcagcacagccccaggtgtcaaagcatc

SEQ ID NO: 49165 - DNA, 201 bp, Homo sapiens
taagccaaaagaatgcagaatcaggccgggcatggtggctcatgcctgtaatcccagcactttgggaggctgaggtaggtggatcacaaggtcaggagatmgagaccatcctggctaacacagtgaaaccccgtctctactaaaaatacaaaaaattagctgggcatggtggcgggtgcctgtagttccagctactcagga

SEQ ID NO: 49166 - DNA, 201 bp, Homo sapiens
aattctaagtcatgggcaaggtggaaataatctagccagaaaatatatttgggggtggtactaaggaaaagcagtggctctaagaggtattgccctagagyggggcatggttattggaatataaagttgaaaatatgattactcttctatcttcctcttcttctttatggctgaatcactcccaagatagttcttagcagg

SEQ ID NO: 49167 - DNA, 201 bp, Homo sapiens
ataaagagatctaacctagtcaaggaagtcaggggccaattccctgaagtagcagtgattgagctgagttcagaggtaaggaggagttacagagagggttsgtgagaacactccaggtagagggaacggcatacataaagtctggctcatgatctgcagagcaatgggacacctctgtagaatcaggcaggggagtgatat

SEQ ID NO: 49168 - DNA, 201 bp, Homo sapiens
agtcaggggccaattccctgaagtagcagtgattgagctgagttcagaggtaaggaggagttacagagagggttcgtgagaacactccaggtagagggaayggcatacataaagtctggctcatgatctgcagagcaatgggacacctctgtagaatcaggcaggggagtgatattaactggtttgtgtttcaaaaggacc

SEQ ID NO: 49169 - DNA, 201 bp, Homo sapiens
ttcatgtgacttatttttgatgtatataaacttatagacagttcttgaattcttgtctatgtgaagcacatattgtgtgaagtatttgcatggggccaggygcggtggctcacacttgtaatccagcactttgagaggctgaggtgagcggatcacctgaggtcaggagttcgagaccagcctggccaacatgacaaaacc

SEQ ID NO: 49170 - DNA, 201 bp, Homo sapiens
acagcaccatctccttggatcggagtgatttcctggagcaaaggtaatctgatcttattcacacaggagcaggcaataactgcctgagtacagaactcctrtgaggcgattggtgttggaaccctgagtagtctagttacataaccagcataacccttggaaaagctgtcgcataagggaaggctgcctctgggactagaa

SEQ ID NO: 49171 - DNA, 201 bp, Homo sapiens
aggcctagctgaggcaggctcaatgcccagtctgagctgtagaggagtagctgagctctgcactttgccagccatatgaccatgggccgatttacccttcmtaagtcacaattttctcctctgtaaaacgaggataataatagtatgtatcacatagagttgttgagaaaatgaaacatgataatgtatctaaaagtgctt

SEQ ID NO: 49172 - DNA, 201 bp, Homo sapiens
ctggaggctctctggggatacctggaggagtctttgggtcacaccaaaacactaggatgcagcctaatgtgaagattacaactcaagtcttggctttgctwtttagcagctgagtgaccttgggcaagttttcattgtctctcagcctcagtttcctcatatatagcatggaaataatactagtgtttctcttacaggatc

SEQ ID NO: 49173 - DNA, 201 bp, Homo sapiens
gattagagtaggtggatggtggccccgagagacggcccaataaaggaagtgattgggggtatggatactggatcggttggtttgcataggaaaggtgggcyctcccacgtgagtcatttactgtttctcggaattggctaaccctgggagtggcagtccctccagggtcatcagcacagccccaggtgtcaaagcatcagg

SEQ ID NO: 49174 - DNA, 201 bp, Homo sapiens
ctctgtaaaacgaggataataatagtatgtatcacatagagttgttgagaaaatgaaacatgataatgtatctaaaagtgcttattgtgcagtctgatacrtgtgaaagatttagtatcatcttcaccgtcatcaccatcattctcatcatggttgcaacaggacttgaattctgaacatgtgacttctgggacctgggaa

SEQ ID NO: 49175 - DNA, 201 bp, Homo sapiens
atgtacatggaaagaatgttgcaaaaaaggcactggactactgatagttccactggaaataagtgggaaggggattgagggccaatctttaagattatttrgcagtagtgtgtcattaggactctttggtagcaagtgacagacactgactctgccaacataagtgtaaaaggaccttgttgccatggtgattgagtgact

SEQ ID NO: 49176 - DNA, 201 bp, Homo sapiens
aaggcaaatgaatgaggggaagaaatcatatccatactattcactttgcagctgtatttatctggcagttcagtttgtcagttcaagggggaaaaggaccwttggggaggggaggggaggagaaactctaaggacaaattacaatgggcattctgaaaagacagtaactttttatttttctatggcatttaaaacccagac

SEQ ID NO: 49177 - DNA, 201 bp, Homo sapiens
aatccatcaggctaagtcactccctgtgtttcactttcaaatgtttcaaatcatgaagattgcttgactagctgttggctttgtggtatgaagacacagcygaagaaagggtgagcggtctttttcttttgacttggtaaagctaggaaggcaaatgaatgaggggaagaaatcatatccatactattcactttgcagctg

SEQ ID NO: 49178 - DNA, 201 bp, Homo sapiens
ggggaattaaaaaaaatacttaaagtttgggtcacattcctagaggttctgatttaattggtctagggtatggctgttaaaagctccctatgaaattctaragagttccccatgggtataaaacaggaggcacagcttgtcatgcagtgggggcatatggggaagcatcagggctggtcaggggcccgagggagcaagggg

SEQ ID NO: 49179 - DNA, 201 bp, Homo sapiens
ctatgaaattctagagagttccccatgggtataaaacaggaggcacagcttgtcatgcagtgggggcatatggggaagcatcagggctggtcaggggcccragggagcaaggggaaaatgcagacaagagcctttattgtgatttctgcaggaatggtaatgcaagacagggtaaacaggctcaggattggctcctttgaa

SEQ ID NO: 49180 - DNA, 201 bp, Homo sapiens
atttttctatggcatttaaaacccagacttgaattctttattcaattaaaaacacccactaaggtcaggcaaaatttaaccatgtaatgcaggatgctggyggcctttttgggaggagaaaccacttcctggctccagaattggatctgaggagagactcggggagatgagggcaggtcgctgcattgaagtcttgagagg

SEQ ID NO: 49181 - DNA, 201 bp, Homo sapiens
aaaacacccactaaggtcaggcaaaatttaaccatgtaatgcaggatgctggcggcctttttgggaggagaaaccacttcctggctccagaattggatctraggagagactcggggagatgagggcaggtcgctgcattgaagtcttgagaggcctgaagaggaggccccattgctgataatgcttcccatcttactgctc

SEQ ID NO: 49182 - DNA, 201 bp, Homo sapiens
aacagatgaagaatgtgactttcaggggatgaatgtgagtacatacttttctgacacttattaactgtcatgaatgattgattttcctatccccctgggtyccccacgtaattcattctctccttccatgacaaggaagggaaacagaagtgcgggaccctctctgtgtataatccacctccctctcttctcccaccctcc

SEQ ID NO: 49183 - DNA, 201 bp, Homo sapiens
tcaaagtcaccctctaaatcaactgacttgtaaatgatgtgttctgtaactacaaaatgaagacatcgagaagattcagggacctcaaagatcctggattygatccctgcatattacagatggagaaaccgaggtacagagaggacacacagagaccaccactctgcatggggtaagccccatggcagaaacttggttaca

SEQ ID NO: 49184 - DNA, 201 bp, Homo sapiens
caatgggcattctgaaaagacagtaactttttatttttctatggcatttaaaacccagacttgaattctttattcaattaaaaacacccactaaggtcagrcaaaatttaaccatgtaatgcaggatgctggcggcctttttgggaggagaaaccacttcctggctccagaattggatctgaggagagactcggggagatg

SEQ ID NO: 49185 - DNA, 201 bp, Homo sapiens
cataatccccataatcttgaattgtagttcccataatgtcacgggaggaacccggtgggaggtaattgaatcatggggatggtttcccacaggctactctygtaatagtaagttctcatgaaatctgatggttttataagggtctcccccttcgcttggttctcattcttctccttcctgccaccgtgtggagaaaggaaa

SEQ ID NO: 49186 - DNA, 201 bp, Homo sapiens
tattagtttccttatctttgaacatagacattttaaacattcttcaaacagtataattcttctgattgctgtaaaataacagactgccattttaagagggmgaacacatcctagcaacgttgacatctcagccaggtcagctcaccctgcttcaacaggattccagcctgtgtgtgctgtggacctggctgggcagtgacc

SEQ ID NO: 49187 - DNA, 201 bp, Homo sapiens
ggaagatgtccctcttgtagaccacccaattcaggcttttcacttcccctcataacgctgtttagaaggtaggtgattttctgctttatttctcaggagtscagccggggtcccatttctccagcacatcctaagctcgggcacacaaagtcccagaggcacacagcttcagtgccttggggatagcagattccaactctt

SEQ ID NO: 49188 - DNA, 201 bp, Homo sapiens
ctaagagttcacgccagctcaatcttgattcactgcccaggtctacaacactgaggaaggagaggatttttttagaagttatatctttgtgattatgtttktgctcatcactaaagtaatactaggtcattacaaaaaattaaattaaaatgaaagcagacacataaatgtaaataacacagaaactgaaaacttactcta

SEQ ID NO: 49189 - DNA, 201 bp, Homo sapiens
gattttctgctttatttctcaggagtgcagccggggtcccatttctccagcacatcctaagctcgggcacacaaagtcccagaggcacacagcttcagtgscttggggatagcagattccaactcttgggcccctaactcaaaatccccaacaaccctcggtcacctgtggctccagtcctgttttggttttccacagatc

SEQ ID NO: 49190 - DNA, 201 bp, Homo sapiens
agagtatgcacactgctatttcagctgctacctccccaaacaaggccaaagaaataaaatactcctcaataggggctagataaattgcaaccaccatttayagaagataacaagaatgaagtgccttctctgtgcagatatggcccgagcaccatgatatactgctaggtgaaaaaggagcaaggcccggagtgtggtgcg

SEQ ID NO: 49191 - DNA, 201 bp, Homo sapiens
gtgtgcaagcagggcctcagtttgcatctcctcccctgtgaagatatacgtaactcagagatactgagtcagcttttctgtccaagctttttctgtgaagmttggttttacataactctgtaaaatcaattgaacatcaatgttaattaggcataataacagacaattcacaaattgtttgacaccatgggatacaaacac

SEQ ID NO: 49192 - DNA, 201 bp, Homo sapiens
agctcgggcacacaaagtcccagaggcacacagcttcagtgccttggggatagcagattccaactcttgggcccctaactcaaaatccccaacaaccctcrgtcacctgtggctccagtcctgttttggttttccacagatcacaaaggcatcaaggaagaggctcacggtaagcctggcctactcggagagccaccagat

SEQ ID NO: 49193 - DNA, 201 bp, Homo sapiens
gtttgaaccctaagcacattgtgcttgcaaacaattaaagagacatctcttttaaaaaaataacagggaagatgtccctcttgtagaccacccaattcagkcttttcacttcccctcataacgctgtttagaaggtaggtgattttctgctttatttctcaggagtgcagccggggtcccatttctccagcacatcctaag

SEQ ID NO: 49194 - DNA, 201 bp, Homo sapiens
cctgtagtctggtgggggtctgtgttagtctgttctcacactgctttaaagaactgcctgagactgggcaatttatacagaaaagagctttagttgactcrgttccacatggctggggaggcctcaggaaacttgcaatcatggcagaaggagaagcaaggaccttctttgcatggtggcaggagagagaagagagtgagc

SEQ ID NO: 49195 - DNA, 201 bp, Homo sapiens
gcttgcaaacaattaaagagacatctcttttaaaaaaataacagggaagatgtccctcttgtagaccacccaattcaggcttttcacttcccctcataackctgtttagaaggtaggtgattttctgctttatttctcaggagtgcagccggggtcccatttctccagcacatcctaagctcgggcacacaaagtcccaga

SEQ ID NO: 49196 - DNA, 201 bp, Homo sapiens
cccacaggctactctcgtaatagtaagttctcatgaaatctgatggttttataagggtctcccccttcgcttggttctcattcttctccttcctgccaccrtgtggagaaaggaaacattttcttccccttctgccatgattgtaagtttcctgaggcctccccagccccgcagaactatgagtcaattaaacctcttttc

SEQ ID NO: 49197 - DNA, 201 bp, Homo sapiens
ttggttctcattcttctccttcctgccaccgtgtggagaaaggaaacattttcttccccttctgccatgattgtaagtttcctgaggcctccccagccccrcagaactatgagtcaattaaacctcttttctttataaattatccagtcttgggtatgtccttatagcagcatgagaacggaataatatagggagagaggg

SEQ ID NO: 49198 - DNA, 201 bp, Homo sapiens
gacttggatgtgccaatatggcctctggcgtttgagcccgaggtggtgccctgtgtatcctgagcaaccttcaccctgcagagccattgaggggaggggasagctgaatagtgtggccatcccttttgagacttttgtaatttgtctcatctttaatcccactgagctagattttcagagatgggggctctgaccctgtat

SEQ ID NO: 49199 - DNA, 201 bp, Homo sapiens
tgtcaccactgtttggggcttgcttgacgtcatcgcccagcaactgttgccatgacaactgagatgcctctacccttttgtaacagtggatgtttattgakccccctctcattgcccacatatgcaccagaatggaagagcagcgtgggtggagctgccttgcttattgctgtgtgtccagcacctatgagtgcttagcac

SEQ ID NO: 49200 - DNA, 201 bp, Homo sapiens
tttatgggcagaccaagggctctggcttagtggacaggcttgttcttagcccacacacacctgagaatcaaggtgggccacgcagatgcctctaaaagcawggatcaggagggggctgggcttctgccatcagtttctttgatttttttaaaagttattctctcagtgagtcacagtacttctatatttctcacagaactt

SEQ ID NO: 49201 - DNA, 201 bp, Homo sapiens
agacgctcagaacccatagccaggccaacctccatccaggtctgctaatccctgggtcctgtgggagatggcccctccatgtcactcattagactcttgcycacccaatgaccactaaagtgacacccagcctgaggcttgttcaagtgcaggaggcagattcaggcctggagttaaggtctggacagtgcttgcgatggg

SEQ ID NO: 49202 - DNA, 201 bp, Homo sapiens
ttccagacttggatgtgccaatatggcctctggcgtttgagcccgaggtggtgccctgtgtatcctgagcaaccttcaccctgcagagccattgaggggargggagagctgaatagtgtggccatcccttttgagacttttgtaatttgtctcatctttaatcccactgagctagattttcagagatgggggctctgaccc

SEQ ID NO: 49203 - DNA, 201 bp, Homo sapiens
actgagcataggtgtaggctcaaactgagtgcattcatgaaagcagctcccaggtcaagaaatggaatattaccagaagtccctcctattatcttccagtygctactccacccacccccagggaatgcccatttcaaatgtgcactgaaacaggaaatgatctctacctttaaaacaaatatgtacagggacataaaaagg

SEQ ID NO: 49204 - DNA, 201 bp, Homo sapiens
gccaaggcgggtggatcacgaggtcaggagttcgagaccatcctggctaacacggtgaaaccccgtctctactaaaaatacaaaaaaaaaaaaaaaaaaaattagccgggcgtgatggcgggcgcctgtagtcccagctactcaggagtctgaggcaggagaatggggtgaacccaggaggtggagcttgcagtgagccga

SEQ ID NO: 49205 - DNA, 201 bp, Homo sapiens
acctgggaggtggaggttgcggtgagccgagatcacactattgcactccagcctgggcaacaagagcgaaactccatctcaaaaaaaaaaaaaaaaaaaaatccatccacttaagcacttggtccatgagtgagcccactttgtctgtcacccgcagccattgtcaggtacctgctagggctctgggtcacagaagacaca

SEQ ID NO: 49206 - DNA, 201 bp, Homo sapiens
ccacatcattcctatatctctaactcattatttttagtggctacagatatgacttcatttattttatggtcttttaggctgtgtccattgtttccccatcrcaaacactgcagtactggagaatgtatactttttaaaacattttattgaagtattatatacatatataaaaagcacactgagcataggtgtaggctcaaa

SEQ ID NO: 49207 - DNA, 201 bp, Homo sapiens
tcatcaactcatgccaattcttctctaaccccttgttgtccccctcctctgattatttgaagcaatcccagatgacaaataaattactcataaatgttcasaaagtgagatctcctagttttaattcctgtagttcacaggttcagcggtgaattcactaagctagttagtggtacttatatttaatccctggcttcagaa

SEQ ID NO: 49208 - DNA, 201 bp, Homo sapiens
caatctccagacactcccaaaagatattttcaaaggcctggattctttaacaaatgtgtaagaggacctaagaaatcactgaacaattaattaatttgcastcattaacaaggaagcctggtattgattattataatttttaattggcttttaaattaaaattaggatttttaaatctaaattttaactggccaaaaattt

SEQ ID NO: 49209 - DNA, 201 bp, Homo sapiens
cttttcttcccgtgacgtgcatgggcaagttctgcccactaatattcatttcccactatgtcctgcatctgatttaacataaagggaagtagcaatggaarttatttcttctggcaacttggaatatgagaagtccctggtccttgggccatttttcaaatcagtgagtgtgggaggtataatatttgtgtgtaccaattt

SEQ ID NO: 49210 - DNA, 201 bp, Homo sapiens
acaatctccagacactcccaaaagatattttcaaaggcctggattctttaacaaatgtgtaagaggacctaagaaatcactgaacaattaattaatttgcwgtcattaacaaggaagcctggtattgattattataatttttaattggcttttaaattaaaattaggatttttaaatctaaattttaactggccaaaaatt

SEQ ID NO: 49211 - DNA, 201 bp, Homo sapiens
acatcaagtcaatttcaagacatactttccggggactaaagtcattaattcacttgtaagtatgaatgttgctattactttttaagcttgctaatggacartgcagtttgatcacctgtggttaatgcacctactttatgagtgtccataaaaatttaagaaacccaaatgacttctctccatgcacacttgccatctttc

SEQ ID NO: 49212 - DNA, 201 bp, Homo sapiens
cacatcatacataaaagtaagtcccaaatgtattgaagagttaaatattaaaaagaaaatgttaaggggaagatgtaggcaatatttccttgatctcaagrcaggaaaggatatttaaagaatgaaatcatgtcttttgcagcaacatggatgggttggaggccattatcttgagtaaaataactcagaaagtcaaatacc

SEQ ID NO: 49213 - DNA, 201 bp, Homo sapiens
aattcacttgtaagtatgaatgttgctattactttttaagcttgctaatggacaatgcagtttgatcacctgtggttaatgcacctactttatgagtgtcyataaaaatttaagaaacccaaatgacttctctccatgcacacttgccatctttccctgtcatctgtcagagggtgttcaataaattgattactattaata

SEQ ID NO: 49214 - DNA, 201 bp, Homo sapiens
tctatcctaagtctatcataaggaaataagtagagataggaaaaatatttatatataaggatggttataatcatgtttataatagtaaacattggaatcgwtaatttaaaaagttacatcatgatatatccataatacaaaacttactcatctatggaaactatatttttgaaaaattgattgtcatgagaaattgttcat

SEQ ID NO: 49215 - DNA, 201 bp, Homo sapiens
tgaccggacatccagagggaaatgttagttaagcattattaatatgaaaagaaaaatcaataacacaaagataatttcctttttgatttaagtactgcttwgccaaaataagtatttatttattgtatagttgcaagcagcaacaaaatgaaaacaaaagcctcccattttagcagacatgttttgaggctctactgggta

SEQ ID NO: 49216 - DNA, 201 bp, Homo sapiens
gtttagttttttatttttattgtggaaaaaaaaacacctctaagaaaagtttataacgtgtatatatatggtgctggttaaaaatagaaaattacactacytggtgaccttccccagtcatacagcattagcactgtgctatgtctatatttgtgtactagggacacatttccctttccttgacagtatcaggacaatttt

SEQ ID NO: 49217 - DNA, 201 bp, Homo sapiens
taaatttcagaatcaattcggcttgattgacgtaggaagacagttcgttggtttcttgctttattgttgggaagggttaaagcaaatgtcctatttccatyatccaccctaaaaatctgataatgtcagtatgcccccagatgctttttcagagcttctgaaaaagctatgatgagaagtacttgttgaaatgtcagtctg

SEQ ID NO: 49218 - DNA, 201 bp, Homo sapiens
agaaaattacactacctggtgaccttccccagtcatacagcattagcactgtgctatgtctatatttgtgtactagggacacatttccctttccttgacaktatcaggacaattttttactcattaacctttattagaatcattctagtgatttacggaagaacaaatagaaagggaaagggaaaaacattcctgtgatca

SEQ ID NO: 49219 - DNA, 201 bp, Homo sapiens
tcattcatgtggtctgtttctaaacgttgtttcttggacaacatacgtacagaagctgttctcttctgacaccagccactctactgagagtagttcagacrcctgcaccatccttgattatctcatttccttttttcaataatcttatgagataaggtattattatcttcacttaaaaatgaaacaactgaatttccaaga

SEQ ID NO: 49220 - DNA, 201 bp, Homo sapiens
acctatttttttcaattatgaattttatgacatctaaatatagatcacctatttctggtaaaatttagcatctgaattgagatatattgtaggtataaaayacacactggacttcaaagacttagtataaaaaaggaatgtaaaatatctcaataatgtttatattgatgatgtgtcaaaatgataatcttttgtatgtat

SEQ ID NO: 49221 - DNA, 201 bp, Homo sapiens
gtagttctcaccagaggttttagtccttgaaatgtagttcaacaaacattattcagccaggaactgtgcccggggctggggacaccaaaacaaataagggmaaattcctgctgtaagaaatatttaatccagtagtctcgtaatgatcagaatttagtgtaaggtgaattcctctttgtccaacaaatatttattcagtgt

SEQ ID NO: 49222 - DNA, 201 bp, Homo sapiens
gtagagatgaggtcttgctatgttgcccacgctggtctcgaactcctggcctcaaacaatcctcccacctcacccttccaaagtgctgggattatgggtatgtgcctggcctccttaaatgtattataaggtagtcttgataagcattctcattttgttcaaaatgagattcagttgattagtgatgatggtgatgcttgc

SEQ ID NO: 49223 - DNA, 201 bp, Homo sapiens
gctgcttccctggcctctgaagaggcgaggccccagggcaggaaagcacctcagtggcccaccagacttagcaccaacacatgagcctgcccagtcctttygctcttatgcattcccgtctctggcctctcacccggtatttgggcagccttacccttgaccccttgtagctatatcctcattcttagatcctctgcttct

SEQ ID NO: 49224 - DNA, 201 bp, Homo sapiens
tctggccaggtgcggtggctcacgcctgtaatcccagcactttgggaggccgaggtgggcggatcacaaggtcaggagatcgagaccatcctggctaacamggtgaaaccccatctctactaaaaatacaaaaaattagctgggcgtggtggcgggcgcctgtagtcccagctactcgggaggctgaggcgggagaatggc

SEQ ID NO: 49225 - DNA, 201 bp, Homo sapiens
tcttgaacccgggaggcggaggtggtggtgagccgagatcgtgccatggcactccagcctgggcaacaagagtgaaactttgtttcaaaaaaaaaaaaaaagattaaacgcaaagaaataatacataataggagttgatgtattttgttaaatacaaatttaaacttctatatgttaaaaatcattaatgaaaaggcaaat

SEQ ID NO: 49226 - DNA, 201 bp, Homo sapiens
aatggcttggccacaccaatgcaactgttgaagacatctactgcgaaggccccccagaatacaagaagcgcaaaatcaatagtctctcctcgaaggatttygattgcatcattacaggtaatgtactcatcatcattccacctcaaaaaattaaaataagggctacctttttttttcatgtgcaggaactgatatttttta

SEQ ID NO: 49227 - DNA, 201 bp, Homo sapiens
aatttaaaagctgattctcagctcaattattggaaaatgttaagtacgcttggaataatttgggtatatacacctatttttttcaattatgaattttatgwcatctaaatatagatcacctatttctggtaaaatttagcatctgaattgagatatattgtaggtataaaacacacactggacttcaaagacttagtataa

SEQ ID NO: 49228 - DNA, 201 bp, Homo sapiens
caaaaaacttatcttggtgggttttccaccacaattctacactctcctaagcattctttgcacgtaattttacctaccatggatccaattcaaccctaagkcatcctttatcctttagcttctctaccggctggctccatttctcagtctgccaattccagatccccaagaagggtgtcgtcttagcccaactcacctttt

SEQ ID NO: 49229 - DNA, 201 bp, Homo sapiens
ctccctcttggtaaggaaacatactcccgtggttgcagaagaaaaaagcctcccctctcctcccacagccccttttcttactgaattaataagtgcacagycctttggggagggtgtagacagatcaggcacacccctgtgtccacctccaccaaaattctaggggaaaatgcctggcttcttaggaaaatgcttccctaa

SEQ ID NO: 49230 - DNA, 201 bp, Homo sapiens
gtgaattcaaacttcctcagcagagatttccagcataccagatttcaaaggcaaagcatctaagcctttccttagacccaccgctcgaatctcttgtgtcscacgctgacttcacatttggtctccttggtttttagtcagactgcagaggccgactagtctgtcctgggaagggtaagatgctcctttatccagcctgac

SEQ ID NO: 49231 - DNA, 201 bp, Homo sapiens
atgcccttctactggctgatgtcttcaaatgattagcaattgactagatattcctaaggggtttatctgtttgattgatggctagtggtgtgactgggggragtgttagttagcacatcaaacaaatccaaaaaagatagattctttcccacagaaaggggcagagtctctaatgctgggatccttccataggataagaat

SEQ ID NO: 49232 - DNA, 201 bp, Homo sapiens
aggacccaggcctttcacttgtttgttttttatttttttattttcttgccttacttggccattttggctgtttgaagttacatacacagaggcaaacagcmtggagtggacgttggagagacaagtgtttaaacctcaccctgccactcatagaacctaaacatgtagtcttgtgcagattagtatatctcactaagcctc

SEQ ID NO: 49233 - DNA, 201 bp, Homo sapiens
aaaggaagagtttccactgctctgggatgagagataatcccaggaggattgaggattaccaaaagggggttaccactccaaaaggagagggtccatgctcraatgtttgctagtgtgcatgtcaaggacatccctgcaaatctgaaatccacatcctaaatcctagccccaccactgacaaaagatgtgaccttggttaag

SEQ ID NO: 49234 - DNA, 201 bp, Homo sapiens
tgtatacatacaaataactcttgacttcacagagggccatagattttgcccaactgtgcttccatggctaaagatttctggaccctcctttgagaattgtyttcattgccagtttacaagccacgcaataaaaccaggcaaggttttattagagacattagttatttttgtattgcttggtgctaagcattttatagatct

SEQ ID NO: 49235 - DNA, 201 bp, Homo sapiens
tgggaactccatgatcaaggcaccaggagatttagggtctggtgagggctcactctctgcttcaaagacggtgccttctctgtgtcctaacatggcagaarggcaaaaaaagatctaacagactcgctcaagcccttttgcaagggcacaaattccattcatgagtgtggagtcctcatgatctaatcacctcctagacac

SEQ ID NO: 49236 - DNA, 201 bp, Homo sapiens
taaggggaagatgtaggcaatatttccttgatctcaagacaggaaaggatatttaaagaatgaaatcatgtcttttgcagcaacatggatgggttggaggmcattatcttgagtaaaataactcagaaagtcaaataccgcatgttttcacttataagtgggggctaaataatatgtactcatggacataaagtgtggaat

SEQ ID NO: 49237 - DNA, 201 bp, Homo sapiens
gtgtaagaggacctaagaaatcactgaacaattaattaatttgcagtcattaacaaggaagcctggtattgattattataatttttaattggcttttaaaktaaaattaggatttttaaatctaaattttaactggccaaaaatttaaatttacatggactaacatttgagtcttctatggtatttatcattgggaattct

SEQ ID NO: 49238 - DNA, 201 bp, Homo sapiens
tcctatttaaactgaatttgtagaccacggaagaggatcaggattaattatgtctgtgaggaagaagaaaagcaaatagctcacttgattaaatacattayaataatcactacattctgtcctttagacctgtgctgtccaatagggtagccaccagaccttatggtcactgagcacctaaaatgtgctcctagtacaact

SEQ ID NO: 49239 - DNA, 201 bp, Homo sapiens
tgaaataaatgtatttcttgtgaatatttaagatctagccaaggaaagaggtattagctcacagttacttattatttcctatttttgcagaatttgcaaaktctcaagacctgccttatcaatcattgtccatagacactttttcttatttgaatgatgagtatgtagtcatcgctcagccttttactggaaaatgcattt

SEQ ID NO: 49240 - DNA, 201 bp, Homo sapiens
ttatgagaacatctacttaattgttgaattgcagtgactcttcatcctttcaacagctatttctcaatctacctaatatgtatcttatcagttctagatayagatgcaagagatccaagtgtcatagtcattctgtcagctttaacctgttctctcatcatacttcattcccagctctgctctaggccctaggatgcagca

SEQ ID NO: 49241 - DNA, 201 bp, Homo sapiens
aaatacatatgtgtatatatcatatatgcattatgcttatgcatatcagtgtctttgggtagtatgattatggtgcacttcattttcttctttaagctttygtgttttccagaatttctacaatgagcatatattatttataaacagaattcaccaaagtgtattcaaggctgggtacggtggctcatgcctgtaatctca

SEQ ID NO: 49242 - DNA, 201 bp, Homo sapiens
tacctgcctggaattcatagttcatataaatgatttttctaaatctccctcttggtaaggaaacatactcccgtggttgcagaagaaaaaagcctcccctstcctcccacagccccttttcttactgaattaataagtgcacagtcctttggggagggtgtagacagatcaggcacacccctgtgtccacctccaccaaaa

SEQ ID NO: 49243 - DNA, 201 bp, Homo sapiens
ctgcattcccctgaaaagaattgcttatttcctatgtctcttatctgcgcttttgctgactgaggggaagaaaccagcgaagccaaaatgccctgccgtgygtacttgtaccaaagataatgctttatgtgagaatgccagatccattccacgcaccgttcctcctgatgttatctcattgtaaggcccgtaagcattttg

SEQ ID NO: 49244 - DNA, 201 bp, Homo sapiens
ttttcttcccgtgacgtgcatgggcaagttctgcccactaatattcatttcccactatgtcctgcatctgatttaacataaagggaagtagcaatggaaaytatttcttctggcaacttggaatatgagaagtccctggtccttgggccatttttcaaatcagtgagtgtgggaggtataatatttgtgtgtaccaatttc

SEQ ID NO: 49245 - DNA, 201 bp, Homo sapiens
gacagttcaaaagctggttttactaccatttacaaatggaacggaaacggattctactcccatcaatccttacacgcgtggtacagggacactgatgtggmatatctagaaatagtcagaacacctcagacactcagaacgcctcatttaattctgtctagtagttcccagcgtcctgtaatttatcagtggaacaaagca

SEQ ID NO: 49246 - DNA, 201 bp, Homo sapiens
gaaaggggacgtgtacatttgcttgacaagattcattggtgattccaaagtcatgaaatggggaggctcctcgttccaggatattcagaggatgccatcgygaggatccatggtgttccagcctcttcaaataaataattaccaatatgcaattcttggaagtgattactcctttactcaagtgtataactgggatgcaga

SEQ ID NO: 49247 - DNA, 201 bp, Homo sapiens
gaggtcgggagttcgagaccagcctgaccaacatggtgaaaccccgtgtctactaaaaatacaaaaattagccggcacagtggcacatgcctgtaatcccrgctactcagaaggctgaggcaggagaatctcttgaacccgggaggcggaggtggtggtgagccgagatcgtgccatggcactccagcctgggcaacaaga

SEQ ID NO: 49248 - DNA, 201 bp, Homo sapiens
agaaaagattgttagtgcctttgtcatgaaaatatgtaaaatgttgctttggctgctttggctatcatagctgctctgattgtatctcaaaatgtcacccrgggtatgtggcagtcattgtgaggaatcgggcaccaggcaccccttgatgagcctttgatgaggagatgattaggagtaaaaaaatgctgcatagattat

SEQ ID NO: 49249 - DNA, 201 bp, Homo sapiens
ctcccctcccctgcaaattaacccttaaaaccctgcaaattaacccttaaaaagggagagagacttcttaaagttaagtcctttcaaagcctgtcaaatgytgggattctcaattactttattttgaatcattgttctaatgttatgcatgtttcactttaatgtttgaatggtttgtatattttagtaatcttttgtata

SEQ ID NO: 49250 - DNA, 201 bp, Homo sapiens
gattctttcccacagaaaggggcagagtctctaatgctgggatccttccataggataagaatttgctgtctctgagaaagtgataaattgtgtttctggtsctcacttgttaaatgaataaatagctcttttaaaaagcatccttttgatatgctaaggcacctcccttcccctaggaagttacatagatctagttacata

SEQ ID NO: 49251 - DNA, 201 bp, Homo sapiens
tctactaaaaatacaaaaaattagctgggcgtggtggcgggcgcctgtagtcccagctactcgggaggctgaggcgggagaatggcgtgaacctgggaggyggagcttgcagtgagccgagatcgcgccactgcactccagcttgggtgacagagcgagactccgtctccaataaataaataagtaaataaataaataaaa

SEQ ID NO: 49252 - DNA, 201 bp, Homo sapiens
ctttcttagcagcagagcccggtggcactgaaacaaacgcggtgtttgagccagtctggtctgccttagagagaagactttccagtgggttccacagtcayaatcggaggttttcttgggtaaatgatgaaaacaccaaagggcaggaaatggtcatcatttctgtgaagaaggaatggccgtctgcctttgagaacactt

SEQ ID NO: 49253 - DNA, 201 bp, Homo sapiens
aattatcatcaatctatatgtattgtagagtatccaatggttgctcagcactgagggggtacaaaggactatataacagtccccaaactcaggatgcttgygtgttcccaatcagttgcacaggatgtctttgttttagccttcacattgccttatatgtaaagaggtagtgcaatgtagcagctaagagggtgatctctg

SEQ ID NO: 49254 - DNA, 201 bp, Homo sapiens
acccttaaaaccctgcaaattaacccttaaaaagggagagagacttcttaaagttaagtcctttcaaagcctgtcaaatgctgggattctcaattactttrttttgaatcattgttctaatgttatgcatgtttcactttaatgtttgaatggtttgtatattttagtaatcttttgtatatttgaatttttctgatgaat

SEQ ID NO: 49255 - DNA, 201 bp, Homo sapiens
aaagtaaaatggccattttactattctctgaaataaatgtatttcttgtgaatatttaagatctagccaaggaaagaggtattagctcacagttacttatyatttcctatttttgcagaatttgcaaagtctcaagacctgccttatcaatcattgtccatagacactttttcttatttgaatgatgagtatgtagtcatc

SEQ ID NO: 49256 - DNA, 201 bp, Homo sapiens
gagcttgcagtgagccgagatcacgccattgcactccagcctaggtgaaagagcaagactccgtctctaagaagtaaataaataaataaataaataaatawtaaaaaagttattatatatacctggctatcaggcgagatcctcccctcccctgcaaattaacccttaaaaccctgcaaattaacccttaaaaagggagag

SEQ ID NO: 49257 - DNA, 201 bp, Homo sapiens
acatttacagataacttaaaagttattataggccgggcgtggtggctcacacctgtaatcccagcactttgggaagccaaggagggcagatcactaggtcrggagatcgagaccatcctggctaacatggtgaaaccccatctctactaaaaaatacaaaaaattagccgggcgtggtggtgggcgcctgtagtcccagct

SEQ ID NO: 49258 - DNA, 201 bp, Homo sapiens
ttgagtataagacaataaggagtagtggtgactgaggtaaaccagagaagacatgtcttacctaaaaatcctctgctccaactgactattgctgatgggawtgtggtacatgcacatggagccctatcttcctcatttttaggggaaggtggaattctggaagtagatttttaaacaggataaagaccaaacaaatataag

SEQ ID NO: 49259 - DNA, 201 bp, Homo sapiens; identical to SEQ ID NO: 31549

SEQ ID NO: 49260 - DNA, 201 bp, Homo sapiens
ctgggaggtgcagccccaggcggttcagtgaggttctggttgtttctgtgtctctgcttgcaggtgcactgacgttcctcctgtccatggggagaaatgayggtgtgggccaaatcagtggcttctatgtgggccggctcatggttcggctgaccaagagccgggacctgttcgtctctacgagctggaaaaccatgaggc

SEQ ID NO: 49261 - DNA, 201 bp, Homo sapiens
agtacatcaaagtgcagacggacaaaggcacagaggtggccaccaacctggtgattctctgcaccggcatcaagatcaacagctccgcctaccgcaaagcrtttggtgagcaggtgcccagccgggcttcccctgtgcctccttgctctccagtaccctctgaatgccctgcagtgcttgcccccaggagtccacaccttg

SEQ ID NO: 49262 - DNA, 201 bp, Homo sapiens
gatcgaggcctctctcactgtgggtcctcccagccctcccagcctccctgactctgatatgctctcctctttcttcccagcagtgcctgatttgagatggkgtcccaggtctcggtggaatcgggagctctgcacgtggtgattgtgggtgggggctttggcgggatcgcagcagccagccagctgcaggccctgaacgtc

SEQ ID NO: 49263 - DNA, 201 bp, Homo sapiens
ggtgaggcaggtgagctgtgcactgaaggcatggggcagtgtgggcagatggaaggacagccttggggatgcctaggcctgcagctgggaggccacggggktactcagagctgctggctgtagccatagagttggagagtcactaggaagagactttcctgggaagagaccttgaacttgctgctggagccaggatgtgag

SEQ ID NO: 49264 - DNA, 201 bp, Homo sapiens
gccagcaggccgctatccaggcctatgaggacatggtgaggcaggtgagctgtgcactgaaggcatggggcagtgtgggcagatggaaggacagccttggsgatgcctaggcctgcagctgggaggccacggggttactcagagctgctggctgtagccatagagttggagagtcactaggaagagactttcctgggaaga

SEQ ID NO: 49265 - DNA, 201 bp, Homo sapiens
catagagtggactgagggaggggcatggtgggaagacagggtgcagccattgcccagttgggccccagaggtccaggccctccccagggttagccttggcytggggtccaggcttgatggggtccctgtccccaccagcctcctggtcatgaacccccttctaggtgagcgggtgagcaatctggaggagctgcctctcaa

SEQ ID NO: 49266 - DNA, 201 bp, Homo sapiens
taatcaccagcaacacccgggacaataatacgggggccacctacccccacctgaacttcagcattcccatcacggtgctccagccggccctgcagcagtayagccagacccaagacctaggtggcctccgtgagctggaccgcgctgctgagccagtcagggtggtgtggcggttgcagcggcccctggcagaggccccgc

SEQ ID NO: 49267 - DNA, 201 bp, Homo sapiens
acctacccccacctgaacttcagcattcccatcacggtgctccagccggccctgcagcagtacagccagacccaagacctaggtggcctccgtgagctggmccgcgctgctgagccagtcagggtggtgtggcggttgcagcggcccctggcagaggccccgcggagcaagctctgaggctgtgttaccacctttggaaag

SEQ ID NO: 49268 - DNA, 201 bp, Homo sapiens
tgaacttcagcattcccatcacggtgctccagccggccctgcagcagtacagccagacccaagacctaggtggcctccgtgagctggaccgcgctgctgasccagtcagggtggtgtggcggttgcagcggcccctggcagaggccccgcggagcaagctctgaggctgtgttaccacctttggaaagaagagtgaccttt

SEQ ID NO: 49269 - DNA, 201 bp, Homo sapiens
ctttagagaagtagcacagtttgtcaaccacctttggagataccacagaatggttacatgacttgcccagagttgcctgctggtcgattcagggctgatamccagatcttctgacttttactgtcactctcagctccttgatttctcccaagtactgaggagtcagaaagctagcctgtcatttgtttcccttgctcccag

SEQ ID NO: 49270 - DNA, 201 bp, Homo sapiens
accccacacacatttggtcactgaagtcttctgtgttgatgattgtgatggcatgagagtagagggaaaacacgatttgaggagagtttttcctaaaacayggggcaatcacagaacactcctgggatggttgttcctccctttacagattaggaatgggtccagaggtcatggctagtttaagagaagttctacagtaag

SEQ ID NO: 49271 - DNA, 201 bp, Homo sapiens
ggggccgtgtggtatttgccactcaggagacatgtccctatgacatagcagtggtgagcctggaggaggacctggatgatgtccccatccctgtgcccgcwgagcacttccatgaaggtaaaggacgaagggcgcagcctgaaggagggcccctctgagctagggtgggcctcaggaaggagaatcagtgttgggcattct

SEQ ID NO: 49272 - DNA, 201 bp, Homo sapiens; identical to SEQ ID NO: 9273

SEQ ID NO: 49273 - DNA, 201 bp, Homo sapiens
tcccaaaagtctttgatggaatatatcaagtaaaaaacaaatgtgcagaacactttgtttaatgggtgcaaaaaataatcgtgattatagttgcataaacwatctctggaaggagtcatccaaacttgttacgtaacagtggatgcctctggagaagggaacttggtgtttggggaatgggctggaagtgggataccccct

SEQ ID NO: 49274 - DNA, 201 bp, Homo sapiens
gcacgcccgtaatgctgcagaccacgtgtgctgtgcacagcggctccagtgggggacccctcttctccaaccactcaggaaacctccttggtaaccagctstttggccccctcccgccctcccacttgccagaacctcagtcccaccccatgagtgcttgtggccagccccagtgcaccctctgtctgggaaaatggtggg

SEQ ID NO: 49275 - DNA, 201 bp, Homo sapiens
ctgccatgctgggtggctccagttgcccccacattctccacgcggaggtaaactctacttccttaggtctttccccaggttctagtgccatcctttgggckaaccagtgtggtggtttcaccccctcccatgggggctgcctcgggtgcctagaggggcctctttgcctggtttgtcccggctggcaggccgggagtagga

SEQ ID NO: 49276 - DNA, 201 bp, Homo sapiens
tctggcagagagcagactagccagcagtggtgctctgagagtgaacgagcacctccaggtggagggccacagcaacgtctacgccattggtgactgtgccracgtgaggacgcccaagatggcctatcttgccggcctccacgccaacatcgccgtggccaacatcgtcaactctgtgaagcagcggcctctccaggccta

SEQ ID NO: 49277 - DNA, 201 bp, Homo sapiens
ttctctcatcttatcctggccacgggcagcactgggcccttcccgggcaagtttaatgaggtttccagccagcaggccgctatccaggcctatgaggacayggtgaggcaggtgagctgtgcactgaaggcatggggcagtgtgggcagatggaaggacagccttggggatgcctaggcctgcagctgggaggccacgggg

SEQ ID NO: 49278 - DNA, 201 bp, Homo sapiens
tcagtttcctcatctgtaacctggaggtatgagtggaggtggacgttcgtgcaatgattgtgtttgaagacttgggggctccttctcaggccctgtggtcrttttgtcctcaggtcactctcattcactcccaagtggccctggctgacaaggagctcctgccctccgtccggcaggaagtgaaggagatcctcctccgga

SEQ ID NO: 49279 - DNA, 201 bp, Homo sapiens
atgcttgaagataattttccaggtggccctaggtgaggtgtaggttgtgacatgttggcatattggtagtcctctggcctgggtgtggcaggagggtactraaagagtcctagtctagaacatgtgggcttaagcccagctcaccactaattggtcctggcattggacagattacttctctggagcttcagtttcctcatc

SEQ ID NO: 49280 - DNA, 201 bp, Homo sapiens
cctgcagtgcttgcccccaggagtccacaccttgctgccttccccctttcttcccaacagctcagactttaaattcagtgagggtccacccttgctgagcwctcctcagctgtgaccatggctcggccccaggtggccaaggtgaccagaatcttctgaaattagggccgccccctagtggtaagagatgggaacaggcgt

SEQ ID NO: 49281 - DNA, 201 bp, Homo sapiens
ctgcagtgcttgcccccaggagtccacaccttgctgccttccccctttcttcccaacagctcagactttaaattcagtgagggtccacccttgctgagctmtcctcagctgtgaccatggctcggccccaggtggccaaggtgaccagaatcttctgaaattagggccgccccctagtggtaagagatgggaacaggcgtc

SEQ ID NO: 49282 - DNA, 201 bp, Homo sapiens
gattaaaacagaatatcctgagaaagaggtgagccaggctgccttgccttggagctctaagtggttggcttttttctgcattatcttaggaacatcaggartttgctcagggcagagaagtctggagctctattcacataaactgggagtgtgtatttctgttttgtgccaaggtgtgattctataggggatttttcctgc

SEQ ID NO: 49283 - DNA, 201 bp, Homo sapiens
gagactgccaggtctgttggaagctacccctgcagagtgtgtagtaggacgcccctgtctgatcccgggcaagtcacttaacctgtctaagctgcctcccygggagttgacgctgaatgtcgtggaacggagcctgtcacgtcgtgtgctacagaagtgttagcgtgtacgtaaatagggacccagaggagtgaaaccatg

SEQ ID NO: 49284 - DNA, 201 bp, Homo sapiens
acctccaggtggagggccacagcaacgtctacgccattggtgactgtgccgacgtgaggacgcccaagatggcctatcttgccggcctccacgccaacatygccgtggccaacatcgtcaactctgtgaagcagcggcctctccaggcctacaagccgggtaagagaggccccatgtgctttgcagttttaatagagtttg

SEQ ID NO: 49285 - DNA, 201 bp, Homo sapiens
acgtgaggacgcccaagatggcctatcttgccggcctccacgccaacatcgccgtggccaacatcgtcaactctgtgaagcagcggcctctccaggcctayaagccgggtaagagaggccccatgtgctttgcagttttaatagagtttggggttaaacatggggaagcctttttgggctatcccatacctggccactaga

SEQ ID NO: 49286 - DNA, 201 bp, Homo sapiens
cggtctgaggcccagattggcattttaggaagtaggggtaccccaggcatacctaatggcccgacgctttggtcaagggcacccctgttggtttgcagctygtgaaaggttctgagtcactctggcttcccgtgggcagcctggctctgccctatgacctcttctgtgtcccttccccagggttcgccaaaaagacattca

SEQ ID NO: 49287 - DNA, 201 bp, Homo sapiens
aatcagggtctcacccaccttcctaaagcgatttcacatttccggccctgagtctgaaggcctcgggaaggatcggcactctgggaggtgcagccccaggyggttcagtgaggttctggttgtttctgtgtctctgcttgcaggtgcactgacgttcctcctgtccatggggagaaatgacggtgtgggccaaatcagtgg

SEQ ID NO: 49288 - DNA, 201 bp, Homo sapiens
gctgggggtggttttctccatttagggccaagtgcctgcattccactgtcagacaagttctggagaagctcaaggtctttggtcttaagtagccaccacartgagaccctagaagtaaaagcttgagcttttctgacggtctgaggcccagattggcattttaggaagtaggggtaccccaggcatacctaatggcccgac

SEQ ID NO: 49289 - DNA, 201 bp, Homo sapiens
tgccttccgccatgattgggaggcctccctagccatgtggaactgtaagtccattaatcctctttttcatcccagtctcaggtatgtctttatcagcagcrtgaaaacggactaatacaggcatcaaggcacccacaggctactctggggagactgatgtgtcagcccattagtgcaataagcagggaagctctgtccagg

SEQ ID NO: 49290 - DNA, 201 bp, Homo sapiens
gcccccacattctccacgcggaggtaaactctacttccttaggtctttccccaggttctagtgccatcctttgggctaaccagtgtggtggtttcaccccytcccatgggggctgcctcgggtgcctagaggggcctctttgcctggtttgtcccggctggcaggccgggagtaggatgcagaggcctaggcctgccctgc

SEQ ID NO: 49291 - DNA, 201 bp, Homo sapiens
ctgttgtatttgagccattacatttggaatctattggtcattgcagcagaacttaccttcattaatatagcctctccctagctgggaacactataccaaaycatgtgttgggggagagaggaagaaacgaggatattcctctcttctttgaagcttacaaatttcgttggaactacgtatggaaaaggagaacatttacca

SEQ ID NO: 49292 - DNA, 201 bp, Homo sapiens
ggcttagccaatcgggctcgatgaggaagacgtgagtcagagcttgcgcctctcgcttccagctgtgggtggcgctaggcagcttcagccggaccgggtaggggtcctcgctcgctagcttgctgtttctcggagaagctcccgagtgtccggcctagaggccatgagaaggcagtgggggtctgccatgagggcggccga

SEQ ID NO: 49293 - DNA, 201 bp, Homo sapiens
ccagtgtctagagctcgccctctcctcctcctggtggccacttaacacagcagctcagtgtcttggtttcggtgtcatttcttctggcagagagcagactrgccagcagtggtgctctgagagtgaacgagcacctccaggtggagggccacagcaacgtctacgccattggtgactgtgccgacgtgaggacgcccaaga

SEQ ID NO: 49294 - DNA, 201 bp, Homo sapiens
aggtcccggaaggtggtggtcttgacctggcagcagatgcttaaagaatgcctaaggtgggtggcagttggggagttcaagggtgaatgaggccagggcarcccccaggagctgaggccaactctttgagtcaggactgtgccgtgtgcccagggccttgcatgtgtgggccctcgagtgatttctactggcaggctgaaa

SEQ ID NO: 49295 - DNA, 201 bp, Homo sapiens
cttgttccagtctttgttagaatactgggtatgttagggcttgggacaggcctctgacctctgggtatcctttcactaatgttcgcccacctttttcacartgggtcctaaagaccttcccatgagagggtctcaatcctaggggaaggaatgttgatgtcatgaaccttccataaaaacccaagaggacagggttcagag

SEQ ID NO: 49296 - DNA, 201 bp, Homo sapiens
agcctgaggtacgcttgggattagctctagacaacccttctgagggcttagaggagccagggtggccctgcctgccggggggttgtcttgggtcctaatcwctacgagggctcagcctcctcatctgtgaaatgggtatgttcaagcctcaatgctttggggaccatttgacccacgagaaacaactttaaattccctcca

SEQ ID NO: 49297 - DNA, 201 bp, Homo sapiens
tttgcttgccgccatccatgtaagacgtgatctgctcctccttgccttccgccatgattgggaggcctccctagccatgtggaactgtaagtccattaatyctctttttcatcccagtctcaggtatgtctttatcagcagcgtgaaaacggactaatacaggcatcaaggcacccacaggctactctggggagactgatg

SEQ ID NO: 49298 - DNA, 201 bp, Homo sapiens
tcccaaagtgctgggattacaggtgtgagccactgtgcccaacccagaaatacaccctttctgtgctgttttctcagcagggtgtgagctcacgggatacrgtcctgccagactggccctcatagctggtcatgtgccagtcagagctgggtggggcttgcaggtcccggaaggtggtggtcttgacctggcagcagatgc

SEQ ID NO: 49299 - DNA, 201 bp, Homo sapiens
ctggtgtggttgaggggggcagtcttggagactgaaccctcaacctgtggggtctgacaatgtctctgggtagatagtgttggaactgaattagaggacamccggctgatgtccactgcttttggtggggaaaccccacacacatttggtcactgaagtcttctgtgttgatgattgtgatggcatgagagtagagggaaa

SEQ ID NO: 49300 - DNA, 201 bp, Homo sapiens
tgggtccagaggtcatggctagtttaagagaagttctacagtaagttaatggtagcagaatcctagatctgaggtctgactttgctgtgagagggagttgyggtgggcggggaggagggtttattcttgcacgtgtgggtactgatatggtttgggtgtgtccccacccaaattttatcttgaattgtaactcccacaatt

SEQ ID NO: 49301 - DNA, 201 bp, Homo sapiens
tattcctctcttctttgaagcttacaaatttcgttggaactacgtatggaaaaggagaacatttaccaggctcttcagatctaagagttgcctgttcttcragtgggcatactgcctctgtttctctgggctcctgagatgacccagtaccttggagctcctccagccctgggagccagcagaaaagccacctgttgtctg

SEQ ID NO: 49302 - DNA, 201 bp, Homo sapiens
ggctttgtgatgctgccacataagtactgatgttgcactccatggaggcagtgtgatacagtgatgaagggtccaggggctctggatgggcatctttcctmtgccacttattagtcccatgtccttggacaggctagttaactatcctctgcctcattttccacgtctttgaaatggggctaatgcatcctatttctgggt

SEQ ID NO: 49303 - DNA, 201 bp, Homo sapiens
gctgaggcaagaggatcacttgaaatgggagttcgagaccagcctgggcaacatagtgagactctgcctctatttttatttaaaaaaattttttttaattaaaaaaaaaagaaaggaaaatactaagtctaccttggagaggcctggcagataccacctcagccaagtgatcaaggtgaacgtcagaagtactccatacag

SEQ ID NO: 49304 - DNA, 201 bp, Homo sapiens
tgatgctgccacataagtactgatgttgcactccatggaggcagtgtgatacagtgatgaagggtccaggggctctggatgggcatctttcctctgccacytattagtcccatgtccttggacaggctagttaactatcctctgcctcattttccacgtctttgaaatggggctaatgcatcctatttctgggtgttgtga

SEQ ID NO: 49305 - DNA, 201 bp, Homo sapiens
gatcacttgagcccaggagttcaaggctgcagtgaactatggtcaccattacactttagcctgtgtgacagagcgagacccatctcaaaaaaataaacagygtttatttaaaaaaaaaaaaaaaaaagccaggtatggtggctcgcacttgtaattctagcacttttggaggccagggcgggaggattgcttgagtctggg

SEQ ID NO: 49306 - DNA, 201 bp, Homo sapiens
ctgggtgtgacgttgcctgtaaagcacttacccccataccctgcacttggaaaaggaaggtcatggctgcattatagccatcatcaccatttcttttcacraagagacttcttaggagttccaggaggagatgggtgtgaattccacaaacatttattgagcatgtaggtaggtgttaggaactcctaaaagtcactgccc

SEQ ID NO: 49307 - DNA, 201 bp, Homo sapiens
agcccaggagttcaaggctgcagtgaactatggtcaccattacactttagcctgtgtgacagagcgagacccatctcaaaaaaataaacagtgtttatttaaaaaaaaaaaaaaaaaagccaggtatggtggctcgcacttgtaattctagcacttttggaggccagggcgggaggattgcttgagtctgggagttcaaga

SEQ ID NO: 49308 - DNA, 201 bp, Homo sapiens
tcaggatattatagctggttgggccttatagtcccctcccattatagggggtaaattgaggcctagagagggaaggggttgtgccccagacccgcaaagawgatcagggcagtgcagtggccttccagcggcctgagggtcccagatgagctggaacacacttccttatgaggctgttcagtggcttgatgtctatccttc

SEQ ID NO: 49309 - DNA, 201 bp, Homo sapiens
tctcatccttggagagaagtatttgcacccttcctttgccctcagtctttcttttttattttttcatttcatttcatttattattattattattattattwtttttttgagacagaatctcacagtcacctaggctggagtgcagtggaatgatcatggttcactgtagcctcaaactcctgggctcaagcaatcctccca

SEQ ID NO: 49310 - DNA, 201 bp, Homo sapiens
ctgtaattccagtgcttcgggaggctaaggcaggaggatcccttgaggggctaggagttcaagatcagcctaggcaacatagtgagaccctcatctctacaaaaaaaaaaaaaaaaattagccagctcaggagttcaaggttataatgagttatgatcatgccactgcattctggcctgggtgatagagcaagaccctgtc

SEQ ID NO: 49311 - DNA, 201 bp, Homo sapiens
tctttgtcctgctctttctggagtcctttccttgcatcctgccagctggcatccccttcatccttgcacgcctaccttctacacaaagccttccatgaccwtcccaagcctcagggctgattccgtgcagtgggcaggctgtagcctctctgttcacctctctgtgtcacatcttactgggtacatgcccagtaaattccc

SEQ ID NO: 49312 - DNA, 201 bp, Homo sapiens
cctttccttgcatcctgccagctggcatccccttcatccttgcacgcctaccttctacacaaagccttccatgaccatcccaagcctcagggctgattccktgcagtgggcaggctgtagcctctctgttcacctctctgtgtcacatcttactgggtacatgcccagtaaattccccacaactgagattctgctttgcct

SEQ ID NO: 49313 - DNA, 201 bp, Homo sapiens
ttgactgagcaaatttttgtgtaaatcagattgtgtgtgtgtgtgtctgtgtgtatgtgtgttgtggcagggagcaaaggtaaagttactgaggggttccyggacaatcagggtttgttccgctctcttaggccttcttttaagctaacattcttgaacctagacagacatagttaagattctctgtgattcccactgggg

SEQ ID NO: 49314 - DNA, 201 bp, Homo sapiens
aatcatgtgttgggggagagaggaagaaacgaggatattcctctcttctttgaagcttacaaatttcgttggaactacgtatggaaaaggagaacatttaycaggctcttcagatctaagagttgcctgttcttcgagtgggcatactgcctctgtttctctgggctcctgagatgacccagtaccttggagctcctccag

SEQ ID NO: 49315 - DNA, 201 bp, Homo sapiens
ctcaagtgatctggccgcctcggcctcccaaagagttgggattacaggcatgagccaccacacctggcctgcatttatttttaaaatctcacttacattcraaagtcaattcaagactcagctgatcattgtaacttgttgagagttatgtacatttctaaaaggaggcttgttggtattttgacccatttccactctggc

SEQ ID NO: 49316 - DNA, 201 bp, Homo sapiens; identical to SEQ ID NO: 9284

SEQ ID NO: 49317 - DNA, 201 bp, Homo sapiens
tgtacatttctaaaaggaggcttgttggtattttgacccatttccactctggcatcagcaaccttgcctctgcaggaagagttgtgaggtagagacttcakgggggaatacattaggtgggagggtggcctctagagcaggcacctccagggggtggtcatgcctcaggagggtgacctgaccagcacctattgaccagtg

SEQ ID NO: 49318 - DNA, 201 bp, Homo sapiens; identical to SEQ ID NO: 9286

SEQ ID NO: 49319 - DNA, 201 bp, Homo sapiens
ctaaccgtcaaagttccatggaatgaacttgccactttttcaggatcctaaccaccgcactttcctgctacctctggcacttggaatttcagagacaaaascccttttttaggcagcgagccctgattttcagttccaaagctatgggcactgctgagtgggaccagaggagtggtgtgcagtgagctacctggaggggtt

SEQ ID NO: 49320 - DNA, 201 bp, Homo sapiens
cagatcagctttgtggggcatagagtggactgagggaggggcatggtgggaagacagggtgcagccattgcccagttgggccccagaggtccaggccctcyccagggttagccttggcctggggtccaggcttgatggggtccctgtccccaccagcctcctggtcatgaacccccttctaggtgagcgggtgagcaatct

SEQ ID NO: 49321 - DNA, 201 bp, Homo sapiens
actgagcgtctctgggcctcagttataccacctaaaatggagataatgccagtgcctagtttatagggtcgtgaagactaaataaagtgatgtccacaaarcactaacaccaaacctggcccacagtgctcactaagtgtcaggttgattattcaggtacaggaagctttagagaagtagcacagtttgtcaaccaccttt

SEQ ID NO: 49322 - DNA, 201 bp, Homo sapiens
tatgttttggttttgataaatattttttggtgacattagatacgaacataaaggaaagctggtcaaagggtatatagaattctgcaatatttaggcaagamttctgtatgtctgaaattatctttaaaaaactacacacacatccatgcaccgagcaggccaaacaaaatatgtctgtgggtctgtcattcattcattcat

SEQ ID NO: 49323 - DNA, 201 bp, Homo sapiens
aaaaaacttgagaagtcattcaaagcacttagttcgtgatcaataaatattagcttattgtttttctaagacgatgagtaggatttttcatcaaaaataartcattctggttgccttgggcaaaataatctgcaatataaaatatctataataaatggctgctgtgtattcattgctactgtgtgccaggcaccatgttaa

SEQ ID NO: 49324 - DNA, 201 bp, Homo sapiens
actgagcaaatttttgtgtaaatcagattgtgtgtgtgtgtgtctgtgtgtatgtgtgttgtggcagggagcaaaggtaaagttactgaggggttcctggrcaatcagggtttgttccgctctcttaggccttcttttaagctaacattcttgaacctagacagacatagttaagattctctgtgattcccactggggctt

SEQ ID NO: 49325 - DNA, 201 bp, Homo sapiens
acacacatccatgcaccgagcaggccaaacaaaatatgtctgtgggtctgtcattcattcattcattcattcattcattcattcaacaagcctttgttgcrcgcctacttggcacaaggcactgtttcaggtactggggagactgcatgaacaaaacatcaaagtcctgcccttatggagctgacactaggtcgagagaaa

SEQ ID NO: 49326 - DNA, 201 bp, Homo sapiens
ttcattcattcattcattcattcattcaacaagcctttgttgcgcgcctacttggcacaaggcactgtttcaggtactggggagactgcatgaacaaaacmtcaaagtcctgcccttatggagctgacactaggtcgagagaaagataacaagtgaaataagtgaactatctagtgtgttagattttgagagtgttaagga

SEQ ID NO: 49327 - DNA, 201 bp, Homo sapiens
ctgtcaccacgtggggtggtatccagccctaccaggccctgggggctccagggtggagatggtcctcctcccttctccagcctttctgccccctggctcayatcctcttttgctctctgactcctcaacaggcataatcaccagcaacacccgggacaataatacgggggccacctacccccacctgaacttcagcattcc

SEQ ID NO: 49328 - DNA, 201 bp, Homo sapiens
ttgagctttgttctgggatacagttaaattttttgggaacaactttcttctaagtctttcatgattttttaggtgggtttggagcagtgctcagtgtagarctagtaattagtgtagagctaattattcctcacactgaggcaagacattcctgagtactctacccaatgccctgtaaattataagtttttccagtatggc

SEQ ID NO: 49329 - DNA, 201 bp, Homo sapiens
ttgattgactttcttctcattattgatcatgttttccttcctctttgtatgcctggtaaactttgattgactgccaaacatcgcaaattttaccttgttgkttcctgaatatctttgtattcctatgaatcttgagctttgttctgggatacagttaaattttttgggaacaactttcttctaagtctttcatgatttttt

SEQ ID NO: 49330 - DNA, 201 bp, Homo sapiens
gacattgtagttttcatctttaaaatttcactttaggtcttctttatatcttttatatctctccctaactttttgaaaatatagtgataataactgctttwattactttctctgccaattctaacatctgtgtcagttctaggcctgttttgattgattgactttcttctcattattgatcatgttttccttcctctttgt

SEQ ID NO: 49331 - DNA, 201 bp, Homo sapiens
cccatccagtgttgttgctgtttttttgagacattgtagttttcatctttaaaatttcactttaggtcttctttatatcttttatatctctccctaacttyttgaaaatatagtgataataactgctttaattactttctctgccaattctaacatctgtgtcagttctaggcctgttttgattgattgactttcttctca

SEQ ID NO: 49332 - DNA, 201 bp, Homo sapiens
tgtagagctaattattcctcacactgaggcaagacattcctgagtactctacccaatgccctgtaaattataagtttttccagtatggctggaggtaacargcactttttctgaatctctgatgtattttaatggttctttctctggcctcaggtagtttcagcacacacatgtgttaatcgacactcttgaatacttgag

SEQ ID NO: 49333 - DNA, 201 bp, Homo sapiens
cttgaaattgtccacagtgtactggtgctctttctgagttttaaattatgttctaactctttgtttatgttgttagttacagttgccatgcctttaagtgmactaatcttttcttgtacaatatttaatctgctcttactcccatccagtgttgttgctgtttttttgagacattgtagttttcatctttaaaatttcact

SEQ ID NO: 49334 - DNA, 201 bp, Homo sapiens
cacactgaggcaagacattcctgagtactctacccaatgccctgtaaattataagtttttccagtatggctggaggtaacaagcactttttctgaatctcygatgtattttaatggttctttctctggcctcaggtagtttcagcacacacatgtgttaatcgacactcttgaatacttgagggagacagtatatattgcc

SEQ ID NO: 49335 - DNA, 201 bp, Homo sapiens
agtgcctgtgggcgcctatgcctgggcagcccagggcccctgcagctgcagcaagtgggtcctgcgcggctgtcttcatcgcaggaaagcccccagctgcmcccctgcagccccgcagtccaaggatggctcctttagagaacatccagctgtctgtgatgacggtgaagggcacatagacactgagggggacaaggagaa

SEQ ID NO: 49336 - DNA, 201 bp, Homo sapiens
gtagcctctttgaaaaccaagaaatgcatacaggtgttgtctttcgtggtgttctataatcactgtttggcaacgtgttatataatctctcagtaaaaatrtaagcattgaacacttactttcaaactaatgaggtaggtgattgcttatcatcccattttattgacaagaaaattgtcaagagaatttaagcaacttgcc

SEQ ID NO: 49337 - DNA, 201 bp, Homo sapiens
attttcttacagagaaatatggcttcagtttttcattacttcctgttagttctggtctttctggatacacacgcagctcagcctttctgtctgccaggatrcacttgctcagaggagagttttggcaggtgcgctctgctggccagatgttagagggttatggggaatgggttttctttggggatgatgtggagtggaagc

SEQ ID NO: 49338 - DNA, 201 bp, Homo sapiens
tatctgaaatctactgagcaactgacagaggaagttcaatctaaggctttctttctcttatctaatggtgagaagatttaagtaatttctgcccataattkttgaaagcaattgttactcataccaagatgtcataagctgtttttatgcagtagtctggtgaaagaaaagtgaacctgaaccgaggaactctcagtccta

SEQ ID NO: 49339 - DNA, 201 bp, Homo sapiens
ctgttgtgggtaagttgatcaaattttgtgtttcactatgatttgaaaatcttggttgaggtggtctttaaaaatccttaaaataacagaatggagagatyttcctaagctatcaattggagggaattattgttcagatcatcctctatgtttcctgatgggatctaaagggattacagtaccgtttccggacctgtattc

SEQ ID NO: 49340 - DNA, 201 bp, Homo sapiens
atcttggttgaggtggtctttaaaaatccttaaaataacagaatggagagatcttcctaagctatcaattggagggaattattgttcagatcatcctctakgtttcctgatgggatctaaagggattacagtaccgtttccggacctgtattcccaggaaaccttagcttgggtagatggtaactagtgttcagaaagcaa

SEQ ID NO: 49341 - DNA, 201 bp, Homo sapiens
gtgatgaaactgtggaattgctgacattgtcacttcctctttatctaacttttgctttggtgatttgtattacaggctcagtgctcttacttttaagacaytggagagaatgaaaaaatatgtattcattgatgaaaatgttcaaaaacagaccttaatctggctttcaagccaacagaaaacaagcggctgctttaagaa

SEQ ID NO: 49342 - DNA, 201 bp, Homo sapiens
ggaagttcaatctaaggctttctttctcttatctaatggtgagaagatttaagtaatttctgcccataatttttgaaagcaattgttactcataccaagaygtcataagctgtttttatgcagtagtctggtgaaagaaaagtgaacctgaaccgaggaactctcagtcctagcgctgttttccgtctgacttcaaaatct

SEQ ID NO: 49343 - DNA, 201 bp, Homo sapiens
tatgcagtagtctggtgaaagaaaagtgaacctgaaccgaggaactctcagtcctagcgctgttttccgtctgacttcaaaatctgtgtggtcagctagcktcataatttacagctgcaaagttttcaagctatgcacttaatttttttttaatgtctggtattttgcaagctaccttgtttattgttgttattattgttg

SEQ ID NO: 49344 - DNA, 201 bp, Homo sapiens
catcctttactcaaagggaacaatggtgatgaaactgtggaattgctgacattgtcacttcctctttatctaacttttgctttggtgatttgtattacagrctcagtgctcttacttttaagacattggagagaatgaaaaaatatgtattcattgatgaaaatgttcaaaaacagaccttaatctggctttcaagccaac

SEQ ID NO: 49345 - DNA, 201 bp, Homo sapiens
gctgacattgtcacttcctctttatctaacttttgctttggtgatttgtattacaggctcagtgctcttacttttaagacattggagagaatgaaaaaatwtgtattcattgatgaaaatgttcaaaaacagaccttaatctggctttcaagccaacagaaaacaagcggctgctttaagaatgatggccagcttttcaac

SEQ ID NO: 49346 - DNA, 201 bp, Homo sapiens
tgtttttgttaggagttgttgtcagtggttcatctatcaacgtctgtatttgtttgctcagctgtggtctgttgcagtgaagtgattggctttgtatacasaaagagggccaatgttgtgaactgtgaggttaaggaaaagtccaggagcataaaataatcttctttggtttttcttctcagaaagataacactgaaataa

SEQ ID NO: 49347 - DNA, 201 bp, Homo sapiens
attctaggtgccaaagcctccaagcagggagttttggacttgccaaatgatgtagtagaagggtcagccagaggctttttcactgttgtgggtaagttgawcaaattttgtgtttcactatgatttgaaaatcttggttgaggtggtctttaaaaatccttaaaataacagaatggagagatcttcctaagctatcaattg

SEQ ID NO: 49348 - DNA, 201 bp, Homo sapiens
cagtggttcatctatcaacgtctgtatttgtttgctcagctgtggtctgttgcagtgaagtgattggctttgtatacacaaagagggccaatgttgtgaamtgtgaggttaaggaaaagtccaggagcataaaataatcttctttggtttttcttctcagaaagataacactgaaataaaatgaccttaggggaaatatac

SEQ ID NO: 49349 - DNA, 201 bp, Homo sapiens
caacgtctgtatttgtttgctcagctgtggtctgttgcagtgaagtgattggctttgtatacacaaagagggccaatgttgtgaactgtgaggttaaggamaagtccaggagcataaaataatcttctttggtttttcttctcagaaagataacactgaaataaaatgaccttaggggaaatatactgaatagttagtagg

SEQ ID NO: 49350 - DNA, 201 bp, Homo sapiens
aggagaaatgtttgttgttgatacgaaaggcaaacttctttgtctgttattaacatgaacatctcttggaagggatggattacactttgtaattcataggrttgattgattaaaaaaaaaactagcaaacaagcaaacaaatgcattctcctaacttcctcctctctctagtaatgagattttcagaaatatttttcatag

SEQ ID NO: 49351 - DNA, 201 bp, Homo sapiens
tgctagtcataatattttcctgacccaaaggaaagggccactaacaataaagatggtttacagtagatgagttgaatgcatcctttactcaaagggaacartggtgatgaaactgtggaattgctgacattgtcacttcctctttatctaacttttgctttggtgatttgtattacaggctcagtgctcttacttttaaga

SEQ ID NO: 49352 - DNA, 201 bp, Homo sapiens
atattttcctgacccaaaggaaagggccactaacaataaagatggtttacagtagatgagttgaatgcatcctttactcaaagggaacaatggtgatgaamctgtggaattgctgacattgtcacttcctctttatctaacttttgctttggtgatttgtattacaggctcagtgctcttacttttaagacattggagaga

SEQ ID NO: 49353 - DNA, 201 bp, Homo sapiens
ctgctgatataaagaagccatcacattttttaaatcagtattttcattctaggtgccaaagcctccaagcagggagttttggacttgccaaatgatgtaghagaagggtcagccagaggctttttcactgttgtgggtaagttgatcaaattttgtgtttcactatgatttgaaaatcttggttgaggtggtctttaaaaa

SEQ ID NO: 49354 - DNA, 201 bp, Homo sapiens
ataaaactaaagatttagtgattccaattctaatgcaacaatgttccttcagtctcatgacgatttgcttagcagtctgatcccttcatgacagcccctakacatgcaccgctggttaactccaccgaagagggcacggcacgtcttactctgtgcttctcagagtcccatatagattcgggaaagtgaaattagaaggac

SEQ ID NO: 49355 - DNA, 201 bp, Homo sapiens
tttcctacaatgttctattttaggttatcaaaggcaattatctttcaaaaactctgatggttcctatagtgtgttttggcagcagagtcagaaaggaagcmtatggtgagacataaaaattttattttatataatataggaattacctgaggagggcttgcaaggaggtgaaggaggatagagttcagtggggatttagaa

SEQ ID NO: 49356 - DNA, 201 bp, Homo sapiens
ttaatttttttttaatgtctggtattttgcaagctaccttgtttattgttgttattattgttgtttttgttaggagttgttgtcagtggttcatctatcarcgtctgtatttgtttgctcagctgtggtctgttgcagtgaagtgattggctttgtatacacaaagagggccaatgttgtgaactgtgaggttaaggaaaa

SEQ ID NO: 49357 - DNA, 201 bp, Homo sapiens
actgacagaggaagttcaatctaaggctttctttctcttatctaatggtgagaagatttaagtaatttctgcccataatttttgaaagcaattgttactcrtaccaagatgtcataagctgtttttatgcagtagtctggtgaaagaaaagtgaacctgaaccgaggaactctcagtcctagcgctgttttccgtctgact

SEQ ID NO: 49358 - DNA, 201 bp, Homo sapiens
aggttaaaaaataatttcctacaatgttctattttaggttatcaaaggcaattatctttcaaaaactctgatggttcctatagtgtgttttggcagcagartcagaaaggaagcatatggtgagacataaaaattttattttatataatataggaattacctgaggagggcttgcaaggaggtgaaggaggatagagttca

SEQ ID NO: 49359 - DNA, 201 bp, Homo sapiens
cagaggctttttcactgttgtgggtaagttgatcaaattttgtgtttcactatgatttgaaaatcttggttgaggtggtctttaaaaatccttaaaataayagaatggagagatcttcctaagctatcaattggagggaattattgttcagatcatcctctatgtttcctgatgggatctaaagggattacagtaccgttt

SEQ ID NO: 49360 - DNA, 201 bp, Homo sapiens
tcactatgatttgaaaatcttggttgaggtggtctttaaaaatccttaaaataacagaatggagagatcttcctaagctatcaattggagggaattattgwtcagatcatcctctatgtttcctgatgggatctaaagggattacagtaccgtttccggacctgtattcccaggaaaccttagcttgggtagatggtaact

SEQ ID NO: 49361 - DNA, 201 bp, Homo sapiens
ctttttcactgttgtgggtaagttgatcaaattttgtgtttcactatgatttgaaaatcttggttgaggtggtctttaaaaatccttaaaataacagaatrgagagatcttcctaagctatcaattggagggaattattgttcagatcatcctctatgtttcctgatgggatctaaagggattacagtaccgtttccggac

SEQ ID NO: 49362 - DNA, 201 bp, Homo sapiens
atataatataggaattacctgaggagggcttgcaaggaggtgaaggaggatagagttcagtggggatttagaagcaaagtgggtttcaaagtcaatttacrgaagagaaatagataaaactaaagatttagtgattccaattctaatgcaacaatgttccttcagtctcatgacgatttgcttagcagtctgatcccttca

SEQ ID NO: 49363 - DNA, 201 bp, Homo sapiens
ttctaggtgccaaagcctccaagcagggagttttggacttgccaaatgatgtagtagaagggtcagccagaggctttttcactgttgtgggtaagttgatyaaattttgtgtttcactatgatttgaaaatcttggttgaggtggtctttaaaaatccttaaaataacagaatggagagatcttcctaagctatcaattgg

SEQ ID NO: 49364 - DNA, 201 bp, Homo sapiens
gcatctgatacttatgttctggactatctgaaatctactgagcaactgacagaggaagttcaatctaaggctttctttctcttatctaatggtgagaagawttaagtaatttctgcccataatttttgaaagcaattgttactcataccaagatgtcataagctgtttttatgcagtagtctggtgaaagaaaagtgaacc

SEQ ID NO: 49365 - DNA, 201 bp, Homo sapiens
gattacctccaggagagcggcatctaacgttctgcttcccccttatgctttcacttttagttattatatattactttcttttttcttttttttttttttttgagacagtttcgcgcttgttgctcaggctggattgcaatgtgcaatggcgccgtcttagctcactgcaacctctgcctcccaggttcaagcgattctcct

SEQ ID NO: 49366 - DNA, 201 bp, Homo sapiens
tgattacctccaggagagcggcatctaacgttctgcttcccccttatgctttcacttttagttattatatattactttcttttttcttttttttttttttttgagacagtttcgcgcttgttgctcaggctggattgcaatgtgcaatggcgccgtcttagctcactgcaacctctgcctcccaggttcaagcgattctcc

SEQ ID NO: 49367 - DNA, 201 bp, Homo sapiens
cttttcatatactatactaagtcattcaatgtagtgactatatagtcagtattcttgcccctgctttatacgtgaagaaactatgcttcagagaaagcagyttgcccatggtcgtcctcaagcagatggaatccaaacccaccgggcatggtggccacacctgtaatcacagcactttgggagaccaaggtgagaggatca

SEQ ID NO: 49368 - DNA, 201 bp, Homo sapiens
ctgtgattacctccaggagagcggcatctaacgttctgcttcccccttatgctttcacttttagttattatatattactttcttttttctttttttttttwttttgagacagtttcgcgcttgttgctcaggctggattgcaatgtgcaatggcgccgtcttagctcactgcaacctctgcctcccaggttcaagcgattc

SEQ ID NO: 49369 - DNA, 201 bp, Homo sapiens
caaaaactaataataaaataaaattacctgggcatggtagcatgtgcctgtagtcccagctactcgaggactgaggggagaggattgcttgagcccaggartttgaggctgcagtaagctatgactgcaccactatactgcagcctaggtgacagagagagacactgtctcaaaaaataagaaataagttggtcagaagac

SEQ ID NO: 49370 - DNA, 201 bp, Homo sapiens
gacagaagaccacatggatgacttatcaagaaacgaaaaatgtttacaaaaatgagatcccactacagtattatttttatttatttatttttatttttatktttttgagacagtcttgctgttgcccaggctggggtgcagtggcatgatctaggctcactgcaacgtccgcctcctgagttcaagcaattatcctgcctc

SEQ ID NO: 49371 - DNA, 201 bp, Homo sapiens
tatactaagtcattcaatgtagtgactatatagtcagtattcttgcccctgctttatacgtgaagaaactatgcttcagagaaagcagcttgcccatggtygtcctcaagcagatggaatccaaacccaccgggcatggtggccacacctgtaatcacagcactttgggagaccaaggtgagaggatcacatgagcccagg

SEQ ID NO: 49372 - DNA, 201 bp, Homo sapiens
tgatattatgtagaaagaacaaagctgctctaagttgccacttttcaattattttaggttggtgcaacagtaattgcggtttttgccattaaacccaacaygttggcatctacgtttctagtatctcaaagaacagaacaaattttcacgcagacattcttcttcttcttctttttttttttttttttgacagactctcgc

SEQ ID NO: 49373 - DNA, 201 bp, Homo sapiens
actgaaaagtttacaagttcagccgggtacggtggctcacgcctgtaatcccaaaactttgggaggccgaggcggatggatcaactgagatcaggagttcsagaccaccctgactaacatggtgaaaccccgtctctactaaaaatacaaaaaaattagctggcatggtagcaggcgcctgtagtcccagctacttgggag

SEQ ID NO: 49374 - DNA, 201 bp, Homo sapiens
ctgtcttcgacattaggtgaacattccagacatatatacagacagaagaccacatggatgacttatcaagaaacgaaaaatgtttacaaaaatgagatccyactacagtattatttttatttatttatttttatttttatgtttttgagacagtcttgctgttgcccaggctggggtgcagtggcatgatctaggctcact

SEQ ID NO: 49375 - DNA, 201 bp, Homo sapiens
atgtgccaccatgcccggctaatttttgtatttttagtagaggtggagtttcaccacgttggccaagctggtcttgaactcctagcctcaattgatctgcytgcttcagcctcctggcctcccaaagtgctgggattacagacgtgagccaccacaccaggccaggtagacattcttctatttattaaagcaagtaactta

SEQ ID NO: 49376 - DNA, 201 bp, Homo sapiens
attaaacccaacatgttggcatctacgtttctagtatctcaaagaacagaacaaattttcacgcagacattcttcttcttcttctttttttttttttttttgacagactctcgctctcttgcccaggctggagtgcagtggtgcaatcttggctcaccataacctctgcctcccaggtccaagcaattctcgtgccttagc

SEQ ID NO: 49377 - DNA, 201 bp, Homo sapiens; identical to SEQ ID NO: 45428

SEQ ID NO: 49378 - DNA, 201 bp, Homo sapiens; identical to SEQ ID NO: 45182

SEQ ID NO: 49379 - DNA, 201 bp, Homo sapiens; identical to SEQ ID NO: 45183

SEQ ID NO: 49380 - DNA, 201 bp, Homo sapiens; identical to SEQ ID NO: 44187

SEQ ID NO: 49381 - DNA, 201 bp, Homo sapiens; identical to SEQ ID NO: 45184

SEQ ID NO: 49382 - DNA, 201 bp, Homo sapiens; identical to SEQ ID NO: 46337

SEQ ID NO: 49383 - DNA, 201 bp, Homo sapiens; identical to SEQ ID NO: 46338

SEQ ID NO: 49384 - DNA, 201 bp, Homo sapiens; identical to SEQ ID NO: 46341

SEQ ID NO: 49385 - DNA, 201 bp, Homo sapiens; identical to SEQ ID NO: 44518

SEQ ID NO: 49386 - DNA, 201 bp, Homo sapiens; identical to SEQ ID NO: 46342

SEQ ID NO: 49387 - DNA, 201 bp, Homo sapiens; identical to SEQ ID NO: 44520

SEQ ID NO: 49388 - DNA, 201 bp, Homo sapiens; identical to SEQ ID NO: 46345

SEQ ID NO: 49389 - DNA, 201 bp, Homo sapiens; identical to SEQ ID NO: 46348

SEQ ID NO: 49390 - DNA, 201 bp, Homo sapiens; identical to SEQ ID NO: 46351

SEQ ID NO: 49391 - DNA, 201 bp, Homo sapiens; identical to SEQ ID NO: 46354

SEQ ID NO: 49392 - DNA, 201 bp, Homo sapiens; identical to SEQ ID NO: 44526

SEQ ID NO: 49393 - DNA, 201 bp, Homo sapiens; identical to SEQ ID NO: 44379

SEQ ID NO: 49394 - DNA, 201 bp, Homo sapiens; identical to SEQ ID NO: 44380

SEQ ID NO: 49395 - DNA, 201 bp, Homo sapiens; identical to SEQ ID NO: 44381

SEQ ID NO: 49396 - DNA, 201 bp, Homo sapiens; identical to SEQ ID NO: 45194

SEQ ID NO: 49397 - DNA, 201 bp, Homo sapiens; identical to SEQ ID NO: 44382

SEQ ID NO: 49398 - DNA, 201 bp, Homo sapiens; identical to SEQ ID NO: 45196

SEQ ID NO: 49399 - DNA, 201 bp, Homo sapiens; identical to SEQ ID NO: 43952

SEQ ID NO: 49400 - DNA, 201 bp, Homo sapiens; identical to SEQ ID NO: 45198

SEQ ID NO: 49401 - DNA, 201 bp, Homo sapiens; identical to SEQ ID NO: 45199

SEQ ID NO: 49402 - DNA, 201 bp, Homo sapiens; identical to SEQ ID NO: 45201

SEQ ID NO: 49403 - DNA, 201 bp, Homo sapiens; identical to SEQ ID NO: 45203

SEQ ID NO: 49404 - DNA, 201 bp, Homo sapiens; identical to SEQ ID NO: 46583

SEQ ID NO: 49405 - DNA, 201 bp, Homo sapiens; identical to SEQ ID NO: 45205

SEQ ID NO: 49406 - DNA, 201 bp, Homo sapiens; identical to SEQ ID NO: 46585

SEQ ID NO: 49407 - DNA, 201 bp, Homo sapiens; identical to SEQ ID NO: 46587

SEQ ID NO: 49408 - DNA, 201 bp, Homo sapiens; identical to SEQ ID NO: 46362

SEQ ID NO: 49409 - DNA, 201 bp, Homo sapiens; identical to SEQ ID NO: 45217

SEQ ID NO: 49410 - DNA, 201 bp, Homo sapiens; identical to SEQ ID NO: 44741

SEQ ID NO: 49411 - DNA, 201 bp, Homo sapiens; identical to SEQ ID NO: 46828

SEQ ID NO: 49412 - DNA, 201 bp, Homo sapiens; identical to SEQ ID NO: 46831

SEQ ID NO: 49413 - DNA, 201 bp, Homo sapiens; identical to SEQ ID NO: 46370

SEQ ID NO: 49414 - DNA, 201 bp, Homo sapiens; identical to SEQ ID NO: 46372

SEQ ID NO: 49415 - DNA, 201 bp, Homo sapiens; identical to SEQ ID NO: 46374

SEQ ID NO: 49416 - DNA, 201 bp, Homo sapiens; identical to SEQ ID NO: 46376

SEQ ID NO: 49417 - DNA, 201 bp, Homo sapiens; identical to SEQ ID NO: 46378

SEQ ID NO: 49418 - DNA, 201 bp, Homo sapiens; identical to SEQ ID NO: 46379

SEQ ID NO: 49419 - DNA, 201 bp, Homo sapiens; identical to SEQ ID NO: 43970

SEQ ID NO: 49420 - DNA, 201 bp, Homo sapiens; identical to SEQ ID NO: 46381

SEQ ID NO: 49421 - DNA, 201 bp, Homo sapiens; identical to SEQ ID NO: 43969

SEQ ID NO: 49422 - DNA, 201 bp, Homo sapiens; identical to SEQ ID NO: 43973

SEQ ID NO: 49423 - DNA, 201 bp, Homo sapiens; identical to SEQ ID NO: 46382

SEQ ID NO: 49424 - DNA, 201 bp, Homo sapiens; identical to SEQ ID NO: 43979

SEQ ID NO: 49425 - DNA, 201 bp, Homo sapiens; identical to SEQ ID NO: 45226

SEQ ID NO: 49426 - DNA, 201 bp, Homo sapiens; identical to SEQ ID NO: 45228

SEQ ID NO: 49427 - DNA, 201 bp, Homo sapiens; identical to SEQ ID NO: 45230

SEQ ID NO: 49428 - DNA, 201 bp, Homo sapiens; identical to SEQ ID NO: 45232

SEQ ID NO: 49429 - DNA, 201 bp, Homo sapiens; identical to SEQ ID NO: 44246

SEQ ID NO: 49430 - DNA, 201 bp, Homo sapiens; identical to SEQ ID NO: 46608

SEQ ID NO: 49431 - DNA, 201 bp, Homo sapiens; identical to SEQ ID NO: 44249

SEQ ID NO: 49432 - DNA, 201 bp, Homo sapiens; identical to SEQ ID NO: 45236

SEQ ID NO: 49433 - DNA, 201 bp, Homo sapiens; identical to SEQ ID NO: 45235

SEQ ID NO: 49434 - DNA, 201 bp, Homo sapiens; identical to SEQ ID NO: 46611

SEQ ID NO: 49435 - DNA, 201 bp, Homo sapiens; identical to SEQ ID NO: 46612

SEQ ID NO: 49436 - DNA, 201 bp, Homo sapiens; identical to SEQ ID NO: 45240

SEQ ID NO: 49437 - DNA, 201 bp, Homo sapiens; identical to SEQ ID NO: 45239

SEQ ID NO: 49438 - DNA, 201 bp, Homo sapiens; identical to SEQ ID NO: 46615

SEQ ID NO: 49439 - DNA, 201 bp, Homo sapiens; identical to SEQ ID NO: 45244

SEQ ID NO: 49440 - DNA, 201 bp, Homo sapiens; identical to SEQ ID NO: 44261

SEQ ID NO: 49441 - DNA, 201 bp, Homo sapiens; identical to SEQ ID NO: 46010

SEQ ID NO: 49442 - DNA, 201 bp, Homo sapiens; identical to SEQ ID NO: 44262

SEQ ID NO: 49443 - DNA, 201 bp, Homo sapiens; identical to SEQ ID NO: 44263

SEQ ID NO: 49444 - DNA, 201 bp, Homo sapiens; identical to SEQ ID NO: 44264

SEQ ID NO: 49445 - DNA, 201 bp, Homo sapiens; identical to SEQ ID NO: 44265

SEQ ID NO: 49446 - DNA, 201 bp, Homo sapiens; identical to SEQ ID NO: 46394

SEQ ID NO: 49447 - DNA, 201 bp, Homo sapiens; identical to SEQ ID NO: 44266

SEQ ID NO: 49448 - DNA, 201 bp, Homo sapiens; identical to SEQ ID NO: 46396

SEQ ID NO: 49449 - DNA, 201 bp, Homo sapiens; identical to SEQ ID NO: 46398

SEQ ID NO: 49450 - DNA, 201 bp, Homo sapiens; identical to SEQ ID NO: 44267

SEQ ID NO: 49451 - DNA, 201 bp, Homo sapiens; identical to SEQ ID NO: 44268

SEQ ID NO: 49452 - DNA, 201 bp, Homo sapiens; identical to SEQ ID NO: 45070

SEQ ID NO: 49453 - DNA, 201 bp, Homo sapiens; identical to SEQ ID NO: 46406

SEQ ID NO: 49454 - DNA, 201 bp, Homo sapiens; identical to SEQ ID NO: 45072

SEQ ID NO: 49455 - DNA, 201 bp, Homo sapiens; identical to SEQ ID NO: 46407

SEQ ID NO: 49456 - DNA, 201 bp, Homo sapiens; identical to SEQ ID NO: 45074

SEQ ID NO: 49457 - DNA, 201 bp, Homo sapiens; identical to SEQ ID NO: 46412

SEQ ID NO: 49458 - DNA, 201 bp, Homo sapiens; identical to SEQ ID NO: 46413

SEQ ID NO: 49459 - DNA, 201 bp, Homo sapiens; identical to SEQ ID NO: 45285

SEQ ID NO: 49460 - DNA, 201 bp, Homo sapiens; identical to SEQ ID NO: 45289

SEQ ID NO: 49461 - DNA, 201 bp, Homo sapiens; identical to SEQ ID NO: 45291

SEQ ID NO: 49462 - DNA, 201 bp, Homo sapiens; identical to SEQ ID NO: 44583

SEQ ID NO: 49463 - DNA, 201 bp, Homo sapiens; identical to SEQ ID NO: 45076

SEQ ID NO: 49464 - DNA, 201 bp, Homo sapiens; identical to SEQ ID NO: 44281

SEQ ID NO: 49465 - DNA, 201 bp, Homo sapiens; identical to SEQ ID NO: 44282

SEQ ID NO: 49466 - DNA, 201 bp, Homo sapiens; identical to SEQ ID NO: 45081

SEQ ID NO: 49467 - DNA, 201 bp, Homo sapiens; identical to SEQ ID NO: 44283

SEQ ID NO: 49468 - DNA, 201 bp, Homo sapiens; identical to SEQ ID NO: 45083

SEQ ID NO: 49469 - DNA, 201 bp, Homo sapiens; identical to SEQ ID NO: 44025

SEQ ID NO: 49470 - DNA, 201 bp, Homo sapiens; identical to SEQ ID NO: 45085

SEQ ID NO: 49471 - DNA, 201 bp, Homo sapiens; identical to SEQ ID NO: 44408

SEQ ID NO: 49472 - DNA, 201 bp, Homo sapiens; identical to SEQ ID NO: 45088

SEQ ID NO: 49473 - DNA, 201 bp, Homo sapiens; identical to SEQ ID NO: 44284

SEQ ID NO: 49474 - DNA, 201 bp, Homo sapiens; identical to SEQ ID NO: 45090

SEQ ID NO: 49475 - DNA, 201 bp, Homo sapiens; identical to SEQ ID NO: 45092

SEQ ID NO: 49476 - DNA, 201 bp, Homo sapiens; identical to SEQ ID NO: 45094

SEQ ID NO: 49477 - DNA, 201 bp, Homo sapiens; identical to SEQ ID NO: 45096

SEQ ID NO: 49478 - DNA, 201 bp, Homo sapiens; identical to SEQ ID NO: 45727

SEQ ID NO: 49479 - DNA, 201 bp, Homo sapiens; identical to SEQ ID NO: 45728

SEQ ID NO: 49480 - DNA, 201 bp, Homo sapiens; identical to SEQ ID NO: 46061

SEQ ID NO: 49481 - DNA, 201 bp, Homo sapiens; identical to SEQ ID NO: 44609

SEQ ID NO: 49482 - DNA, 201 bp, Homo sapiens; identical to SEQ ID NO: 46442

SEQ ID NO: 49483 - DNA, 201 bp, Homo sapiens; identical to SEQ ID NO: 44610

SEQ ID NO: 49484 - DNA, 201 bp, Homo sapiens; identical to SEQ ID NO: 44611

SEQ ID NO: 49485 - DNA, 201 bp, Homo sapiens; identical to SEQ ID NO: 45106

SEQ ID NO: 49486 - DNA, 201 bp, Homo sapiens; identical to SEQ ID NO: 45107

SEQ ID NO: 49487 - DNA, 201 bp, Homo sapiens; identical to SEQ ID NO: 45108

SEQ ID NO: 49488 - DNA, 201 bp, Homo sapiens; identical to SEQ ID NO: 45109

SEQ ID NO: 49489 - DNA, 201 bp, Homo sapiens; identical to SEQ ID NO: 45110

SEQ ID NO: 49490 - DNA, 201 bp, Homo sapiens; identical to SEQ ID NO: 45111

SEQ ID NO: 49491 - DNA, 201 bp, Homo sapiens; identical to SEQ ID NO: 45112
  misc_feature (1)...(201): n = A,T,C or G, or insertion/deletion polymorphism (see Tables 1-2)

SEQ ID NO: 49492 - DNA, 201 bp, Homo sapiens; identical to SEQ ID NO: 45113

SEQ ID NO: 49493 - DNA, 201 bp, Homo sapiens; identical to SEQ ID NO: 45115

SEQ ID NO: 49494 - DNA, 201 bp, Homo sapiens; identical to SEQ ID NO: 45117

SEQ ID NO: 49495 - DNA, 201 bp, Homo sapiens; identical to SEQ ID NO: 45116

SEQ ID NO: 49496 - DNA, 201 bp, Homo sapiens; identical to SEQ ID NO: 45122

SEQ ID NO: 49497 - DNA, 201 bp, Homo sapiens; identical to SEQ ID NO: 46240

SEQ ID NO: 49498 - DNA, 201 bp, Homo sapiens; identical to SEQ ID NO: 46244

SEQ ID NO: 49499 - DNA, 201 bp, Homo sapiens; identical to SEQ ID NO: 46246

SEQ ID NO: 49500 - DNA, 201 bp, Homo sapiens; identical to SEQ ID NO: 46245

SEQ ID NO: 49501 - DNA, 201 bp, Homo sapiens; identical to SEQ ID NO: 44646

SEQ ID NO: 49502 - DNA, 201 bp, Homo sapiens; identical to SEQ ID NO: 46249

SEQ ID NO: 49503 - DNA, 201 bp, Homo sapiens; identical to SEQ ID NO: 44648

SEQ ID NO: 49504 - DNA, 201 bp, Homo sapiens; identical to SEQ ID NO: 46251

SEQ ID NO: 49505 - DNA, 201 bp, Homo sapiens; identical to SEQ ID NO: 46255

SEQ ID NO: 49506 - DNA, 201 bp, Homo sapiens; identical to SEQ ID NO: 46258

SEQ ID NO: 49507 - DNA, 201 bp, Homo sapiens; identical to SEQ ID NO: 45547

SEQ ID NO: 49508 - DNA, 201 bp, Homo sapiens; identical to SEQ ID NO: 46470

SEQ ID NO: 49509 - DNA, 201 bp, Homo sapiens; identical to SEQ ID NO: 44322

SEQ ID NO: 49510 - DNA, 201 bp, Homo sapiens; identical to SEQ ID NO: 44323

SEQ ID NO: 49511 - DNA, 201 bp, Homo sapiens; identical to SEQ ID NO: 44324

SEQ ID NO: 49512 - DNA, 201 bp, Homo sapiens; identical to SEQ ID NO: 45128

SEQ ID NO: 49513 - DNA, 201 bp, Homo sapiens; identical to SEQ ID NO: 45129

SEQ ID NO: 49514 - DNA, 201 bp, Homo sapiens; identical to SEQ ID NO: 44325

SEQ ID NO: 49515 - DNA, 201 bp, Homo sapiens; identical to SEQ ID NO: 45130

SEQ ID NO: 49516 - DNA, 201 bp, Homo sapiens; identical to SEQ ID NO: 44326

SEQ ID NO: 49517 - DNA, 201 bp, Homo sapiens; identical to SEQ ID NO: 45131

SEQ ID NO: 49518 - DNA, 201 bp, Homo sapiens; identical to SEQ ID NO: 44327

SEQ ID NO: 49519 - DNA, 201 bp, Homo sapiens; identical to SEQ ID NO: 45132

SEQ ID NO: 49520 - DNA, 201 bp, Homo sapiens; identical to SEQ ID NO: 45133

SEQ ID NO: 49521 - DNA, 201 bp, Homo sapiens; identical to SEQ ID NO: 46264

SEQ ID NO: 49522 - DNA, 201 bp, Homo sapiens; identical to SEQ ID NO: 46266

SEQ ID NO: 49523 - DNA, 201 bp, Homo sapiens; identical to SEQ ID NO: 46269

SEQ ID NO: 49524 - DNA, 201 bp, Homo sapiens; identical to SEQ ID NO: 46273

SEQ ID NO: 49525 - DNA, 201 bp, Homo sapiens; identical to SEQ ID NO: 46276

SEQ ID NO: 49526 - DNA, 201 bp, Homo sapiens; identical to SEQ ID NO: 46278

SEQ ID NO: 49527 - DNA, 201 bp, Homo sapiens; identical to SEQ ID NO: 45139

SEQ ID NO: 49528 - DNA, 201 bp, Homo sapiens; identical to SEQ ID NO: 46282

SEQ ID NO: 49529 - DNA, 201 bp, Homo sapiens; identical to SEQ ID NO: 46283

SEQ ID NO: 49530 - DNA, 201 bp, Homo sapiens; identical to SEQ ID NO: 44346

SEQ ID NO: 49531 - DNA, 201 bp, Homo sapiens; identical to SEQ ID NO: 44347

SEQ ID NO: 49532 - DNA, 201 bp, Homo sapiens; identical to SEQ ID NO: 45142

SEQ ID NO: 49533 - DNA, 201 bp, Homo sapiens; identical to SEQ ID NO: 45143

SEQ ID NO: 49534 - DNA, 201 bp, Homo sapiens; identical to SEQ ID NO: 45144

SEQ ID NO: 49535 - DNA, 201 bp, Homo sapiens; identical to SEQ ID NO: 45145

SEQ ID NO: 49536 - DNA, 201 bp, Homo sapiens; identical to SEQ ID NO: 44350

SEQ ID NO: 49537 - DNA, 201 bp, Homo sapiens; identical to SEQ ID NO: 45146

SEQ ID NO: 49538 - DNA, 201 bp, Homo sapiens; identical to SEQ ID NO: 45147

SEQ ID NO: 49539 - DNA, 201 bp, Homo sapiens; identical to SEQ ID NO: 45148

SEQ ID NO: 49540 - DNA, 201 bp, Homo sapiens; identical to SEQ ID NO: 45149

SEQ ID NO: 49541 - DNA, 201 bp, Homo sapiens; identical to SEQ ID NO: 45151

SEQ ID NO: 49542 - DNA, 201 bp, Homo sapiens; identical to SEQ ID NO: 46524

SEQ ID NO: 49543 - DNA, 201 bp, Homo sapiens; identical to SEQ ID NO: 46527

SEQ ID NO: 49544 - DNA, 201 bp, Homo sapiens; identical to SEQ ID NO: 45153

SEQ ID NO: 49545 - DNA, 201 bp, Homo sapiens; identical to SEQ ID NO: 45159

SEQ ID NO: 49546 - DNA, 201 bp, Homo sapiens; identical to SEQ ID NO: 46298

SEQ ID NO: 49547 - DNA, 201 bp, Homo sapiens; identical to SEQ ID NO: 46302

SEQ ID NO: 49548 - DNA, 201 bp, Homo sapiens; identical to SEQ ID NO: 46304

SEQ ID NO: 49549 - DNA, 201 bp, Homo sapiens; identical to SEQ ID NO: 46306

SEQ ID NO: 49550 - DNA, 201 bp, Homo sapiens; identical to SEQ ID NO: 46309

SEQ ID NO: 49551 - DNA, 201 bp, Homo sapiens; identical to SEQ ID NO: 44487

SEQ ID NO: 49552 - DNA, 201 bp, Homo sapiens; identical to SEQ ID NO: 46311

SEQ ID NO: 49553 - DNA, 201 bp, Homo sapiens; identical to SEQ ID NO: 46313

SEQ ID NO: 49554 - DNA, 201 bp, Homo sapiens; identical to SEQ ID NO: 46315

SEQ ID NO: 49555 - DNA, 201 bp, Homo sapiens; identical to SEQ ID NO: 46317

SEQ ID NO: 49556 - DNA, 201 bp, Homo sapiens; identical to SEQ ID NO: 46318

SEQ ID NO: 49557 - DNA, 201 bp, Homo sapiens; identical to SEQ ID NO: 44365

SEQ ID NO: 49558 - DNA, 201 bp, Homo sapiens; identical to SEQ ID NO: 44367

SEQ ID NO: 49559 - DNA, 201 bp, Homo sapiens; identical to SEQ ID NO: 44369

SEQ ID NO: 49560 - DNA, 201 bp, Homo sapiens; identical to SEQ ID NO: 45172

SEQ ID NO: 49561 - DNA, 201 bp, Homo sapiens; identical to SEQ ID NO: 44370

SEQ ID NO: 49562 - DNA, 201 bp, Homo sapiens; identical to SEQ ID NO: 45174

SEQ ID NO: 49563 - DNA, 201 bp, Homo sapiens; identical to SEQ ID NO: 44371

SEQ ID NO: 49564 - DNA, 201 bp, Homo sapiens; identical to SEQ ID NO: 45176

SEQ ID NO: 49565 - DNA, 201 bp, Homo sapiens; identical to SEQ ID NO: 44372

SEQ ID NO: 49566 - DNA, 201 bp, Homo sapiens; identical to SEQ ID NO: 45178

SEQ ID NO: 49567 - DNA, 201 bp, Homo sapiens; identical to SEQ ID NO: 46559

SEQ ID NO: 49568 - DNA, 201 bp, Homo sapiens; identical to SEQ ID NO: 45179

SEQ ID NO: 49569 - DNA, 201 bp, Homo sapiens; identical to SEQ ID NO: 46560

SEQ ID NO: 49570 - DNA, 201 bp, Homo sapiens; identical to SEQ ID NO: 45180

SEQ ID NO: 49571 - DNA, 201 bp, Homo sapiens; identical to SEQ ID NO: 46563

SEQ ID NO: 49572 - DNA, 201 bp, Homo sapiens; identical to SEQ ID NO: 45181

SEQ ID NO: 49573 - DNA, 201 bp, Homo sapiens; identical to SEQ ID NO: 44373

SEQ ID NO: 49574 - DNA, 201 bp, Homo sapiens
tccctcctcttggatttgaccaaagtgcggcagggtcaggtgagcgaggaagagccttcccacctggcctggcctggccgtgaggcacagctcctgctgcrtggcctgtctcacccgtggtgttagtaatggtttcccccactcacttttcacacccagaggtgatcacggatccccacagctcactagtccttaggtgct

SEQ ID NO: 49575 - DNA, 201 bp, Homo sapiens
ccatagtccttaactactgcacaactgcaaccaaccactttacagggtttcccctctctgtcaattgtacaggggccttcccattcccctagtttcttgtygtcgtcacccttgattaggttgatttggtgttcagcacaatgggccttcaccaacttgacatacataggcttatcacagttggatgcaagcacacaaagg

SEQ ID NO: 49576 - DNA, 201 bp, Homo sapiens
tattgaccagtgtcagctacaaaggatcagtatctgtgccctgcaggttgttgtatacggtagggccccgccaccctgctctgcagtggaacacagaaggycaggcattctctcagatgcaaataacctgatgtgggtatcatggactaggagtagttttagtagacaatgaatactgctatctaatgacctccagaaaca

SEQ ID NO: 49577 - DNA, 201 bp, Homo sapiens
agaaccttatagggctactctccctacaggtggagaagagtacccaagaaggacaagcttggaatggggccccctccccaggctggagatcagacattgtyggagaaggtatcattgcagccccctacatagcagagagatttgctgagttgcatagtctagagctggttgcaattattggacaagcaggaaacaaacctc

SEQ ID NO: 49578 - DNA, 201 bp, Homo sapiens
gaaatgtcctcgtgcagcacttgactgtagttaagatggctggctctttccactctgatttcccctccatctcattgctcctcgtgcccctcatgttggartggtcataggcatttttaggatctggcttgggatgagacagctttatgtagtttacagtcacttctgtgtgtggttgcattaccgctagtcttccagcgt

SEQ ID NO: 49579 - DNA, 201 bp, Homo sapiens
acattgttggagaaggtatcattgcagccccctacatagcagagagatttgctgagttgcatagtctagagctggttgcaattattggacaagcaggaaamaaacctccacagcccatgcgagccacactgctgggttgagtgtatgagcatgtagaatgattgggtctccagtgcggacagaaggcatggatcgcgtggt

SEQ ID NO: 49580 - DNA, 201 bp, Homo sapiens
gaaggacaagcttggaatggggccccctccccaggctggagatcagacattgttggagaaggtatcattgcagccccctacatagcagagagatttgctgrgttgcatagtctagagctggttgcaattattggacaagcaggaaacaaacctccacagcccatgcgagccacactgctgggttgagtgtatgagcatgta

SEQ ID NO: 49581 - DNA, 201 bp, Homo sapiens
agcaagctaggccagcagatttcttgcagaaaatttcatgggtaaagatgagttcactgtcaaaaaatatcatttgagaagcaccaccatgaaagggagaygtccacctgaggaaacataataatcatagctaatatttactgagcatttatgtgtcaggcactattgcaaacataaagtgggactattttatgtttgcaa

SEQ ID NO: 49582 - DNA, 201 bp, Homo sapiens
agcaggaactgcatgtgagtcaaatgccatgtgctttccattgtttcagccatcacagtccccaggggtaggtacattcacaccccaaagttcacttctaytatgtcagccagggaagcagtatactagacattagcagtgtgggctctggagtcagggggccagtttcaaatcctgcctccatctctcactaactgagag

SEQ ID NO: 49583 - DNA, 201 bp, Homo sapiens
attaccgctagtcttccagcgtaggaagggcttccaggaatattgttctgattcagccagcagggtcggagatgatatctaaataataaacatttccccarcacctgttttcagaaatatgtcagcagtggaggagaaacaagtatggagccagaaactagtctatggaaaactctctcccccatcatatgtatagagttt

SEQ ID NO: 49584 - DNA, 201 bp, Homo sapiens
ctagtcttccagcgtaggaagggcttccaggaatattgttctgattcagccagcagggtcggagatgatatctaaataataaacatttccccagcacctgytttcagaaatatgtcagcagtggaggagaaacaagtatggagccagaaactagtctatggaaaactctctcccccatcatatgtatagagttttaagcat

SEQ ID NO: 49585 - DNA, 201 bp, Homo sapiens
ttaacatttcccacttttattgtagtttgtcaatttctccctctaatttagtctgattttgctttatactattttttttggttttttgatttttgtttaaraggcagtgtctcaccatgtttcccaggctggagtacagtagctattcacaggtgtgattataactgcagcctcaaactcctgacctcaagccatcctcct

SEQ ID NO: 49586 - DNA, 201 bp, Homo sapiens
tttcctagcaacctgcaaatattctggatctcataatgtgtcatatatccctctccccatcagcagctagggtcttagagccaaatcagtgaacaaccatraggccacacaaagaggactaatcacagttggtgaggtagaatcagagcctggggtataggcaagacaccgtagtggctcgatctgccatgggcagatcca

SEQ ID NO: 49587 - DNA, 201 bp, Homo sapiens
agcttggaatggggccccctccccaggctggagatcagacattgttggagaaggtatcattgcagccccctacatagcagagagatttgctgagttgcatrgtctagagctggttgcaattattggacaagcaggaaacaaacctccacagcccatgcgagccacactgctgggttgagtgtatgagcatgtagaatgatt

SEQ ID NO: 49588 - DNA, 201 bp, Homo sapiens
aatttccagtgggtaaaacaaagatgtgtcctggatccttttatttttaacttgaaaccatattgagatatcccattagtttgctttcctactgacccacrtaactgttaggcacagtgcaggctattgaccagtgtcagctacaaaggatcagtatctgtgccctgcaggttgttgtatacggtagggccccgccaccct

SEQ ID NO: 49589 - DNA, 201 bp, Homo sapiens
ccacttgttattttactgctataccagagagaatgcagctcaagctaaacaggcaagagggaatgtctaaggtgattctgcagagctgccaaccctatgcrgcaactgacctccatctccaacacatggtagtaacagctacttaaatggattgtgttctatgttctaggcaatgacctgagagtttttatatttttgttt

SEQ ID NO: 49590 - DNA, 201 bp, Homo sapiens
gcctactatatgcctaggctgcctggtatagcctatcgcttctaggctacaagccattgcagcgtgttacagtacagaatatgctaggcaattgtaacacmatggcaagtacttgtctatctaaacatgcctaaccacagaaaaggtacgggaaaaatatggtatgataatctgaagggaccatcatggtccagctcatct

SEQ ID NO: 49591 - DNA, 201 bp, Homo sapiens
actaggagtagttttagtagacaatgaatactgctatctaatgacctccagaaacaagggctaccaaatctggatctgaaataatcattttaatggaaatmccccaaatttagggagatttataggaaataatgataaacaataaatcatttagttactttgggtgcacacttcacaaccagttttaacagggcttattgc

SEQ ID NO: 49592 - DNA, 201 bp, Homo sapiens
tgcactccagcccgggtgacagagggagactctgtctcaaaaaaaaaaaaaaaaaaaagaaaagaaaagaaaaagtaatcgctttacagcaatttctgtgkagacatttgtatcaatgttttccttatggattctacattttgtgttatgtgaattcctagcttatgaatgctttgatcagttttcttatagtactttcat

SEQ ID NO: 49593 - DNA, 201 bp, Homo sapiens
acttctagtcctaaaatatcccattaaagggatgaagtagggttctggaggtcccttgatgagctaggtccctttttattatgtgatggtctggagggacmcttggagagctggggtagcaagtaggagtaagcccagaaattttgatatttttactgctgatacagccacaccagcatgtaccagctgaatagcaactac

SEQ ID NO: 49594 - DNA, 201 bp, Homo sapiens
tcttccccagaaaaatactgctcaagtgggggcttcctcacagaccagaaaacccaacaagctggccccccatcctgcagtgcctgcatttgtgaagaacrcttgtccctccagaccgcgtgaacggcagacacacttcttaagacctcggccagaagacagaatggttgctctgaaacccatcgagattgttctgcctcc

SEQ ID NO: 49595 - DNA, 201 bp, Homo sapiens
cattcagtcttactgccttcaaataacaaaatatttatctttaccaatttaatctgtttttagaatatatgctttactgtaattttaaacaggttagcaakcataatttaccaattttgtaatgccgaagtgaaataattatgtatatttgtaattgtagtttcagctttcctgtttcttctcttagatttcttactcgat

SEQ ID NO: 49596 - DNA, 201 bp, Homo sapiens
tatagtattccatggtgtatatgtgccacattttcttaatccagtctatcattgttggacatttgggttggttccaagtctttgctattgtgactagtgcygcaataaacatacgtgtgcatgtgtctttataacagcatgatttatagtcctttgggtatatacccagtaatgggatggctgggtcaaatggtattttta

SEQ ID NO: 49597 - DNA, 201 bp, Homo sapiens
actgagaatgatgatttccaatttcatccatgtccctacaaaggacatgaactcatcattttttatggctgtatagtattccatggtgtatatgtgccacrttttcttaatccagtctatcattgttggacatttgggttggttccaagtctttgctattgtgactagtgccgcaataaacatacgtgtgcatgtgtcttt

SEQ ID NO: 49598 - DNA, 201 bp, Homo sapiens
aaagactgtgagcaaatttccatctaaatattaataattctgaagaagaggcaaaactgttgaatgcaagcgatacctattgttgaagaaacccacaaatwtctgattctaagatcaggggatacaacaaaatctacaagtcatttcaaatagcacacaggaatcaaactttggtaaatcatttctgaggcacaattaaat

SEQ ID NO: 49599 - DNA, 201 bp, Homo sapiens
taggtccctttttattatgtgatggtctggagggacacttggagagctggggtagcaagtaggagtaagcccagaaattttgatatttttactgctgatayagccacaccagcatgtaccagctgaatagcaactacatggatgtgtatgtttgtttgtttgtttttttgtatcacaccataaacttttttattgaaacct

SEQ ID NO: 49600 - DNA, 201 bp, Homo sapiens
ttctcctttgtattttgaaaatggtagaaatataggacattttggataactgtgattaatgtacatatttacctgctttgataatggaaagcttttactgmcatattagtgactttgggaaggtcagtttttagtttgttaaacatttgttattcttggcatagttggttaaagatggagaatctgggatttataataaat

SEQ ID NO: 49601 - DNA, 201 bp, Homo sapiens
aaacataaaatttggcaactcttgagattatggcagtttatgttactggaagacatactgtaagtcaaaacaagttgtatttagtttcccataaggaaatrctgtcttaggtagtcaggtgtgtaatcaggggtttgactccagattttgatagaaccgattaaaagcccgatttgaagtcaaccacataaaagataatta

SEQ ID NO: 49602 - DNA, 201 bp, Homo sapiens
attctattccattgacgtttggctctttctatactaatatgacaatgctataaccactgtagttttgagtgggtttcttctcaaattttatatttttttttgttacataaaccccacccacaatccaaagatgcataatgaaatggttaacaatttccttcctacatcttgccacttctagtcctaaaatatcccattaaa

SEQ ID NO: 49603 - DNA, 201 bp, Homo sapiens
gactccatctcaaaaaaaaaaaaaaaaaaaaaaaatctgtgtgattctttttttctatcaggtatcaggttcataaatggggaagtttaagttttttttttgtttgtttttttaaaaaggcattcgctgaggcttatgagattggggactaaggcctaaaaactatttcttatttcttttagtataataaagagagtcttt

SEQ ID NO: 49604 - DNA, 201 bp, Homo sapiens
taattatgtatatttgtaattgtagtttcagctttcctgtttcttctcttagatttcttactcgatataatttttctgttgtcattgtgcctacccttaayaactcttctacagtccaaattttagtcaaactcttatttctcttagtgctaagtagagaacagagaggtgcaatcgcagagaaagcctagatctcttgat

SEQ ID NO: 49605 - DNA, 201 bp, Homo sapiens
gagcccaagaggttaaggctgtagtgagccgagatcgcatcactgcactccagcccgggtgacagagggagactctgtctcaaaaaaaaaaaaaaaaaaaagaaaagaaaagaaaaagtaatcgctttacagcaatttctgtgtagacatttgtatcaatgttttccttatggattctacattttgtgttatgtgaattcc

SEQ ID NO: 49606 - DNA, 201 bp, Homo sapiens
ctgcttgaacttgggaggtggaggttgcagtgagctgagatcgcaccagcctgggcgacaaagcaagactccatctcaaaaaaaaaaaaaaaaaaaaaaaatctgtgtgattctttttttctatcaggtatcaggttcataaatggggaagtttaagttttttttttgtttgtttttttaaaaaggcattcgctgaggctt

SEQ ID NO: 49607 - DNA, 201 bp, Homo sapiens
tacaaattaaaaataccaaaaggtaactgtgctgagtccttgttagttgtgaaaataatttttaaatatttgagcacttattgtttacttattatgtgccwggcacctgctgcttactttatatgtatcattttatttagtaatcaccaaattttcttccttagcttccatgctatctttgaccagagcaacaagggggct

SEQ ID NO: 49608 - DNA, 201 bp, Homo sapiens
tgagcccaagaggttaaggctgtagtgagccgagatcgcatcactgcactccagcccgggtgacagagggagactctgtctcaaaaaaaaaaaaaaaaaaaagaaaagaaaagaaaaagtaatcgctttacagcaatttctgtgtagacatttgtatcaatgttttccttatggattctacattttgtgttatgtgaattc

SEQ ID NO: 49609 - DNA, 201 bp, Homo sapiens
tggtggctcacgcctgtaatcccagcactttgggaggctgaggtgggtgggccatttgagctcaggttttcaagaccagcctgggcaatgtggtgaaaccycatctctacaaaaaaatacaaaaattagccacgtgtggtggtggtgtactcctgtagtcccagctattcgggaggctgaggtgggaagattgcttgagcc

SEQ ID NO: 49610 - DNA, 201 bp, Homo sapiens
tgcatttgtgaagaacacttgtccctccagaccgcgtgaacggcagacacacttcttaagacctcggccagaagacagaatggttgctctgaaacccatcragattgttctgcctccagtctttatgccattttcaagtccccaagggatcagatctcggatgccaactcaacatttgtactgtcgttgggttgcacccaa

SEQ ID NO: 49611 - DNA, 201 bp, Homo sapiens
gtataaagacattctactttttaaaattatactttagtatgataaaattgcctgacttcttacaaatttaaccaagattccatagggcctttttctttttkttttttttttttttttttttttaaagatggaatcttgctctgtcatccaggctggagtgcagtggcaccatttcgattcactacaaactccgcctcccag

SEQ ID NO: 49612 - DNA, 201 bp, Homo sapiens
gagcaacaagggggctcgggcacccctaattcccttaccctctaagactcacagccttgccactattctctactttaaaatcgtaagtgggagccaggcgyggtggctcatgcctgtaatcccagtactttgggaggccaaacctggcggatcacttgaggccagcctggacaacatggtgaaaccccatctctactaaaa

SEQ ID NO: 49613 - DNA, 201 bp, Homo sapiens
gccattccttgctgcttgatagtgggtgtacttttgggaccctcctctcaacatagccttctggtgggttttccagccttaatagtgttatccacggcagygagctcacttctctgtcctcttgttccttcttctactgcttgccatctgcagcctggcattgcttcctcaccaagtgtgagccattgtgtgtttgttttc

SEQ ID NO: 49614 - DNA, 201 bp, Homo sapiens
tcagctgggtgtggtggcacatgcctataatcccagctactcagaaggctgaggcaggagaactgcttgaacttgggaggtggaggttgcagtgagctgaratcgcaccagcctgggcgacaaagcaagactccatctcaaaaaaaaaaaaaaaaaaaaaaaatctgtgtgattctttttttctatcaggtatcaggttca

SEQ ID NO: 49615 - DNA, 201 bp, Homo sapiens
ctcactatccagaaaagaggaaaagcctaaagatgacacaccttcctccctactcaggcctcctcggcgatggctttgattgtcttgtgttttttataggrgccaaagagcagttgattttttttcaaagtctagtatttctctgaagattctacatctctacacaagatattcattcttttggtcacctagggatcttct

SEQ ID NO: 49616 - DNA, 201 bp, Homo sapiens
ctgcctccagtctttatgccattttcaagtccccaagggatcagatctcggatgccaactcaacatttgtactgtcgttgggttgcacccaaggcacttgkgcccacctgccttcccacacactcactatccagaaaagaggaaaagcctaaagatgacacaccttcctccctactcaggcctcctcggcgatggctttga

SEQ ID NO: 49617 - DNA, 201 bp, Homo sapiens
taatcccagtactttgggaggccaaacctggcggatcacttgaggccagcctggacaacatggtgaaaccccatctctactaaaaatacaaaaattagccrggcgtgttggcgcatgcctgtagtcccagctacttgggaggctgagatatgagaatcacttgttatagtgagctgagattgcaccactgcactccagcct

SEQ ID NO: 49618 - DNA, 201 bp, Homo sapiens
attgtggttttgatttgcatttctctgatggccagtgatgatgagctttttttcatgtgtatgtttatattatgttatagatatacatcaagtataggtarctattcctattttaataagctttttgagatgtaattcacatactatgcaattcaccattttaaagtgtacaattcagtgccttaaaatattaatacattc

SEQ ID NO: 49619 - DNA, 201 bp, Homo sapiens
tttctcctttgtattttgaaaatggtagaaatataggacattttggataactgtgattaatgtacatatttacctgctttgataatggaaagcttttactrccatattagtgactttgggaaggtcagtttttagtttgttaaacatttgttattcttggcatagttggttaaagatggagaatctgggatttataataaa

SEQ ID NO: 49620 - DNA, 201 bp, Homo sapiens
accacacccggctaatttttgcatttttagcagagacggggtttcaccatgttggccaggctggtctcgaactcctggcctcaagtgatttgcctgcctcrgcctcccaaagtgctgggattacaggcgtaagccacggcacctggccaggacacaatgattaataaaagatttcctgatagtttaactcatgtggaatag

SEQ ID NO: 49621 - DNA, 201 bp, Homo sapiens
agattattctcccctattgaatggtcttggcacccttgttgaaaatcagttagttaatcccagcctgggcaacatagagagaccccatctccacaaaaaawcagccaggtgtggtggtgcctacctgtagtcctagctactcaggaggtcaaggctgtagtgagctgtgattgggagacagagcaaaagcctgtctaaaac

SEQ ID NO: 49622 - DNA, 201 bp, Homo sapiens
aagccagtgctaatctatcagagactgtaacaaaaccacctcttccccagaaaaatactgctcaagtgggggcttcctcacagaccagaaaacccaacaarctggccccccatcctgcagtgcctgcatttgtgaagaacacttgtccctccagaccgcgtgaacggcagacacacttcttaagacctcggccagaagaca

SEQ ID NO: 49623 - DNA, 201 bp, Homo sapiens
cagctaacacatgcaatgaaatgtaaggttgtcataggcaccatcttgttaaaataaggtgtacattttagaaatattagtctttcacgatctattataaycaagcaatgaagtgtgagccatgagcacattttccagaacattcagtcttactgccttcaaataacaaaatatttatctttaccaatttaatctgttttt

SEQ ID NO: 49624 - DNA, 201 bp, Homo sapiens
gcacctgctgcttactttatatgtatcattttatttagtaatcaccaaattttcttccttagcttccatgctatctttgaccagagcaacaagggggctcrggcacccctaattcccttaccctctaagactcacagccttgccactattctctactttaaaatcgtaagtgggagccaggcgtggtggctcatgcctgta

SEQ ID NO: 49625 - DNA, 201 bp, Homo sapiens
ttaacacagcaattggagtgatcttgttaaaacccatcataacccaagtaaaaacctaagcccttccggtggcccacaagtccctgtactatctggggctsagaccatgctttctgacttcgacttactactctctcttcattccctctgctctgatcaaaccggccccttcactttcctggaacataccagcaccatgtt

SEQ ID NO: 49626 - DNA, 201 bp, Homo sapiens
cgatattgtcaaattactaccaagacattcactcttataaacctgttttcccacagcttcagaaatgctgagcttcatcagacttaaaatctttactcacytgtggggtgaaaacatgagatgtcgttactgattgtattttcatttctctattactgaggttgagtatgcttcctgtttactgactggtcagtgtactgt

SEQ ID NO: 49627 - DNA, 201 bp, Homo sapiens
ctagagtgcagtagcacgatctcagctcactgcaacttccacctcctgggttcaagcagttctcttgcctcagcctcccaagtagctgggattacagacamgtggtacttcacctggctaatttttgtatttttaatagagacggagtttcaccatcttggccaggctggtcttgaactcctgacctcaagtgatccacct

SEQ ID NO: 49628 - DNA, 201 bp, Homo sapiens
ggagactaaagtaagagaatcacttgagcctgggaggtggaggttgcagtgagcagagatcacacctctgcactccagcctgggtgacagagtgaggctcygtctcaaaaataaataaataaataaataaataaataaataaattaattaattaataataataaaaagaagactgggtattcctgatgtgagtcagtttgt

SEQ ID NO: 49629 - DNA, 201 bp, Homo sapiens
ttatttcaccaatgaggcaaatccaggagtcattaaaattgggctatccacttgaactcatggacgatcctaaagagctcaacctccactaggcttccccrtagagtaattggaatataaacaatctctgaactcattcatccattcaacaagtattaagagttctctctatgtgacgagcattgggctgggcttggggaa

SEQ ID NO: 49630 - DNA, 201 bp, Homo sapiens
tcacctgatgacacatttctcagaacatatttccattgctaaatgatgcatgactatgtatacacacattaatgtaaaaatacatatatatctatatgctyatatacatttatacatacacacatgcattcctttgttctccaaatatctgattactctcccttctgggaacataggagacttaatgtctcccaatcccct

SEQ ID NO: 49631 - DNA, 201 bp, Homo sapiens
ctgagggtctaagaaatgaaatggtttgttggaattcctagcaatcagtgagacagctgaggctagactcagtctttcatctcctctttccttctgcttartcagagggttttatgattttctgtccagcaaattagactatgtgtgaaatgtttgagaggttttgagagctcaaactgaggaaggaaacaaagatgagta

SEQ ID NO: 49632 - DNA, 201 bp, Homo sapiens
catgtgtcacttctggattagaacatttaattggcaggacacaccccttcaatcttttttacctctgccatagtgactagcaacatttagatcagtggttrcttgatcagctttggtcccaagtaagggaatttagaacagagctctcagctgcccctcagtgtactgatagtgtgaacaaggcagaaacctttgtcacca

SEQ ID NO: 49633 - DNA, 201 bp, Homo sapiens
tttggcaaataagctaggataagatttttgagttaacctgagaattttccatgcttcacgtacacatacctccacatttcttatgtatcatgggaaccttctacttatttcaaggcagcaactagggcaattggagctcactgcctcaaagaagggaggccacagccaaacaaaagacaacaaaggcatcaattctcaatc

SEQ ID NO: 49634 - DNA, 201 bp, Homo sapiens
agtctcaggactgctttccccacatggatttctataaggtctcttcaacagacctaccctgtttctaatatggaggctcggggttcctaacagcaggaaaraagaagctgctaggtcctgaggtttacgcctatgactggcacagcatcacttcctctgcagtctactagttaaagcatgtcacaggacaagtccacattc

SEQ ID NO: 49635 - DNA, 201 bp, Homo sapiens
gaaggttttttttttttaatcatgaataagtgtggaattttgtcaaattcttatctgatttgattgatgcgattatggttgttgttgttttttttttttttagcctgttaatacagtggattacactgactagtttttgagtactgagacagccttacactctctggaataatttcagctgctcatagtgtgtttataaat

SEQ ID NO: 49636 - DNA, 201 bp, Homo sapiens
attcacacgtgcacacatgcacacacacactcatacacgcacacacacatccaagcacacacacacacgggcttctaaaacctaggcttcaagaaaagttyttttctattttttggaacgaaaccctttgttcacaatcagaacatattataaatgtaggcttagatttagtctaagctgctccctcctgaaaaagctgat

SEQ ID NO: 49637 - DNA, 201 bp, Homo sapiens
gtgtctagattaagagagggtgttattctcgcctcctggctactggatatcttcattttcatttaaaatagtttcttttatataaacattcacaaaaaatktatgaaaataagaaaaactcatttaaagtccaactacctatacataataactgttaatgaattaatgtatttctgtattcctgttctctatctgtagatt

SEQ ID NO: 49638 - DNA, 201 bp, Homo sapiens
tgtagggcagtcactgccttgggagtccttgaaggcagcgattaatcggcccgcaaaatgctgggcagaggaagcgtggaaggtggtatctgcaacatacyccctggagctctaatgcatgttattttccctatacaaagaatcagttgcttatttagaaatataaatatttttaaacccaagtatagcagacagctaaga

SEQ ID NO: 49639 - DNA, 201 bp, Homo sapiens
gtaatttttgttaaacttaggactaaaagactcaacgaatgtatgtgagtaaccaatttcttttatgcctctctaagtcaaatatgttcttttggatggasagaaaaaacacatttactatcaagaccatgtttcccaagggttgccactatcaatgcagaggtacagtcaaagcctcacaccaggaagctaatgggtcca

SEQ ID NO: 49640 - DNA, 201 bp, Homo sapiens
tgtgtttaatgagccctctaaggtgattcaaatgcaagttacatagcgatccagagactctaattaatttagtttagggtaggaacctgttattgagatgygttagacataatctcccaggtaaatctaattttgagccaggattaaggacctcaggtttagatcctctcatccaaaaaggatttattgtgcatatacaat

SEQ ID NO: 49641 - DNA, 201 bp, Homo sapiens
ggtttcagaaccagcacaaatttgagctctgcctattttcaatggtgtttacaaggctgcaggtatttggcaaataagctaggataagatttttgagttawcctgagaattttccatgcttcacgtacacatacctccacatttcttatgtatcatgggaaccttctacttatttcaaggcagcaactagggcaattggag

SEQ ID NO: 49642 - DNA, 201 bp, Homo sapiens
aacagtaatatctttttttttaataattttgtgagacttaaataagtcaatacgtgtaaagaaattgtagtgactggcataaattaagagcttaataaatrctagttatttttattacttatctagacttccctttagaatatgtatgagtgtgttttcagttttaaatggaatatttgtaccatgttaggtgggggcatt

SEQ ID NO: 49643 - DNA, 201 bp, Homo sapiens
gttttttatgccaccaattaaaatgcatttcctccactgcgtccatcacttgcacctgcaggacaaccagtagcctcaccatgagcctattccatctgatygctcccttgtccattggggcatgttgctacaaatccaaaaagtgttgccaaggaagaaagtgagagttgcatctgtactggaaactttctagtatgctcc

SEQ ID NO: 49644 - DNA, 201 bp, Homo sapiens
ggcctcgagctcctgggctcaagtgatccttctgcctcagcttcctgagtatctgggattacagatatgaaccaccatgcccagcactggccatctttttsagcttggagggagcacaaatgaaagaggctgttgctgtagcccatggaataaatagtggtagcttaagcaatggaagtgactgtgggaatgagggaatgg

SEQ ID NO: 49645 - DNA, 201 bp, Homo sapiens
ataacttttggcaactaataacactccattgtgcctctgtttcttcatatgtaaacctgggataaaacagtaatatctttttttttaataattttgtgagrcttaaataagtcaatacgtgtaaagaaattgtagtgactggcataaattaagagcttaataaatgctagttatttttattacttatctagacttcccttt

SEQ ID NO: 49646 - DNA, 201 bp, Homo sapiens
tagtcacgtcctgcctcctccctgagatactccagcccagcattccagaaggaacagggtcaggagttcacacctccaagaaacctcagtgcagatcagcrtctaacagggagatcagatagacaaagcaagggcccgtttctgccctctacatactccatagaaaacgagagattttctacaaacccaaaagcataagat

SEQ ID NO: 49647 - DNA, 201 bp, Homo sapiens
gcctgtccagcatctcttctgctaacagaaccactcttttctcttgagaaaatattcttcctattttcagactgtgtgttttagcttgggctaatttccarttcttggctttgagtttgggcacttggccaggcacgaccaatcattgtgttgtgtcctctctatccacagtgattggtttaggaatggtcatgtggctcc

SEQ ID NO: 49648 - DNA, 201 bp, Homo sapiens
tgaaggttaatcagattcaaatgaggtcatgagggtagagtcctcatagatgagcgcccttaaaagaagagaccagagagctttctctctctctcccaccmccatgtgaggacacagagagaaggtagccacctgcaacccaggaagagagccctcaccagaacctgaccatgctggcaccctgatcttggacttcagcct

SEQ ID NO: 49649 - DNA, 201 bp, Homo sapiens
gccttctcatctacaagacagggagcgttctaaccctctccaggttattgtaggggttgttgagaaaatccacaattgaaagcactcattactgctttatyaatgttgttgttagctgcatgaccttgggcaaattttacaacctttctggactctcatttcctcatttgtgtaatagaaacaattgtttcttacttagca

SEQ ID NO: 49650 - DNA, 201 bp, Homo sapiens
agcactgcaagtacctgtggcatgtgttataaacacagccacataggcccttaccagatctgctgaaacaggtcttcagaggcagaatctcagaacctacscttggaaaaggctaccttggtgattctgtggtgattctgcagcaagaattccaaatgaccgggactggggcatgaacactggggttagcatcagaaatgt

SEQ ID NO: 49651 - DNA, 201 bp, Homo sapiens
gcaaggaaaatggcaaaagaatgtggctgaacacaaagtcctggggagagacagaatgaggccggaagtcagttaggagacttaattaaaagaagaggccmgagtagtatgggaggaaaaccaggagaaaaggaatgttatggagaatcaggaatgaggagtggtcacaggcgttggtggccactgagaagccaactgagg

SEQ ID NO: 49652 - DNA, 201 bp, Homo sapiens
agatggggacctgggggtgctccttgggaagttaggagctagaatatctggcatttggtaataacctgatgcaggaggggttggggaaacaccccccaacrtaaaccaccaggtctctgccttcagtgacccatgagtgatccttcacagagatgagacagcagtagtagccagagaagactctgtcatccgttacagaca

SEQ ID NO: 49653 - DNA, 201 bp, Homo sapiens
gccagagccaactaagccctctcaagcaaaggctgctcctgctctcataccttccacctcgagaccacaccatggagctgggaatcctcctacctttctgytcccctgtccagaatactgtatgactctttccttatgcatctcctttaaggcagtcccattgctcttttcctaactccagtgatattatttatcaacctc

SEQ ID NO: 49654 - DNA, 201 bp, Homo sapiens
gccctgaagagaaagaactgggacagaggccatgtagatggggacctgggggtgctccttgggaagttaggagctagaatatctggcatttggtaataacytgatgcaggaggggttggggaaacaccccccaacataaaccaccaggtctctgccttcagtgacccatgagtgatccttcacagagatgagacagcagta

SEQ ID NO: 49655 - DNA, 201 bp, Homo sapiens
cacattcatacgttgaaaccctaaattccaatgtgatggtatttgcaggtgggtcctttgggaagtgattaggtcatgatggtggcactctcattaatagkattggtgtccttttaagaagagtcccgagagttagttagctgtctttcctccatgtgaggatacaacaggaagttgacattctgcaacccagaagagggc

SEQ ID NO: 49656 - DNA, 201 bp, Homo sapiens
aactttctacttctctgtcaggcattaccaacctgaattgaaacattcaccagctcagagaaacttcatgtgcttgaggaagacagcagcagaataattcktttctttgtttgaggtctttcttaaatattcattattgttcacctattagccattatatttagattttaaaaagttatttggtcttcttcatactttaaa

SEQ ID NO: 49657 - DNA, 201 bp, Homo sapiens
cttgtttcctctaaagatgagaagcagtttattatcatttccccaaaggcccacaacaaagggagaaggagcaagcttaagagtttgagatttagaacccrgctccttccaggctctttctgcaggcaaaagaagccgtatatgttcttgaagggtggattgttcagatacataataattcagactagaaacctatatgca

SEQ ID NO: 49658 - DNA, 201 bp, Homo sapiens
tctcttttgcttttgtataaattcttaaactagatgtggaggaaagaaggaaagcagaagtaaatatttgtggactgactactgagtgctgggcattgcamctgtctttctttacttctcatacaactgtgtaaagaagttaatagtccctctttataagtgagggctgcaaagctcagagagatgaagtaatttggtcaa

SEQ ID NO: 49659 - DNA, 201 bp, Homo sapiens
tttctataaggtctcttcaacagacctaccctgtttctaatatggaggctcggggttcctaacagcaggaaagaagaagctgctaggtcctgaggtttacscctatgactggcacagcatcacttcctctgcagtctactagttaaagcatgtcacaggacaagtccacattcaagggaagggactaaacaaagtgtggtt

SEQ ID NO: 49660 - DNA, 201 bp, Homo sapiens
tgtttcattctttagggaaaagtctatcccaatggcctcgtcatcttccttttcctctatggagggcattttaacactgttctccatgatctcttttgggwggatttcttctctgctcacctgcttggtgtcattcaatgccctggaaaaacatttatcgaagagacagatgagtatagtatatatatttctctttttaaa

SEQ ID NO: 49661 - DNA, 201 bp, Homo sapiens
actatggatgtgcaagatacatatacatgggcaaagctaagcatgaaacattgtgcttccaatggtgatcaactcaataggaataccctcataaaactattattcacctgttttttagtctctcttctcgttcaagttcaaattccttcagtgcagaaaccttgcctgactcttcatggctgtatccctacagcttaaaac

SEQ ID NO: 49662 - DNA, 201 bp, Homo sapiens
ttaaggaccaagtcttccccctccacccccctctgttctgtctagcattcctgcagtctggcatcttcacttagaaacattatctccccagatcttgcagkgtccctaagtggtagctgtagcatatcgccttggggagttcaaggcaccttatgaatattatctcattaaatcccccagccttttccccaggagtaaagc

SEQ ID NO: 49663 - DNA, 201 bp, Homo sapiens
tgtcccaaatcatcagaaacggctccttcatgaccaggtcttatcacacaacataaaggtcacaggaattgaagattatgctgttaatatatatatatatwtttttttcctttggagactcattctgttgcccaggctggaatgcagtggtgccatcatggctcattgcagcctcaaactcatgggctcaagtgatcgtcc

SEQ ID NO: 49664 - DNA, 201 bp, Homo sapiens
tagccaattgatctttggcaaagcaaacaaaacatgaagtggggaaaggacacccttttcaacaaatggtgctgggataattggctagccacatgtaggakaatgaaactggatcctcatctctcactttatacaaaaatcaactcaagatggattaaggacttaaatctaagaggagaaactataaaaattctagaagat

SEQ ID NO: 49665 - DNA, 201 bp, Homo sapiens
taccgtcctttaaaaaaaaaaaggcatgtaaggcgagaaaagctgtagtttttaaagtaaagatgtgctttcagaaatatttcctctattaaatttctacrtctactgtagacttgaactcttaagagctaatgctgtagtatttatttctgtgtccgagtacttacagcagtgtctggcacaggtaagggctatgaacaa

SEQ ID NO: 49666 - DNA, 201 bp, Homo sapiens
ttcttctgaaagttttatagttttagctcacacatttaagcttacggtccattttgattgttgtgtgtgtgtgtgtgtgtgtgtgtgtgtgtgtgtgtgtgtgtagagagtgctgtaaaggtcaagggtcataatctgcatacacaaatctaattgtttcagcaccatttaaaaaaaaaatcatcctttccctattacctt

SEQ ID NO: 49667 - DNA, 201 bp, Homo sapiens
attcttctgaaagttttatagttttagctcacacatttaagcttacggtccattttgattgttgtgtgtgtgtgtgtgtgtgtgtgtgtgtgtgtgtgtgtgtgtagagagtgctgtaaaggtcaagggtcataatctgcatacacaaatctaattgtttcagcaccatttaaaaaaaaaatcatcctttccctattacct

SEQ ID NO: 49668 - DNA, 201 bp, Homo sapiens
gtgcattgggtggataagaacctggtcagaaagacactaaagggatccatcagggccctgaagagaaagaactgggacagaggccatgtagatggggaccwgggggtgctccttgggaagttaggagctagaatatctggcatttggtaataacctgatgcaggaggggttggggaaacaccccccaacataaaccaccag

SEQ ID NO: 49669 - DNA, 201 bp, Homo sapiens
cctctggctgccggggaagcaaggtggaactgggacttattcagtggacagtgcaggaggagggagagggaggagtcaggggaagggagactcaggaggamaacctcgcacatgtttttcttaggaatgtcttaggaatgcttacttcaggttctcagggttgcaggatggctggttagttttaaaaagctaaaggtcttc

SEQ ID NO: 49670 - DNA, 201 bp, Homo sapiens
ggcacacctgggccgagaggagctggctcgactttccctaggaataaacacccactatctgcccccacttaagctaagaggcgccctcctcagcctgtggrtccaacagaaagatgtagctggcagggccgccctagtcgtgcagccggggagcggacgtggcagtacacagctgctgactttctcccccctcacgttaag

SEQ ID NO: 49671 - DNA, 201 bp, Homo sapiens
gtcatgcaagtgtaaatccagaagcaaattgtgatggtttgaatgcatcctcccaaaagcatgtgttgggaacttaatccccaatgaaacagtgttgaagrgtggagcctaatgggaggtgtttaggtcatgaggcctccatcctcatgaatagattaatgtcaattattaaaggactttatgctaggagttcaatctctg

SEQ ID NO: 49672 - DNA, 201 bp, Homo sapiens
gaatgcactttcaaatggggccagcaacaccttcccacaaggatttatcacaaacattccctagtcacttttgcttaggcaataatttcatcagttaaatragggaattgggtcacattctgggacaagcagcataaaactttcctcaattgcaccagactagcttattacacctatctacaatggatactttttcactaa

SEQ ID NO: 49673 - DNA, 201 bp, Homo sapiens
atcaggtgcaaacagaatgctctggaggaagaacaacagccagtggctgaagttcccaggcatgccacttaagcattcaggtccccattgtctttgaaggyaaagcagatttcaataagtgggaactgcagcaactctacatccaggtatacacacccacaggcacacctgggccgagaggagctggctcgactttcccta

SEQ ID NO: 49674 - DNA, 201 bp, Homo sapiens
tatccctaagcttgtcccactgtctagtctttttgatggccacttctacccagaactatcaacatgtggtatctccctattgccctgggcctctgaggccccagccctctgcccaattcatgatgctcctgcaagcagcatttctcaaactgaagcaaatatctaatcttccccaccatgtcttcaatggctttccattga

SEQ ID NO: 49675 - DNA, 201 bp, Homo sapiens
ccagatacaagattaatgtacacagatcagtagctcttccatacatcaacagcgaccagtggagaatcaaatcaagaacccaaccccttttaaaatagccrcaaaaaaataaagtacttaggaatatacctaacaaaggaggcaaaagacctctacaaggaaaactacaaaacactgctgaaagaaatcgtagacgacaca

SEQ ID NO: 49676 - DNA, 201 bp, Homo sapiens
tttctaacattttctggatttcctcagtgatttgcaagctaccgtgcaacaactagagaagaatcttctttctgatttgttctgtctgaaaatatcagccyggaggcttaaacactgtaataaaaaggtctgaggtagttacgtaaataagatacatgtgaataattatagaaagctttgtttgaaaaagatgagtaattt

SEQ ID NO: 49677 - DNA, 201 bp, Homo sapiens
gctataaacattcatggacagatttttgtgtcaacataagtcttcatttctctgggagaaatgccaaggagtacaattgctgggtcatatggtagttatasgtttcatttttaaagaaactgccaacgttgtccagaaaggctgtgtcattttacatttccaccagaaatatgtatttttctacatccttgctagcatttg

SEQ ID NO: 49678 - DNA, 201 bp, Homo sapiens
attacaaatcatgctgctataaagacacatgcacacgtatgtttattgtggcactattcacaacagcaaagacttggaaccaacccaaatgtccatcaatratagactggattaagaaaatgtggcacatatacaccatggaatactatgcagccataaaaaaggatgagttcatgtcctttgtagggacatggatgaagc

SEQ ID NO: 49679 - DNA, 201 bp, Homo sapiens
gtcactcagatgctgcccctcagccatggaataaaccctgcataatagtctgccttttgaaaacagacagacagacagacacacacacacacacacacacmtgcacacacacacacgcaaatattcaatccctggtgactcagtggcatgtatctggccctgattgtgcagacagttttacaggaagttgccaacacaatg

SEQ ID NO: 49680 - DNA, 201 bp, Homo sapiens
tcatgcctgtaatcccagcattttgagaagccggggcaaggggattacttgagcccaggagtttgagacctgcctgggcaatgtggtgagagccctaattytaccaaaactaaaaaaatgtgctgggtgtggtgggatgcacttgtggccccagctattccggaggctgaggtggaaggatcacttaagcttggaggttga

SEQ ID NO: 49681 - DNA, 201 bp, Homo sapiens
tgcattaaaaatggtagccctgggccgggtgcagtggctcacacctgtaatcccagcactttgggaggctgaggggggcagatcacaaggtcaggagatcracaccatcctggctaacacggtgaaaccccgtctctactaaaaatacaaaaaaattagccgggtgtggtggcgggcgcctgtagtcccagctacttggga

SEQ ID NO: 49682 - DNA, 201 bp, Homo sapiens
agggtttcaccatgttggccaggctggtctcgaactcccgaccttaggtgatccaccctcctcggcctcccaaagtgctgggattacaggtgtaagccacygcacctggccagcaaagcccataatcttttacttcataagcttcctccattttgttttgttttttttgtgtgtggggttttgttttgttttttttaaatc

SEQ ID NO: 49683 - DNA, 201 bp, Homo sapiens
tggagtgcagtggtgttatcttggctcactgcaaccttcgcctcccaggttcaagcgattcccctgcctcagcctcctgagaagctgagattacaggcatragccaccacatctgactaacttttgtattttttgtagaaacagggtttcaccatgttggccaggctggtctcgaactcccgaccttaggtgatccaccct

SEQ ID NO: 49684 - DNA, 201 bp, Homo sapiens
tgacctcccctcccacaatctagccgtcccccatcctagcggtcgacaaagtgtttatgttctttttgtactatgcactcatgagggacctgtgacatcartaagcagctagtcaggaatttggaatcctggatcctagctgtctttttttctgccataactgaccaccagaattagaatgagaagtggaatacaagatag

SEQ ID NO: 49685 - DNA, 201 bp, Homo sapiens
agttctgctttcttcacttcctcactggtattccttaaggcattctcaagaaaacatctgcacacaaattcaggcatttccccttagacttcatctctgayttctcccctggcttctagacctctatggacttggctcaggctccccatcaaaaagccaaggtggaaggccagcgaaacctgggctcctttacacttctta

SEQ ID NO: 49686 - DNA, 201 bp, Homo sapiens
tctttatggattttttaaaaaatgttttattctttcaagaatggtccattcatggaactggggctatcactgtctctatgtgtaatgccaggtaagaatargagaatgatccagagaaaaggagggactcagcggggtgagaggagctaataatgacctcccctcccacaatctagccgtcccccatcctagcggtcgaca

SEQ ID NO: 49687 - DNA, 201 bp, Homo sapiens
ttcagttttacccatgtaaatggggctcactcattttgcttttaggaaaaatttaagaaacaaaaatttagtcaatggccttaagtctcaaaagaaaacartactgactaaatatttaataagcatatctaaaatacacacatttacataaaattagagcacacatctcaggaactgtaatgaagcaatcggaaaactgtt

SEQ ID NO: 49688 - DNA, 201 bp, Homo sapiens
caagaactgggccacagtgaaggcagcaagctttgggtgaggcaacaaagagatctgaagttctctcttctttatggattttttaaaaaatgttttattcyttcaagaatggtccattcatggaactggggctatcactgtctctatgtgtaatgccaggtaagaataagagaatgatccagagaaaaggagggactcagc

SEQ ID NO: 49689 - DNA, 201 bp, Homo sapiens
cctaagggtctttttgtttgtttatttttttactggtcccagtttgtttccatccttttctaggctttcatgtcattaaatgaacaaggcatggacatttyatttgcaaaccaagtaacacgtaatatatttctgtgttccaaaccccacatgatgtaacttcaaatcgacaatgtgagaaaaatacatattaatttaatt

SEQ ID NO: 49690 - DNA, 201 bp, Homo sapiens
ctaggttataggtagatttcaagtgtttctaattggtaattagttgaaagagttatcaatagaaaggaaggtctgggttgagataagatgttgtggagacygaagttttatcaaataggtaaatcctccaggtagcaggcttcagagagaataaattttaaatggttcttatcagacttaaggtcatgttgacgttaatac

SEQ ID NO: 49691 - DNA, 201 bp, Homo sapiens
atgaggcattgttcaatgtgaatgaatcatggttaaaatgtaaatgaataccttcagccatcacctcttctaggaagccttcaggctgagttatggtcctsctctgttggagcattggttagtcattcagaacctttaccaagtagctcttaactggtttgtacttttattttttaccccacttagatgggatgaactcat

SEQ ID NO: 49692 - DNA, 201 bp, Homo sapiens
ttagaagtcaaggtgctggcgtgcagggaggatgaggcattgttcaatgtgaatgaatcatggttaaaatgtaaatgaataccttcagccatcacctcttytaggaagccttcaggctgagttatggtcctgctctgttggagcattggttagtcattcagaacctttaccaagtagctcttaactggtttgtacttttat

SEQ ID NO: 49693 - DNA, 201 bp, Homo sapiens
caacatttaaaaatagacggagaaagagaagagtcaggatgcctaagagctttctagaaaagcatgtactacagtcttctgggcaatatactttcatgaasgggcacaattacttctcctggccaggaaaagcttcgaggtggtgcagaagtaccagatgtgatactcttgaggaacagtatttaccagatgtcctctggc

SEQ ID NO: 49694 - DNA, 201 bp, Homo sapiens
cctgcatctgcagtcttccaaacagccccctggaggaggttcttccagctctagggaaaggtcagaatttcagtctcatgttttcacacatcttaaatggrtttcagaagcactggggctgccccagctcctctctttaaacaatgtggttaagctgttgtagcgttgctagagactgcattcctcctgcattgtgatgtg

SEQ ID NO: 49695 - DNA, 201 bp, Homo sapiens
attaaagaaaaatgttatataaaaacgaccagcactgaggctagcacataatgatgctcagtaatggcaactagtactattctcatctctgggtcaatatmtgcaatgttgatttctgatgtttatgttatccacgtgcttctgataaatctgcaataactaaagtaacatatctcaacctatattcttgtatgtatagtc

SEQ ID NO: 49696 - DNA, 201 bp, Homo sapiens
tctacaacacacggaagagacagagctatagttaacaaaccaagaagcagaactgcatgagggaaagcagaaacgaaatggcatagtcttctagagaagcyttcagcttgcagaaatcattgctgttgataaagctaaagctgctagcatttagttcagaaataaaaagcaatccaaaaaaaaatgtggccaaaggtgtgt

SEQ ID NO: 49697 - DNA, 201 bp, Homo sapiens
atagagtcatcagggaccaagaactgggccacagtgaaggcagcaagctttgggtgaggcaacaaagagatctgaagttctctcttctttatggatttttwaaaaaatgttttattctttcaagaatggtccattcatggaactggggctatcactgtctctatgtgtaatgccaggtaagaataagagaatgatccagag

SEQ ID NO: 49698 - DNA, 201 bp, Homo sapiens
atccctaagcttgtcccactgtctagtctttttgatggccacttctacccagaactatcaacatgtggtatctccctattgccctgggcctctgaggccccagccctctgcccaattcatgatgctcctgcaagcagcatttctcaaactgaagcaaatatctaatcttccccaccatgtcttcaatggctttccattgat

SEQ ID NO: 49699 - DNA, 201 bp, Homo sapiens
gtaacgtactctcataacaggtagcgagtctcagccaatcactgcagccgagtttcagtccattacaggcagccaaatgtttaaacagtgttcagataaggcaaacgccaacctgtacctaaccctgctgtttctgtaccttgcttctgtgttctgtatgtcactttccttttttggtctgtaaatgttacccaaccaagc

SEQ ID NO: 49700 - DNA, 201 bp, Homo sapiens
caaaaagttggtgattccctccccgaaatagtaatgaaattacttctgttgaataaacttttaaagtcattttaaaagctgaccaaaaaaaaaaaaaaaaagcttctggaaaacaaacctacagagtgtcatatatggggtcaaaatgtgggccttggaggcagggactgaaatccctgtttggctaacactgtgattttt

SEQ ID NO: 49701 - DNA, 201 bp, Homo sapiens
tgagcactcagatctgagagggcttaatgaattatctgttacagatgggctgtcgttggtgggtgggggaaagcttggctctggtttcctctcacaggtgrctggttctgttggctctggtttcctcttataggtggctggttctggtccctgagaggataatggagagacacctgagctagagaatgccttagaagtcaa

SEQ ID NO: 49702 - DNA, 201 bp, Homo sapiens
tatccttggaaataaatcctaagaacaaaacgaacatggttttgttggaaggaccagctagagaaaatagccatcttaaaatgcagtcgaaaagtggcaawagcttttagacaaccattagctatcctcatggaggaacagattaaaatgtctaaaagaaatagaaatgttaaatgttccaattttgcatcaagtatgtaa

SEQ ID NO: 49703 - DNA, 201 bp, Homo sapiens
ggagtttgcaaggcaaaagggattcagttaagggttttccaggcagataaacagcatgtgaagccatacaagtgtcaagacatcatatcaagagaaagttkttgtggggtcatagaaggatttttaacagaaaatggcaaagtcatatatatgtatggtaggaacagaaaggagagggcagggcaaaactgggggcaggga

SEQ ID NO: 49704 - DNA, 201 bp, Homo sapiens
gctgaacctttataaaacacaaatcagatcatgtcccttccctgcttaaagctctttgatagttcaccattgattccacagtcaagtcctagattttctgmctgccattttagccctccatgatcagccacggcttatctccctggcctttcccctcagtgtggaccctctctactcatcctttatggcaaggggttagca

SEQ ID NO: 49705 - DNA, 201 bp, Homo sapiens
aataaatgtgttctctgcaggccatcaaaatacccaggtgtttggtgggataatttgctatattcacagttttctttttaataaacatgaggtctggactmtaagatccttaggaacccagcaacttgttgggatattttatctgaaatatttggccatcagaatattggaaagattattctgggacaactgtaggcactt

SEQ ID NO: 49706 - DNA, 201 bp, Homo sapiens
aaaacaccctctctcctataatctgggtgactttggatagtggaataagcctgctatagtggatgaagcaattagtccccacctgtgtatttcctgggtgygggctccttgctcctccaggcagtggatgtgtaagcaggtggttttcccactttgagatggcacacccagtgaccctctacacatataccccaaccttgc

SEQ ID NO: 49707 - DNA, 201 bp, Homo sapiens
cacaccactgcgctccagcctggagacagagggagactccctctcaaaataaaataaaataaaataaatataccaaaattagctgggtgtggtagcacgcrcctgtagtcccagctacttgggaggctgaggcaggagaatcacttgaacctggaaaacgaaggttgcagtaagccgagatcacaccactgcaatccagcc

SEQ ID NO: 49708 - DNA, 201 bp, Homo sapiens
atcacttcatttttatataaatattggcatacctcattttattgtgctttgtttcatcatgctttcagatttggagtttttgacaagttgaaggtttgtgrcaaccttgggttgagcaagtctattggtgacttttttcctacagtgtgtgttcactttgggtctctgtgtcacattttagtaattcttacaatatttcaa

SEQ ID NO: 49709 - DNA, 201 bp, Homo sapiens
agtcactgattgagattttgtgtactcttctgcgctcaaggttggttgtttaattaataccatctggctcattcaccacttgctaacacaaggaaatactkagaggactggctttctgatattaaatattacttttgaaatccaaatagttcttcttattaagctgagatcaaagttgaatttaattagctttaagaatag

SEQ ID NO: 49710 - DNA, 201 bp, Homo sapiens
cacagagtatttgtcacatctactcagctctattattggagcaccaaaatagccacagataatatgtaaatgactgaacacagttgtgttccaataaaacyttattattcatggacactaaaatctgaattttatacaatttacatgtgtcataaaatattattattctgttttatttttcaaccatttaaacatgtaaaa

SEQ ID NO: 49711 - DNA, 201 bp, Homo sapiens
agccccctccaaatggtgccatggcaaaaataaaaacaaaagactctaggaaaatatacttaaagaagcttaactctataaatcaacacctggaagctggkagcataagctttgttttccacagggcttgcaccaattgtctgggcctcacagtttggtcaaatctcagccacaagttttcttctgatatcgtaaggcttg

SEQ ID NO: 49712 - DNA, 201 bp, Homo sapiens
tgaactcttgctcttacatacatagctttcacagcattttcctacaaattatagaaatgctttacggaggaggaattctattttcaactcattattggggygatatatgagcaaagcagatgatgttcctcagatgttgtagatgaaaacttaatgtgcccaaggagggagaagaatctttaaagtcactgattgagattt

SEQ ID NO: 49713 - DNA, 201 bp, Homo sapiens
caccttctacatttgaggaaagggtcaaatccctgctgaacttaaatctgaaatctagaacttcccatttccaaactaagacaatgccagtctaccaaatmtcttaattatgtgagtttttactgagatattaattttagaaaaaaagttagctttttcccctttctaaaaacatggttaacatgaccaagataaaaataa

SEQ ID NO: 49714 - DNA, 201 bp, Homo sapiens
ccgttatttctctcagtgggagctgccattttaatgcctcagcacagcactttttcagcaggagatcctgcctcaggtggcagatcaggcctgggagaatwgaggtctcatttaaactaagtcagaaatttcccaacttgttttaaagtgaaatagatttgtaaaaataacaataataattatttgacagtgctgttatag

SEQ ID NO: 49715 - DNA, 201 bp, Homo sapiens
caaggtgaccattttcctttcccacaggtcagctccaccccagttgctacctccaaaatacccccagggtctcagtgaaaggaaaggttggccagttcatmgacccaccattgtagcaagcaagggaggagtccccttctgcacttgatcatgacttttgaactcttgctcttacatacatagctttcacagcattttcct

SEQ ID NO: 49716 - DNA, 201 bp, Homo sapiens
aaaaaaagttagctttttcccctttctaaaaacatggttaacatgaccaagataaaaataaaaaaagacagactttaaaaggtgggcaaatgactgacagygttttctgaatgaggtcattcattcttgaggcaaatgaaagacataaaagttaaaaactggaatggttccaggtatagactgggctctgccttggttaca

SEQ ID NO: 49717 - DNA, 201 bp, Homo sapiens
gagatagccgggtggacactatcaagaggcttggggatttcagggagctctgggtaggtgatgtgcattatccacacagagggagcaattgaagccatggsgtggatgaggtcacccagggcaaggaaaatggcaaaagaatgtggctgaacacaaagtcctggggagagacagaatgaggccggaagtcagttaggagac

SEQ ID NO: 49718 - DNA, 201 bp, Homo sapiens
tgaacaatatggatttcactggagactgtataaggaacgtggagaaggtttgcaccatccattgaacgcattcagcttggaatcccaagttcagacatctytctttatctcactcctttttctattgcccaatcacaaggggtccttcttttctatcctttgcaccaatgacaaggtgaccattttcctttcccacaggtc

SEQ ID NO: 49719 - DNA, 201 bp, Homo sapiens
aaggaatttgcctgatataaatgtaatatacatatatatatacatttttatataaaaagacatacttatcacagtagcatcatatttctccatggcttcartaattttttctaagattttcctcaccatcagacattcagaaacatttcctgaaggatcctttagtaaattaatactgctatattaagattcttaaatcct

SEQ ID NO: 49720 - DNA, 201 bp, Homo sapiens
gtgacagggcaggtacacaaacccaagattctcccaagcttaaacattattataaagctccaggtttgtaatgactaggtagatataattgagaacaaaaragattcagttttaactataaaatagtctctggcaggcattggcaaaatttttatataaaaaagccagacagtaaatatttcaggcgctacaggccacaga

SEQ ID NO: 49721 - DNA, 201 bp, Homo sapiens
gttgtttgcctgtccagcatctcttctgctaacagaaccactcttttctcttgagaaaatattcttcctattttcagactgtgtgttttagcttgggctartttccaattcttggctttgagtttgggcacttggccaggcacgaccaatcattgtgttgtgtcctctctatccacagtgattggtttaggaatggtcatg

SEQ ID NO: 49722 - DNA, 201 bp, Homo sapiens
tcaactcattttcagaactatagatttttggggttcttaccactacttatattggttccatgagaatgtaaccaggacatcagttctttcctgttctcttytctgaactatcctatagaattaaattgtacaacagcatttatgaacaatatggatttcactggagactgtataaggaacgtggagaaggtttgcaccatc

SEQ ID NO: 49723 - DNA, 201 bp, Homo sapiens
cttctcttaggttacacagaaagcaatctgggtcaatactctgtcactcacttctaaaagcaaaacaccattcgcaacttttcaactcattttcagaactrtagatttttggggttcttaccactacttatattggttccatgagaatgtaaccaggacatcagttctttcctgttctcttctctgaactatcctatagaa

SEQ ID NO: 49724 - DNA, 201 bp, Homo sapiens
ctgagaagccaactgaggtaagcatctgaaagcggcctctggacttacagcgaaggcaggttgtcagtgatggaggcaaggacagagccagttgtggtgaygctgtaagttaaggatggaagatggaaacctacgaggcaggatttgccattagaaaccttggcagttagggaagctgtaatagaacctcgtgcttttcaa

SEQ ID NO: 49725 - DNA, 201 bp, Homo sapiens
gcccatgtgggttggaaaccacataagtggggcatggatttgactacagatcaatggtaatttgctatctatgtgagtgggcaagtcattagcttcttccrtacccagccttctcatctacaagacagggagcgttctaaccctctccaggttattgtaggggttgttgagaaaatccacaattgaaagcactcattactg

SEQ ID NO: 49726 - DNA, 201 bp, Homo sapiens
cagaagcagtgatcaaaggccagggccagctgccaactactagccatcccagtctgtggtcctaaaaatttgctgtcaccccttccagactgcagggtagsctctggttccatgggagatgggtagaacccaaggacagggtcctcccaaggacagggtcctctacatacccaaaggccttgggaaacaaggcaaaggctg

SEQ ID NO: 49727 - DNA, 201 bp, Homo sapiens
cttgtgagctgtggttactgctgccaatttggtgaatctgtctgcattttatggtctgcatttttgagaccctgatcagctaattttttccctattttggyggtgttttgacaagtacctgaactcataacttgctggcatgcactggctgctcttaggtcaggtgctaagagggcaccacaccataatgcatgattgcct

SEQ ID NO: 49728 - DNA, 201 bp, Homo sapiens
agctctgcctttctgtcatcctgggaagtgccaacaagggccccagtgttgaaatgcaaactgtggaagaggctttagtacaggaattattgataaggaarttgttgatattgcagctgcgttcttctagcaaatctgttttcttcttggtaactgctctgtggatgggatggagtctgaactccctagcctggtcagtaa

SEQ ID NO: 49729 - DNA, 201 bp, Homo sapiens
tgatttgagtcttcctttttgcaaatggaagcttgttcagtgataaaaatttcattttcagcactgctttagatgtgtcccacagattttgacatgttgcwttcttatttgcattcagtaaaacgtatttttaaatttctcttgagacttcttactggtccatttcttatttagaattatattgtttagttccaagtatta

SEQ ID NO: 49730 - DNA, 201 bp, Homo sapiens
gccagctgccaactactagccatcccagtctgtggtcctaaaaatttgctgtcaccccttccagactgcagggtaggctctggttccatgggagatgggtrgaacccaaggacagggtcctcccaaggacagggtcctctacatacccaaaggccttgggaaacaaggcaaaggctgagaattgagatgttcacaccagca

SEQ ID NO: 49731 - DNA, 201 bp, Homo sapiens
ttaatccaacatgcctggtgtccttatagaagaaaagggacatgggggaaaggagacactcagagagctcaccatgtgaagagggaggattggagtgaggyacctacagccagggaacactgggggttgcccacagtcaccagaagcaaggaagaggcaaagaagggctctgctgcagccttcagagacaggacatgccaa

SEQ ID NO: 49732 - DNA, 201 bp, Homo sapiens
caaacttcttcatttgggggaaacggttgatatatttctatgtaatttacatcattttttaaaaagttgccctcatgagttttatttcattttttttaaaytggggtataattcacatacagtgaaatgcagtagtcataatggggcttgttgtcttcctcagtccgaggtccatctggtcagctcttctctcccgttttc

SEQ ID NO: 49733 - DNA, 201 bp, Homo sapiens
gatggcccccatcccttaaaaaaattaaattaaaacaaacatcctacaaataaaaattcttaacagtaagaaaataaaagaagaacatgcttttcaagtamgcacttattccacaaatgcaacatctttccatggattttatttgaagctgtgtgggacactgtcatctcagcaattccccttccctttcttccctcccac

SEQ ID NO: 49734 - DNA, 201 bp, Homo sapiens
ttgaagacctactgtgtgttgggttatgggaaacttgcatctgttttaggtattgaggtataatttacctaccataaaatttatctattataagtaaacawctcaatgatgtttaagaacactctcatcactctgagaagctccttcatatcctttgtaatcaatccctgctcccatcttccaggcccaagtaacctctta

SEQ ID NO: 49735 - DNA, 201 bp, Homo sapiens
caccactattatgggttatttatatagggtagactgaagtgtccataatgcttatccataaggtgagcactttcttatttctgactgctctctactccacmtgtttcctggatttgagccaatttgccacccatttttaatagatggtcctacttctgtgcttttagactattatccactttcttgagtgccactagtctg

SEQ ID NO: 49736 - DNA, 201 bp, Homo sapiens
gagatgagaaagcaatggtatccttcggtgggacatgtgacagtatcacctcacagcactgtggtgtttatcttaatgtctttcacttacaagatcaaggytctgggaggtaggtaggcagggcagaaactattgtccccattttaaagaggaggaaactgatgttcagagactttaacaaggattggaatggtagaaagc

SEQ ID NO: 49737 - DNA, 201 bp, Homo sapiens
ggatactttctggactgtgaccctgtgtcttctgagattgtccaagagtggacgaggcttacccatgggtgatgactcagcagggagcccagggccctctktgtgtggctgcaaggcttcagatatctcacatgtcttctcaaggttgcaattatgtcacatggctctaagactagtagactaggccagattattctagaa

SEQ ID NO: 49738 - DNA, 201 bp, Homo sapiens
ggtggcaccttcagcctcaggcacagacaaggtatgggcggacaagaagtggtactggccgattttgcctgagaatgggcagaatcagctcatgtgggcawcctcagtctttctctgacagcctgggcatgggctgctttggctttgtggcaagcctgttcttttctggatactttctggactgtgaccctgtgtcttctg

SEQ ID NO: 49739 - DNA, 201 bp, Homo sapiens
gtggaggttgcagtgagcagagatcacacctctgcactccagcctgggtgacagagtgaggctctgtctcaaaaataaataaataaataaataaataaatwaataaattaattaattaataataataaaaagaagactgggtattcctgatgtgagtcagtttgtcttatgagtgtttcctcaaaaaaatagcaagaagca

SEQ ID NO: 49740 - DNA, 201 bp, Homo sapiens
tctatctactctgtgactttttcctcatttctgagatagggacaaaagtgctgtattattagtccatttaacgttgctataaaggaatacccaaggctggrccatttataaagaggtttatttggctcatggctctgcaggctgtacaagaaatatagtgccagtatctgcttctggtgagggcctcaggaagctttaaat

SEQ ID NO: 49741 - DNA, 201 bp, Homo sapiens
gtgtggtgggatgcacttgtggccccagctattccggaggctgaggtggaaggatcacttaagcttggaggttgaggctgcagtgagctgtgactgtgccmctgcacaccagcacagagagaggtcctctctggaaaaaaaaaaaaaaaagaaagtaaaaaaggaatacaagatgctaaggaaaaaagtatactgcagcat

SEQ ID NO: 49742 - DNA, 201 bp, Homo sapiens
atagcatgcatacctgaaaccaccaacatgccttgtgctgccccttgaacttctgcttcaggtgcttctaaaaactcagtagagttgccccactccttgasaggtggattctcagtaatccctgcttcttgggtttgttaacttcaggtagaatctggagttactgcactgaggggcagagtctccatcaggtcccctaaa

SEQ ID NO: 49743 - DNA, 201 bp, Homo sapiens
tctcaaactgaagcaaatatctaatcttccccaccatgtcttcaatggctttccattgatttgactgggatctgcaagtgctgccatactcttttcaacaycctgatcctatatccttaaagccaaattctcacgtaatattttacaatttggaccttgcagatccatatcatggcaagctagccagctgttaatcaaatc

SEQ ID NO: 49744 - DNA, 201 bp, Homo sapiens
atcctctactttgtgatctcctgttcatccttaagaactagctcaaatctcatgtctttcatcaaattttctttgacttctacagggtgagttagttgatytttcctctaatcttccacagcttcaaatagaagagctaccacttctatcaggctctagttacatgctgtacatatatattatcatttaattcacatgata

SEQ ID NO: 49745 - DNA, 201 bp, Homo sapiens
atacctgctgcttggcccctgatcttttacttcctgaaacaggctgttctgataaatgtctattaatttggtgcagggaaggtgtaaggggaaagagttawgtgggtcactttgaagctaatatagtctaattacccacattctggtcattccattgtggctagaaggctctcagtctcccctctgggcctctgtccctct

SEQ ID NO: 49746 - DNA, 201 bp, Homo sapiens
tgacaggcacttagtgggttcaggtcgtttcattccagcaattggctgaccaagccaaagcactagaaagagttgaccacttctgcataaaacttggtcartgggtggccgaagaactgatttcagtcctgaccccttcagagccttggtttcttcaactgtgaaattattgagttgggttggaggaattcttcagcttca

SEQ ID NO: 49747 - DNA, 201 bp, Homo sapiens
actgtagcaaagaccagattctacccaaataacggcatcgccttagatcattcctgctctgcgtatttttccacacatcagtcctgttcaaagggcacagwtgcagccatgcatgaccatttctccacttgttttctttattttttgttttaagctacaaatctttccattttacagatatgcctcttggatggaggaagt

SEQ ID NO: 49748 - DNA, 201 bp, Homo sapiens
gagaaaaagtctaatcatcaaaattagttttttttcaaaatttttggcagctgcagaaattcccttagcccttctctcatttacactacaattgagaagcrtgccataagcttagaagaatggaatttcaaaacttattttaattgtaacctgtttctgtccacattttttcaaagactgtctgttcaggataaggctaat

SEQ ID NO: 49749 - DNA, 201 bp, Homo sapiens
gattctacccaaataacggcatcgccttagatcattcctgctctgcgtatttttccacacatcagtcctgttcaaagggcacagatgcagccatgcatgaycatttctccacttgttttctttattttttgttttaagctacaaatctttccattttacagatatgcctcttggatggaggaagtactgataaatttgtta

SEQ ID NO: 49750 - DNA, 201 bp, Homo sapiens
cactcattttgcttttaggaaaaatttaagaaacaaaaatttagtcaatggccttaagtctcaaaagaaaacaatactgactaaatatttaataagcatayctaaaatacacacatttacataaaattagagcacacatctcaggaactgtaatgaagcaatcggaaaactgttctagaatccaagatttttagagacatg

SEQ ID NO: 49751 - DNA, 201 bp, Homo sapiens
tcagatctcatgagaactgactcactatcatgagaacaggatgggggaaacctcccccatgatttaattgtctccacctggttcctcccacaacatggggkcattataggaactacaattcaagatgagattcaggtggggacacagccaaaccatatcagcaattaagaggaatgcctacaaattcacacagcaatggaa

SEQ ID NO: 49752 - DNA, 201 bp, Homo sapiens
ttaatagcattacactaagatgcctgatgaatttatctcataatgagagggcctgccctgaagacttgaagtctataagctacaatctcctttgggtcatytaaagctggaaaaaaaaaaaacatcacaaaattcagtggtttaaatagaaaaatattgtattgttgctcgcaattctgtaaaatgagcctggtttagctg

SEQ ID NO: 49753 - DNA, 201 bp, Homo sapiens
ccccacatggatttctataaggtctcttcaacagacctaccctgtttctaatatggaggctcggggttcctaacagcaggaaagaagaagctgctaggtcytgaggtttacgcctatgactggcacagcatcacttcctctgcagtctactagttaaagcatgtcacaggacaagtccacattcaagggaagggactaaac

SEQ ID NO: 49754 - DNA, 201 bp, Homo sapiens
atatacacacacatatatgatatatatgtgtgtatgatataatgtatatacacatacatatcatatatgtgtatgatatgatgtatacacacatacatatsatatatgtgtatgatatgatgtatacacacatacatatcatatgtgtatgatatgatgtatacacacatatatatgtgtaggatatgatgtatacacaca

SEQ ID NO: 49755 - DNA, 201 bp, Homo sapiens
ctattgtattatcaaggagatggccaaattggggtgtctagtccacagggagatctgcactactgttgccttcacacacattaacttggaagacaaaggcrctttggctaagctggtagaagccatcaggaccaattataatgacagatatgatgagatcccacatcactgaggaggcaaggtccttggtccaaaatctgt

SEQ ID NO: 49756 - DNA, 201 bp, Homo sapiens
aaaaaaaaaaacatgaaaaccaaaggattcacacgtgcacacatgcacacacacactcatacacgcacacacacatccaagcacacacacacacgggcttytaaaacctaggcttcaagaaaagttcttttctattttttggaacgaaaccctttgttcacaatcagaacatattataaatgtaggcttagatttagtcta

SEQ ID NO: 49757 - DNA, 201 bp, Homo sapiens
agaaagctcagccgatggtgactgcacatgatgtggatcccatggagctggctgtcttcccgcttgccctgagtcctaagaagggagtcccctattgtatkatcaaggagatggccaaattggggtgtctagtccacagggagatctgcactactgttgccttcacacacattaacttggaagacaaaggcgctttggcta

SEQ ID NO: 49758 - DNA, 201 bp, Homo sapiens
acaaatggacgcacacaacatatacttatattatttagaaacagcaatgtattattaagtcaagaaagcatgatttattcccagagtcactgaatagcaaygtttccagggcatcggtacgttgtacaccgatgcgactcactctttagagtcctccctttgttgctggccagtgtgcaggctctagggaattttccccac

SEQ ID NO: 49759 - DNA, 201 bp, Homo sapiens
gcctgggcaacagagcaagaccctgactcaaaaaagaaaaaatgttgtcttcatctttcaacagtattgctaataaagggcattactgataaataattcaytatgtgtgttggggggtagaatgttgggggacagagaatgcagggagtgaaggaagggagagggaagtaaaggggagggggagaggagggagagactaca

SEQ ID NO: 49760 - DNA, 201 bp, Homo sapiens
aggttgcagtgagcagagatcacacctctgcactccagcctgggtgacagagtgaggctctgtctcaaaaataaataaataaataaataaataaataaatwaattaattaattaataataataaaaagaagactgggtattcctgatgtgagtcagtttgtcttatgagtgtttcctcaaaaaaatagcaagaagcaggtt

SEQ ID NO: 49761 - DNA, 201 bp, Homo sapiens
gctatagtacgcaggagaccaaaagtaaaatgaaggctagagtatagagtaaatatccaaaacacattttttttgtagttgaattcaaaggtgtaactctyataacaacccaagtttcaaatacttctgcaggtgaagaagttctgcaagcatgccgaccactagcagtgagacacaatacaaccttctttgccacgatcc

SEQ ID NO: 49762 - DNA, 201 bp, Homo sapiens
aatacctgatgcagaaatattaacatttgaaaatcccagctcaacctcaacctcacctcagctttacctttgctttccatacctgtgtagattcaatgacytaaaatatctcgtgtacaagcattgaaaggtagtgctataatatttctagatttcatatctgtagtcatatctgtaaatgatttacaacagatgcacata

SEQ ID NO: 49763 - DNA, 201 bp, Homo sapiens
cagggctaggaccggtgaaaaacacgaagcgcccaggctagggaagaggagagcagtggctgagtcagggtggggccggctgccctggcagtgggagcggrtgtctctgggtacctcagctgtctcctccctcctggtcagcttgtgtcccgtctcttacagagtcagggctggaatactaccccccttctcagtacttgc

SEQ ID NO: 49764 - DNA, 201 bp, Homo sapiens
ttttttatttttttttgagatggagtctcactctgttgcccaggctggagtgcagtggtgcaatcttggctcactgcaacctccatctcccgggttcaagygattctcctgcctcagcctcccgagtagctgggattacagggatgcgccaccatgcccggctaattttgtatttttagtagagacggggtttcaccatgt

SEQ ID NO: 49765 - DNA, 201 bp, Homo sapiens
gattagtgaaaagggcagattgcagaacaggatgggctagtctatttccattcttatgtttaaaaagaaaactcaatcaacaccagcctgggcaatgtggsgagaccctgtctctacaaaaaatacaaaaaaattagccaggcatagtggcacgtgcctgtggtcccagctacgagggaggctaaggtgggaggatggctt

SEQ ID NO: 49766 - DNA, 201 bp, Homo sapiens
tcaggaggctgaggcaggagaattgcttgaacccaggaggtggaggttgcagtgagccaagattgtgccattattgcactccagcctgggcaacaagagcraaactccgtctcaaaaaaaaaaaaaaaaaagaagaacctaactcttgtgtatatgtgtattgctgtttaattacatcaataataaattaattaattaaac

SEQ ID NO: 49767 - DNA, 201 bp, Homo sapiens
catccatgggcatcagatatcccatttcctgctctgctcttcagaccaccatccctgctcagggctgcatcccagaactgtcttgaagagcccctcctacrgtgccatgcacacagtgacagcccaggggttctcatcaggtgtccactggaaccacctggtgcccttgatcaatacggatcccctcatcccccgacccca

SEQ ID NO: 49768 - DNA, 201 bp, Homo sapiens
tcagactatgagaagaggaaggtaagaaaatgcctttacccttctgtcactcttttctcattaaagatctcaactcaactcataaaatatttgagaaaatkacttcttcccagctcagaattagaggtcacagtaatgccttcctcttacacgcagtctgctgcatcctcacatgcctcaggtgggtggtagagcatccat

SEQ ID NO: 49769 - DNA, 201 bp, Homo sapiens
tttctcattaaagatctcaactcaactcataaaatatttgagaaaatgacttcttcccagctcagaattagaggtcacagtaatgccttcctcttacacgmagtctgctgcatcctcacatgcctcaggtgggtggtagagcatccatgggacaggtgcagagactgaggctcagaggggttgagcccagcaccgggctct

SEQ ID NO: 49770 - DNA, 201 bp, Homo sapiens
gggtggatgcttgagctcaggagtttgagaccatcctgggtaacatagcaagaccttgtctctaccaaaaatacaaaaaattagccaggcatggtggtgcrtgcctgcagtctcagcaacttaggaggctgaggtgggaggatcactagagcccaggaggtcgcggctgcagtgagctgagattgtgccactgcactccag

SEQ ID NO: 49771 - DNA, 201 bp, Homo sapiens
cacacccagctccttcagcagagcagcagccagaaggatgagatccttcagacggtcaaggaggtttgtgagccgcctgctagggtccagcctggctgcaycccccagccagtggcctcctggcttgggccaaggtccctcggatgtggaaaggcagtgggatgaagctgtcacttccttctgtcccccagcacctgggag

SEQ ID NO: 49772 - DNA, 201 bp, Homo sapiens
cgccaggccccggaaggcttccacatttccagcaggaggtgtcgacggtcctgtgagcctgggcctgtgccacgtggctcacaccatttagcgggctcccrcccaggccacagtctgcacttccttgaactgtcacaggtgggcgtctcagaagctggcctgcagcacgagatcctccggagagtccaggaactgctggat

SEQ ID NO: 49773 - DNA, 201 bp, Homo sapiens
cacggcgtctgagggggtcccaggggctcaggacccctacctccggctgcaggagcagtcccggctggagcagggcctgagtgagcaccagcgccacctcracgcagagcggcagcggctgcaggagcagctgaagcagacggaacagaacatttccagccggatccagaagctgctgcaggacaatcagaggttgggctc

SEQ ID NO: 49774 - DNA, 201 bp, Homo sapiens
caggggagggcagcattttttttttttttttgagacggagtcctgcactgtcgccaggctggagtgcagtggcacaatctcggctcagtgcaacccccgcygcccaggtccaagcaattcccctgcctcagcctcccgagtagctgggactataggcgcataccaccaccagctaattttttgtattttagtagagacggg

SEQ ID NO: 49775 - DNA, 201 bp, Homo sapiens
tgtcgtgatagtgggcacctgtaatcccagctactcgggaggctgaggaaggagaattgcttgaacctgggaggcagaggttgcagtgagccgagatcgcrccactgaactccagcctgggtgacagagcgagactgtctcaaaaaaaaaaaaaaaaaagagacttagcattttgtaagggctgcttctgatgtcttagca

SEQ ID NO: 49776 - DNA, 201 bp, Homo sapiens
ctcatcctgaccgtgggccccgccaggccccggaaggcttccacatttccagcaggaggtgtcgacggtcctgtgagcctgggcctgtgccacgtggctcrcaccatttagcgggctcccgcccaggccacagtctgcacttccttgaactgtcacaggtgggcgtctcagaagctggcctgcagcacgagatcctccgga

SEQ ID NO: 49777 - DNA, 201 bp, Homo sapiens
tcccagctactcgggcactccagcctgggtgacagagcaagagtccatctcaaaaataaaataaaagtaccaagtgctgtccacccgctcagaggagcatrgttcataaccatcattttggttttgttttgttttgtttttttgagacggagtttcgctcttgttgcccaggctggagtgcagtggcgcgatctcagctca

SEQ ID NO: 49778 - DNA, 201 bp, Homo sapiens
gccatgcacacagtgacagcccaggggttctcatcaggtgtccactggaaccacctggtgcccttgatcaatacggatcccctcatcccccgaccccaccwttctgaggcagtggtctggggtgggccagagtttgtataacatcaggccacccgggggttcctggtgcccatgccagggagaaccactgctgccaccctc

SEQ ID NO: 49779 - DNA, 201 bp, Homo sapiens
gtggctcaatcatagctcactgcagcctcaaactcctgggctcaagagatcctcctcctcagcctcccaagagactgggaccacaggtgtaccccatcacwcttggctaatttttttattttttgtagagatgaggtcccactatgttgcccagcctggtctcaaagtcttgggctcaagcaatcctcccgccttgactcc

SEQ ID NO: 49780 - DNA, 201 bp, Homo sapiens
tctccacctcatcctgctgctcaatgtttagtcaacaaagaacaaggagtactgagtgcctgctgtgggctcaggacacagatggaagaactagaaagackcagcccctcacctcatggaattcactagaaagatgtggcccctgaccccatggaactcactagaaagatgtggcccctgcccccatggaactccatgaaa

SEQ ID NO: 49781 - DNA, 201 bp, Homo sapiens
cgcactgcctcatcctgaccgtgggccccgccaggccccggaaggcttccacatttccagcaggaggtgtcgacggtcctgtgagcctgggcctgtgccaygtggctcacaccatttagcgggctcccgcccaggccacagtctgcacttccttgaactgtcacaggtgggcgtctcagaagctggcctgcagcacgagat

SEQ ID NO: 49782 - DNA, 201 bp, Homo sapiens
ggtgcacccgcgggtcccaacgtgggggatccctccatccgcaaagccaggtcagccactgcccaccccaccccaggaaatatgggtgtggccctcccccygcatctaggctggacgtcggagagggagggacaggcatgtggggcagcctggaaagaactgatcttcggggaggggtgggagagcgatggtggttgggag

SEQ ID NO: 49783 - DNA, 201 bp, Homo sapiens
aaccccatctctactaaaaatacaaaaattagccgggtgtggtggcgcatgcctatagttccagctactcgggaggctgaggcaagagaattgcttgaacyggggaggcaaaggttgcaatgagctgagatcacaccactgcactccagcctgccacagagcaagactctgtctcaaaaaatagtaataataatagcattt

SEQ ID NO: 49784 - DNA, 201 bp, Homo sapiens
gcttatctcaggctttttcatcacttcattctcacttggatggtaaagaggtgtaaggggtagccagtacccattgactcactccactgacatttactgarcacctgccacattccaggcccagggctaggaccggtgaaaaacacgaagcgcccaggctagggaagaggagagcagtggctgagtcagggtggggccggc

SEQ ID NO: 49785 - DNA, 201 bp, Homo sapiens
atttttcaatttacctaaactatgtagaagtatatatatatatatatgtgtgtgtaaaatttgttttttgaccttttaaaaaacattaaagaggctgggcrtggtgactcacacctataatcccataactttgggagaccaaggctggcagatcccctgaggtcaggagttcgagaccacctttaccaacatgcggaaacc

SEQ ID NO: 49786 - DNA, 201 bp, Homo sapiens
gtcccagctactcaggaggctgaagtgggaggattgcttaaacctggggaggtcgagactgcagtgttcgtgccactgcactccagtctgggcaatgggartgagaccctgtctcagaaaaatgtaaaaaagtgcttgctgctgttgtaaccaagcgagttatagagaaacaccacactttgagacaaattgaggagtcct

SEQ ID NO: 49787 - DNA, 201 bp, Homo sapiens
ttcgatctcctgacctcatgatctgcccgcctcggcctcacaaagtactgggattgcaggcgtgagccactgctcccggccaaggagagcagctttgaggrgagaatgtcttgtgattctccagaggattatgccaggacatttccctaaagctataaggagattcacctccttagacgatatttaattacaaagaatcat

SEQ ID NO: 49788 - DNA, 201 bp, Homo sapiens
ctgtagcctactgggaggagctggccggaggtcacacaaaaaggattggcaaggcagggtgggaaagccagcctcctaaccccagtcagtacccctcacgrcgtctgagggggtcccaggggctcaggacccctacctccggctgcaggagcagtcccggctggagcagggcctgagtgagcaccagcgccacctcaacgc

SEQ ID NO: 49789 - DNA, 201 bp, Homo sapiens
aggctgcgttcgaggcactccaggtgaagaaagacctgatgcatcggcagatcaggagccaggtgagcgctggggctggggtccctggacctgctctctcagagacttgcagagtggccctccagggcggcaggtcgcagcagttgaggtttgaaccccagctccttggcttgctagcccaacaagaggtcgaggccttgc

SEQ ID NO: 49790 - DNA, 201 bp, Homo sapiens
ctgcactccagcctgggtaatacagcgagaccatttctcagaaaaaaaaaaaaagaaagtccaaatgcccccaaatagaggattgtttaaataaatgttgktgatccatatgctgtggcactctgcagtattagcatcccattagcatgttatcagggggagtgttcataaaaatgggaagtgggatgataccattttcat

SEQ ID NO: 49791 - DNA, 201 bp, Homo sapiens
ggctgcgttcgaggcactccaggtgaagaaagacctgatgcatcggcagatcaggagccaggtgagcgctggggctggggtccctggacctgctctctcagagacttgcagagtggccctccagggcggcaggtcgcagcagttgaggtttgaaccccagctccttggcttgctagcccaacaagaggtcgaggccttgcc

SEQ ID NO: 49792 - DNA, 201 bp, Homo sapiens
aaaagtgacctcggcccaggaggaggcggtcctcctcatagaccctccctcatgtgacaagataccccccaccccccgcaggccggctgctgaccttcaahccttgggcaagcccacctacacggcttggtggtcaccgcctgtggagtggggctggggctggggctgaagtgagcgtcaggctatgggagtactcctgca

SEQ ID NO: 49793 - DNA, 201 bp, Homo sapiens
gggctggggctgaagtgagcgtcaggctatgggagtactcctgcatcatgttcagcacactgaattttgcatttttgcatggtttttttctttctctatttttctttctttctttctttctttctttctttttttggaccaatttacctttttaatttccctctttaatttcaattccacattgccggacatgaagctcat

SEQ ID NO: 49794 - DNA, 201 bp, Homo sapiens
ggctggggctgaagtgagcgtcaggctatgggagtactcctgcatcatgttcagcacactgaattttgcatttttgcatggtttttttctttctctatttttctttctttctttctttctttctttctttttttggaccaatttacctttttaatttccctctttaatttcaattccacattgccggacatgaagctcatt

SEQ ID NO: 49795 - DNA, 201 bp, Homo sapiens
tagctgggattacaggcatgtgccgccatgcctggctagttttgtatttttagtagaggtggggggtttctccatgttggtcaggctggtcttgaactccygacctcaggtgatctgcccaccttggccccccaaagtgctgggattacaggcatgagccaccgcgcctggcaaccatcattgttattacaggttttatta

SEQ ID NO: 49796 - DNA, 201 bp, Homo sapiens
ataacaagagagcccattattattctaatgtcacttccttgattctgtgaatatttttcatacgtctcctgcccatttttagtatttcttgtgacgtgacygtatccttcccatgaggggaaagaagataactttgagtacatcaaaacttacaacttgtttaccccggaaggacaccatcatcaaagttaaaagaccagt

SEQ ID NO: 49797 - DNA, 201 bp, Homo sapiens
acattaaagaaaccataaaaggtatcatatgatgtgattctatgccttgctttttttgtctctcaagaaaagtcttgggtattttcctgtctcatagtacrgtttgaatgtccccttaaactggtcacaggatttcatgtggtggcacctgtagcttcgtagccatccctgttggaaggcatttccagtttcctgctgttc

SEQ ID NO: 49798 - DNA, 201 bp, Homo sapiens
aattggatctgtcccgttttcttggatcttgtgtccctaggaaagacagaggtggactggggctttagaaaggccagaagctctagtcacgagatgtttcyttagattttgttctcgtccaaaataattgaagatgatcctttggcctcaatataacgtagtctccaagagtcaaggagtctaggtagaaaatgtacccat

SEQ ID NO: 49799 - DNA, 201 bp, Homo sapiens
tgcatggggttccacgcggcagctgagcgcctgctccttttgggctgcctcttgcatgtcagaggggcccaatctaccagtcagtctgggatttgatcagyatggtttactggatacttctgtgggctgtgtgtgggttagggtgacaaagatgaccagccacaggccctgtccctggggagtttacatgccaggaggaaa

SEQ ID NO: 49800 - DNA, 201 bp, Homo sapiens
tgcagcctcctgagtctggcaaccatcaaggtactgggccctcctcccaggcagctggggctctgcatggggttccacgcggcagctgagcgcctgctccytttgggctgcctcttgcatgtcagaggggcccaatctaccagtcagtctgggatttgatcagtatggtttactggatacttctgtgggctgtgtgtgggt

SEQ ID NO: 49801 - DNA, 201 bp, Homo sapiens
ccccacaaggaagagagatgcgggcttagggtaagggggcagaagggcctcttagctttgtcccccaacgcagcctggaggcattgggcagagaaccgagwgagcgggaggccaggcccttctccatcctgccactgcgggactcctgcgctgccgccagctcacggtggtgcggggtgtggtcttgttcgcaggagatga

SEQ ID NO: 49802 - DNA, 201 bp, Homo sapiens
gctatcgcgagaactgtcgtcactgcccggccttccagagacgcccttgtcgccatgtttgttgtgggcaggcgcctgaggctgacggctggcaagcaggrcaccgcggtgcgctgaagctagagattccgaaagggggttcgggtagttcgctccggagaagtctgagaagggtggctccggtgatcccagccctagctg

SEQ ID NO: 49803 - DNA, 201 bp, Homo sapiens
tagtaaaggcttatgaaccccggtgttagtaataatagaaactcacgccttttattctggtcacccaggggagattcagaggggagtgaatgatttttcakcagagcattgcagctttgaatgcagatgggtagaagcgctctaagtgaagtatctaaatgagaatatgcaaaaaaaaaaaaaaaaaaaagtgttccctgc

SEQ ID NO: 49804 - DNA, 201 bp, Homo sapiens
tacatgccaggaggaaagccaagtgacagcctcatggcgagtcagctagcagagggcgaggagactgatggtcccaggcaagaaggaagaggagggacgcscaggtgatctggaaggactccctgctgactgtgagctcctccccggatgggctgggaggcattcacaacatgtgggaggtgtgagcccagggttgttatg

SEQ ID NO: 49805 - DNA, 201 bp, Homo sapiens
aggcaggagaatggcgtgaacccgggaagcggagcttgcagtgagccgagattgcgccactgcagtccgcagtccggcgtgggcgacagagcgagactccrtctcaaaaacaaaacaaaacaaaacaaaacaaaacaaaaaaaaacaccagcagagcatgttggcttgtgcttgtaatcccagctacttgggaggctgagg

SEQ ID NO: 49806 - DNA, 201 bp, Homo sapiens
aaatcttctccctctctcagaaaaaaaccatccattaaggtgctttgtacacagcttttgcttttcacagggatggggctgcagggaaaagtgtgggcacrgcccctgctgagggctggtggtctgtgttgcagagcgcgatgcagaaggctgcgttcgaggcactccaggtgaagaaagacctgatgcatcggcagatca

SEQ ID NO: 49807 - DNA, 201 bp, Homo sapiens
atggcgtgaacccgggaagcggagcttgcagtgagccgagattgcgccactgcagtccgcagtccggcgtgggcgacagagcgagactccgtctcaaaaamaaaacaaaacaaaacaaaacaaaacaaaaaaaaacaccagcagagcatgttggcttgtgcttgtaatcccagctacttgggaggctgaggcacgagaatc

SEQ ID NO: 49808 - DNA, 201 bp, Homo sapiens
tcagttacagatttaaggccttgttccactctttctcctcttctcaccgctgcacttgactaatcttaaaaaaagagagagaaagattttgtgctcttttytgtatgtatgttatattttactttaaaagaaagtggaggggggtggctgcgatcatagccaccaggccacacatatgcaaattagagtcttcgagcaaca

SEQ ID NO: 49809 - DNA, 201 bp, Homo sapiens
gtgaacccgggaagcggagcttgcagtgagccgagattgcgccactgcagtccgcagtccggcgtgggcgacagagcgagactccgtctcaaaaacaaaamaaaacaaaacaaaacaaaacaaaaaaaaacaccagcagagcatgttggcttgtgcttgtaatcccagctacttgggaggctgaggcacgagaatcacttg

SEQ ID NO: 49810 - DNA, 201 bp, Homo sapiens
gcttgtgtgtgtagtgcctgggtgccctggcccggcagggcgaggggtgcgggggtcatcactgtggtctgtgtgtgggttctcgtgtcacctcttcctgkttctttctttttttttttttttttttttttttttttgagacggagtctcactctgttgcccaggccggagtgcaatggtgcaatctcagctcaccgcaac

SEQ ID NO: 49811 - DNA, 201 bp, Homo sapiens
ttgtgtctaccatatttcacttagcataatgtccttgggttcatccatgttatagcatgtgtttgaatttctttccctttttttttttttttttttcctgyttctttatttctaaacactggcccaccagggaaaaattttcttcctttttaatagtaaataacgttgcatttcctgtatatgccacattttctttctttc

SEQ ID NO: 49812 - DNA, 201 bp, Homo sapiens
aacccaggaggtggaggttgcagtgagctgaggtcgtgccactgcactccagcctgggtgacagagtgagactctgtctcaaaataaaacaaaataaaatwaaattaaattaaaaattagcaagtacagttaagcaaagggggaaacatctataattttacactgtggagtaccactgtcaatattttatcgcatatttga

SEQ ID NO: 49813 - DNA, 201 bp, Homo sapiens
cccagcgccgctgattcatgcctctgagtgtcactccccatctgtgaagtggggcagtaaaagcacccccacggtccactgtggtggaaactcagggtgcratgccggaagtgcatcaggtagaggctgcccgaagtgagcccctagtaccatcttaaggtttacacaagtgaggtgaaatcttctccctctctcagaaaa

SEQ ID NO: 49814 - DNA, 201 bp, Homo sapiens
gggaggctgaggcaggaggatctcgagcccaggagtttgagaccagcctaggcaacatggtgaaaccctgtctctacaaaaaaaaaaaaaaaaaaaaaaamaaaaatcagccaggcgtggtggcacgtgcctgtgttcccagctacttgggaggctgaggtggaaggatcatttgagcctgagctgtggtcatgccactgc

SEQ ID NO: 49815 - DNA, 201 bp, Homo sapiens
gatctccacgataatcagctgacagcccttcctgacgatctggggcagctgactgccctccaggtaaggctgcagaaacagaaacccacctcggatggccytagtgagaccaggcagtcactcaagcctggaatgttctggccgggctccagccagtggaagcaggctgcaatcagtgccagctccaccctccccttggcc

SEQ ID NO: 49816 - DNA, 201 bp, Homo sapiens
acttttgctgccataatagaggcagaaaaacatacattaagaatgaagaagaaagaatgctgaatccagaagaggctgacactttaagaaagttgtcggtrggggaacaacacagtgaggcctgtcggaggagggtggtggggagggagagcatcaggaagaaaagctaatggatgctgggcttcaaacctgggtgatggg

SEQ ID NO: 49817 - DNA, 201 bp, Homo sapiens
cagcacgagatcctccggagagtccaggaactgctggatgcagccaggatccagccaggtacaagcacagctccagcctcttccaggcagggctccagccrtatgtgtgggctctggtggggacagtcatttgcttacatttcaggatgactcctgagggctggttctagcctctgctggtcggtaaggtttcctcccaag

SEQ ID NO: 49818 - DNA, 201 bp, Homo sapiens
cccccggcagacaagcctcacgtgagcaggagccacaaacaaacaggtgcccttcaccctgagtggggtgcagtgcctctgagcccagcagtcctcaggaycggctgcttctcactgtttgagtcatccctggagcaaacaagcaggttcttcctctccatagcagattggccatgaggatctgtggccacatgcagaaaa

SEQ ID NO: 49819 - DNA, 201 bp, Homo sapiens
ttgaactgtcacaggtgggcgtctcagaagctggcctgcagcacgagatcctccggagagtccaggaactgctggatgcagccaggatccagccaggtacmagcacagctccagcctcttccaggcagggctccagccgtatgtgtgggctctggtggggacagtcatttgcttacatttcaggatgactcctgagggctg

SEQ ID NO: 49820 - DNA, 201 bp, Homo sapiens
gaaacgcctggagtaccagatgtgtttggtgagggaaagtgggtttcctctaactctatcccatctcctcctcggtccccatggagtaggcctccgcactkcccccaacaagccgtgctccttcccatctgcctcccccacccacagaagaaatatttgacttagacccaacagatgaggccccctgccaagggtgcttct

SEQ ID NO: 49821 - DNA, 201 bp, Homo sapiens
gctggggctgaagtgagcgtcaggctatgggagtactcctgcatcatgttcagcacactgaattttgcatttttgcatggtttttttctttctctatttttctttctttctttctttctttctttctttttttggaccaatttacctttttaatttccctctttaatttcaattccacattgccggacatgaagctcattc

SEQ ID NO: 49822 - DNA, 201 bp, Homo sapiens
agtttcgccatgttggccaggctggtctcgaactcctgacctccggtgatccacctgccttggcttcccaaagtgctgggattacaggcataagccaccaygcctggcctattttaatttgtttaattcctaaatgcataaaaactgactagaagaatatatatcaaaatggaataatatttctggatgacaagatcacag

SEQ ID NO: 49823 - DNA, 201 bp, Homo sapiens
gctagttttgtatttttagtagaggtggggggtttctccatgttggtcaggctggtcttgaactcccgacctcaggtgatctgcccaccttggccccccaragtgctgggattacaggcatgagccaccgcgcctggcaaccatcattgttattacaggttttattaccattttgtgactaacattgcctgcttcattcct

SEQ ID NO: 49824 - DNA, 201 bp, Homo sapiens
ctggggctgaagtgagcgtcaggctatgggagtactcctgcatcatgttcagcacactgaattttgcatttttgcatggtttttttctttctctatttttctttctttctttctttctttctttctttttttggaccaatttacctttttaatttccctctttaatttcaattccacattgccggacatgaagctcattcc

SEQ ID NO: 49825 - DNA, 201 bp, Homo sapiens
ggagtttagctgaagcaatttttacagaagcagaactggcaaaaagttaaaaaattaattggttacaaaagcagttacaaaaaataaacagttccaggtgmaggggcttaaactatcacaaagggataaatgcaggggctttatgtgccatccactgcgcgtgtccccaggagctgctggtgcagctcacctcaatatctt

SEQ ID NO: 49826 - DNA, 201 bp, Homo sapiens
tatcaatgcccaatggaaatgcatatgaataaatgccaaaagccatgtgcaaaaatgttcatagcagcactatttatgccagtccaacctggaaacagctwtaatgtccattaggagtagaatggataactaaactgttttatactcaatgtgtggataccacacggcaagtggaaagaatgagccactgctcctttcaac

SEQ ID NO: 49827 - DNA, 201 bp, Homo sapiens
gcacacacctgtagtcccagctactcgggcactccagcctgggtgacagagcaagagtccatctcaaaaataaaataaaagtaccaagtgctgtccacccrctcagaggagcatggttcataaccatcattttggttttgttttgttttgtttttttgagacggagtttcgctcttgttgcccaggctggagtgcagtggc

SEQ ID NO: 49828 - DNA, 201 bp, Homo sapiens
tggaggctgaggtaggaggattgcttgagcctgggaggttgaggctgcagtgagctgtgatcatgatactatactccagcctgggtgacagagcaagaccytgtctaaaaaaaaatatatatatatatatatatgaatgccccctcgaaatggtggtttggggggaagcactgatagccttagagggtctagtgttgtaac

SEQ ID NO: 49829 - DNA, 201 bp, Homo sapiens
aaaggattggcaaggcagggtgggaaagccagcctcctaaccccagtcagtacccctcacggcgtctgagggggtcccaggggctcaggacccctacctcyggctgcaggagcagtcccggctggagcagggcctgagtgagcaccagcgccacctcaacgcagagcggcagcggctgcaggagcagctgaagcagacgga

SEQ ID NO: 49830 - DNA, 201 bp, Homo sapiens
cctgtttctttatttctaaacactggcccaccagggaaaaattttcttcctttttaatagtaaataacgttgcatttcctgtatatgccacattttctttytttcttttttccttgctctgtcaccaggctggagggcagtggtgtgaacctgctcactgcagcctccacctcctgggctcaagcagtcctcccactacag

SEQ ID NO: 49831 - DNA, 201 bp, Homo sapiens
ctgaggtaggaggattgcttgagcctgggaggttgaggctgcagtgagctgtgatcatgatactatactccagcctgggtgacagagcaagaccctgtctaaaaaaaaatatatatatatatatatatgaatgccccctcgaaatggtggtttggggggaagcactgatagccttagagggtctagtgttgtaacagcctt

SEQ ID NO: 49832 - DNA, 201 bp, Homo sapiens
tgagttttctagccggatccatgattcagtgttgggctgtgttaaagtggtaacagtcattcccatttcttgtgcacttcctgtgtggcaggcactcggcwaagcgatgaaccacattcgctgattgattctaggagggactgtattgttattagcccgatttcacaatcgcaactcaggttctgagaaactgtataacgc

SEQ ID NO: 49833 - DNA, 201 bp, Homo sapiens
gaggcgggcagatcacgaggtcaggagatggagaccatcctggctaacatggtgaaaccctgtctctactaaaattagctgggcacagtggcgtgtgcctrtagtcccagatacgcaagaggagaggctgaggcaggagaatcacttgaatccaggaggcggaggttgcagtgagccgagatcgcaccacactgcactcca

SEQ ID NO: 49834 - DNA, 201 bp, Homo sapiens
gcatgtggctggcactgctgccaccctccagggcgcctggactgtgcgggcctcccctgggtccctgcagatgtgggaatttctcccccctttcctgataygtgacactgtgcttaggagttgcaagcgcaggggtcaaacagacctggatccaggtcccacttctgcttactaaccgtgaggtctcaggcaagtctcttt

SEQ ID NO: 49835 - DNA, 201 bp, Homo sapiens
tcgggaggctgaggaaggagaattgcttgaacctgggaggcagaggttgcagtgagccgagatcgcgccactgaactccagcctgggtgacagagcgagaytgtctcaaaaaaaaaaaaaaaaaagagacttagcattttgtaagggctgcttctgatgtcttagcaggggatgctgactccagggcagagcagccagcat

SEQ ID NO: 49836 - DNA, 201 bp, Homo sapiens
acagaggcgtctcaggggcatatagtatttcccccagaagagggcagggggagctgtgagccacggtggtcctgacgcctgctgaaaagtgacctcggccyaggaggaggcggtcctcctcatagaccctccctcatgtgacaagataccccccaccccccgcaggccggctgctgaccttcaagccttgggcaagcccac

SEQ ID NO: 49837 - DNA, 201 bp, Homo sapiens
gctgaggaaggagaattgcttgaacctgggaggcagaggttgcagtgagccgagatcgcgccactgaactccagcctgggtgacagagcgagactgtctcaaaaaaaaaaaaaaaaaagagacttagcattttgtaagggctgcttctgatgtcttagcaggggatgctgactccagggcagagcagccagcatgctgggg

SEQ ID NO: 49838 - DNA, 201 bp, Homo sapiens
taaaaccatcagatcttgtgagaactcacccaccaccataagaatagcatgggggaactgctcccatgatctaatcacctcccacgagttcccgcccccarcacgtggggattacaattcagagattgaggtggggacacagagccagaccatatcaatgcccaatggaaatgcatatgaataaatgccaaaagccatgtg

SEQ ID NO: 49839 - DNA, 201 bp, Homo sapiens
gattacaggcatgtgccgccatgcctggctagttttgtatttttagtagaggtggggggtttctccatgttggtcaggctggtcttgaactcccgacctcmggtgatctgcccaccttggccccccaaagtgctgggattacaggcatgagccaccgcgcctggcaaccatcattgttattacaggttttattaccatttt

SEQ ID NO: 49840 - DNA, 201 bp, Homo sapiens
ttgggaagacgaggtgggtggatcacttgaggtcaggagttcaagaccagcctggccaacatggtgaaaccccatctctactaaaaatacaaaaattagcygggtgtggtggcgcatgcctatagttccagctactcgggaggctgaggcaagagaattgcttgaactggggaggcaaaggttgcaatgagctgagatcac

SEQ ID NO: 49841 - DNA, 201 bp, Homo sapiens
tcaaggaggtttgtgagccgcctgctagggtccagcctggctgcatcccccagccagtggcctcctggcttgggccaaggtccctcggatgtggaaaggcrgtgggatgaagctgtcacttccttctgtcccccagcacctgggagggcccttacagatcacccagcccagcctccccgtgtgcagatggacactgtagcc

SEQ ID NO: 49842 - DNA, 201 bp, Homo sapiens
taatttatatttaaatagccgtgggtccttagtggctaccattttagacaatacagctcagagcacgttcccaatcctgaagccatctcgacatctagtaygagttctggacacttcaatttttttttctttgagacaggctctcatgctgtcacccaggctggagtgcagtggctcaatcatagctcactgcagcctcaa

SEQ ID NO: 49843 - DNA, 201 bp, Homo sapiens
ctcaaaataaaacaaaataaaataaaattaaattaaaaattagcaagtacagttaagcaaagggggaaacatctataattttacactgtggagtaccactrtcaatattttatcgcatatttgaaagtcttacatatttatacaatggagtgtttctttttaacatattagtatctaggcatactgttttatagcatagtt

SEQ ID NO: 49844 - DNA, 201 bp, Homo sapiens
gccactgcagtccgcagtccggcgtgggcgacagagcgagactccgtctcaaaaacaaaacaaaacaaaacaaaacaaaacaaaaaaaaacaccagcagarcatgttggcttgtgcttgtaatcccagctacttgggaggctgaggcacgagaatcacttgaacccaggaggtggaggttgcagtgagctgaggtcgtgcc

SEQ ID NO: 49845 - DNA, 201 bp, Homo sapiens
cactgcaatctccacctcccgggttcaagcgattcccctgcctcagcctcctaagtagctggaattacaggcgcccaccactatgcctggctaattttttrtattttagtagagacggggtttcaccatgttcaccaggatggtctcaatctcctgatctcatgatccacccacctcagcctcccaaagtgctgggattac

SEQ ID NO: 49846 - DNA, 201 bp, Homo sapiens
cttttgcttttcacagggatggggctgcagggaaaagtgtgggcacggcccctgctgagggctggtggtctgtgttgcagagcgcgatgcagaaggctgcrttcgaggcactccaggtgaagaaagacctgatgcatcggcagatcaggagccaggtgagcgctggggctggggtccctggacctgctctctcagagactt

SEQ ID NO: 49847 - DNA, 201 bp, Homo sapiens
aggagctgtcggctgagcactacctgcccatctttgcgcaccaccgcctctcactggacctgctgagccaaatgagcccaggggacctggccaaggtgggyagcagccgtctgcatggaggggaggggcacgcaaggccgctgtcctgaccagccgggggttgatctgctccttgtgtagtcctcgttgaggcctgtcctt

SEQ ID NO: 49848 - DNA, 201 bp, Homo sapiens
tcttcctcaactgtggccacgtctgctgctgccagcagtgctgccagccactgcgcacctgcccgctgtgccgccaggacatcgcccagcgcctccgcatytaccacagcagctgagtgctgcccgcccacctgggcctggtcctagccctgcctcggccactgtgagccccgggctcctgctcagccttgtgccagccag

SEQ ID NO: 49849 - DNA, 201 bp, Homo sapiens
caaaacgctgtctctactaaaaatcaaaacttagccaggagtggtggcaggcgcctatggttccagctaaaaaaaaaaagaaattcagaaaaaaaatctawatttctggaaagaaaaattatttagttacataaattatgtatggaggaataacctgcagccattaaatgtcttattgaataatatttctcattaagggaa

SEQ ID NO: 49850 - DNA, 201 bp, Homo sapiens
gtggagaatttgatgagtgttgatgagcataatctctagtgcataaaggtccaataaatatttgctattgttgtgaagcagggacctcactgggaaaaaayagttgctattatgaaataaacaaagccaagatggtggctgggcgcagtggctcacgtctgtaatcccagcactttgggaggccgaggtgggtggatcacc

SEQ ID NO: 49851 - DNA, 201 bp, Homo sapiens
tgcccccaacaagccgtgctccttcccatctgcctcccccacccacagaagaaatatttgacttagacccaacagatgaggccccctgccaagggtgcttstcccctgtagactgagcgcactgtcattgcttttcagttcctcatccctctgggcctcaagctctgggaaagcaggggtcattggttcacctgccaaatg

SEQ ID NO: 49852 - DNA, 201 bp, Homo sapiens
tgcatatgaataaatgccaaaagccatgtgcaaaaatgttcatagcagcactatttatgccagtccaacctggaaacagctttaatgtccattaggagtasaatggataactaaactgttttatactcaatgtgtggataccacacggcaagtggaaagaatgagccactgctcctttcaacaacctggatgagtctcaca

SEQ ID NO: 49853 - DNA, 201 bp, Homo sapiens
gcatggccgcacatctctccacacaggtgctgatcgtccacacgaatcacctcacttccctgcttcccaaatcctgcagcctcctgagtctggcaaccatyaaggtactgggccctcctcccaggcagctggggctctgcatggggttccacgcggcagctgagcgcctgctccttttgggctgcctcttgcatgtcagag

SEQ ID NO: 49854 - DNA, 201 bp, Homo sapiens
aggtgggaggattgcttgagcctaagaagtggaggttgcagtgagccaagattgtgccactgcactgcagcctgggtgacagagagagaccttatgttataaaaaaaaaaaaaaaaaaaaaaaaagattttgggctgggcgcggtggctcacgcctgtaatcccagcactttaggaggtcgaggtgggtggatcacctgag

SEQ ID NO: 49855 - DNA, 201 bp, Homo sapiens
cagcctctcgagtagctgggattacaggcatgtgccgccatgcctggctagttttgtatttttagtagaggtggggggtttctccatgttggtcaggctgrtcttgaactcccgacctcaggtgatctgcccaccttggccccccaaagtgctgggattacaggcatgagccaccgcgcctggcaaccatcattgttatta

SEQ ID NO: 49856 - DNA, 201 bp, Homo sapiens
agactccatctcaaaaaaaaagaaaaaagaacaattagccaccacgcctggctaatttttgtatttttagtaaagacagggtttcgccatgttgaccaggstggtctcatactcttgacctaaggtgatccacccacctcggcctcccgaagcgctggcattacaagtgtgagccaccacgccctgcaagaaataattttt

SEQ ID NO: 49857 - DNA, 201 bp, Homo sapiens
gccggaagtgcatcaggtagaggctgcccgaagtgagcccctagtaccatcttaaggtttacacaagtgaggtgaaatcttctccctctctcagaaaaaamccatccattaaggtgctttgtacacagcttttgcttttcacagggatggggctgcagggaaaagtgtgggcacggcccctgctgagggctggtggtctgt

SEQ ID NO: 49858 - DNA, 201 bp, Homo sapiens
atagtatttcccccagaagagggcagggggagctgtgagccacggtggtcctgacgcctgctgaaaagtgacctcggcccaggaggaggcggtcctcctcwtagaccctccctcatgtgacaagataccccccaccccccgcaggccggctgctgaccttcaagccttgggcaagcccacctacacggcttggtggtcacc

SEQ ID NO: 49859 - DNA, 201 bp, Homo sapiens
tctttgcgcaccaccgcctctcactggacctgctgagccaaatgagcccaggggacctggccaaggtgggcagcagccgtctgcatggaggggaggggcaygcaaggccgctgtcctgaccagccgggggttgatctgctccttgtgtagtcctcgttgaggcctgtccttacctaatggcccagggccaccttgcttcca

SEQ ID NO: 49860 - DNA, 201 bp, Homo sapiens
gctcccctgctcatctccatcactgtgtctcctgtgctgggtgcgggcccgccgctgagctcctgtctctctctgtaggccgtgctttaggcccccaggcrcacatcctccagggctggagcttttgggtgtcccgggttgtctggaggagagggcccagccgcatctgtgtaactccctgcaggcagcatctctggggct

SEQ ID NO: 49861 - DNA, 201 bp, Homo sapiens
atttcccccagaagagggcagggggagctgtgagccacggtggtcctgacgcctgctgaaaagtgacctcggcccaggaggaggcggtcctcctcatagaycctccctcatgtgacaagataccccccaccccccgcaggccggctgctgaccttcaagccttgggcaagcccacctacacggcttggtggtcaccgcctg

SEQ ID NO: 49862 - DNA, 201 bp, Homo sapiens
gttccctgaactaaccatgatccttccctcttcagggcctttgaacaagcagctccctctgtctggaatctccccactcacttgtcttatccttcagttcttttttttttttttttcctttttttgagacagggtcttgctccatcacccaggctggagtgcagtggtgtgatcatagctcgctgcagccttaacctcctg

SEQ ID NO: 49863 - DNA, 201 bp, Homo sapiens
ccctcaatttcctagcaattctcttattactcccagaaatcggtatactttatatcaaatatagaggctggggccaggtgtggtggctcacacctgtaatyccagcactttgggaggctgaggtgggcggatcacctgaggtcaggagttcgagaccagcctggccaacatggtgaaaccctgtctctactaaaaatacaa

SEQ ID NO: 49864 - DNA, 201 bp, Homo sapiens
ctgagatcccaccactgcactccagcctgggcaacagagtgagactctgtctcaaaaaaaaaaaaaaaaaaaaaaagacgggcctgggactcctggaaccyggtagggccagccacatgctcccgctctccctccccaggcccagatgatcttcctcaactgtggccacgtctgctgctgccagcagtgctgccagccact

SEQ ID NO: 49865 - DNA, 201 bp, Homo sapiens
agtattggatgccccccaaatgtttgtcagtgagaaggcactgcccctgggtcatgtgcacaccatgagatggagcatttgagcctcggctcgctgggacrcatggattagtgaaaagggcagattgcagaacaggatgggctagtctatttccattcttatgtttaaaaagaaaactcaatcaacaccagcctgggcaat

SEQ ID NO: 49866 - DNA, 201 bp, Homo sapiens
ttaaaaagaaaactcaatcaacaccagcctgggcaatgtggcgagaccctgtctctacaaaaaatacaaaaaaattagccaggcatagtggcacgtgcctrtggtcccagctacgagggaggctaaggtgggaggatggcttaagcccaggaggttggagtttgcagtgagctaagattacaccactgcaccccatcctga

SEQ ID NO: 49867 - DNA, 201 bp, Homo sapiens
ccccgtgtgcagatggacactgtagcctactgggaggagctggccggaggtcacacaaaaaggattggcaaggcagggtgggaaagccagcctcctaaccycagtcagtacccctcacggcgtctgagggggtcccaggggctcaggacccctacctccggctgcaggagcagtcccggctggagcagggcctgagtgagc

SEQ ID NO: 49868 - DNA, 201 bp, Homo sapiens
ggcagtgaacccctgggcctatctatctatctatctctgtgtgcctacctatgagtttttgtaggaaaaatcccgagtacattctatgtattatgttatawatattcaaacccttcatttcctgttgtaaacagtgggttcttttcttccttcctgctcatggtacacgtttctgtcttgcaggaagaggggatggagcgc

SEQ ID NO: 49869 - DNA, 201 bp, Homo sapiens
ccgtgtgcagatggacactgtagcctactgggaggagctggccggaggtcacacaaaaaggattggcaaggcagggtgggaaagccagcctcctaaccccrgtcagtacccctcacggcgtctgagggggtcccaggggctcaggacccctacctccggctgcaggagcagtcccggctggagcagggcctgagtgagcac

SEQ ID NO: 49870 - DNA, 201 bp, Homo sapiens
tccgggttgggattgtttgtagactgaggagttcagggcctgggcaagtgcatcaacaagaaagaagcctgaacaccctgcgtgccctccggcaggggccrgcggaataggcctccgtcgcctgtccagagcgcaggaatataatccccagttttatttaagaaagaatcagttggggcatttatatgggtatttatattt

SEQ ID NO: 49871 - DNA, 201 bp, Homo sapiens
gtgctgggaaggttatgatcaggatggctgcagggggatcccttctcagatggaaggaagatgtagacctctaaggtctctttcacccttgaagatccagkttttaaggaagggcattagattccccattgggagagttcatgatactgacccgcatccccgtggtggtgtctgggagagcaagatggtggggcgtggcac

SEQ ID NO: 49872 - DNA, 201 bp, Homo sapiens
tgttccgccagtaggtgcatatggaagggccttgatgggaagtttgacagagagagggccagtgtagctggagggaggaagcagagagaagagagatgggrgaagccaaagacagtgcccgggcccagtgtccagtgggagagcatgtgatcagtcattaggctgcagggaggagaagggattggaggaggaaagaaagag

SEQ ID NO: 49873 - DNA, 201 bp, Homo sapiens
cagttccaggtgcaggggcttaaactatcacaaagggataaatgcaggggctttatgtgccatccactgcgcgtgtccccaggagctgctggtgcagctcrcctcaatatcttatcagtaagtgcattcctggatgtgctttgagtcagtttacactagttatgcccttaagggagggagggaagggggctgcaggtgaag

SEQ ID NO: 49874 - DNA, 201 bp, Homo sapiens
actcttaatctctggttcctagatgccaccctttcccgttttccactgctgctgggaatgcatttgggattttattattattattattattattattttayagttcagcaagaattagagagggaggagaaggctgtatgtgaaaattgtgccagttcacattctcagaaaatatttgcaacacagtcactggctgaagga

SEQ ID NO: 49875 - DNA, 201 bp, Homo sapiens
cttccctgcttcccaaatcctgcagcctcctgagtctggcaaccatcaaggtactgggccctcctcccaggcagctggggctctgcatggggttccacgcrgcagctgagcgcctgctccttttgggctgcctcttgcatgtcagaggggcccaatctaccagtcagtctgggatttgatcagtatggtttactggatact

SEQ ID NO: 49876 - DNA, 201 bp, Homo sapiens
ccggcgcaggccccagcgctcctacagctcagacagacagaggcgtctcaggggcatatagtatttcccccagaagagggcagggggagctgtgagccacsgtggtcctgacgcctgctgaaaagtgacctcggcccaggaggaggcggtcctcctcatagaccctccctcatgtgacaagataccccccaccccccgcag

SEQ ID NO: 49877 - DNA, 201 bp, Homo sapiens
gaagctgcggtcatcatgcctggcgggtgccctagtccctgcccacaagtgtggcagggctctggctgttggggcccccatggggtttccaagagcaggcrcaggagtgaagcagggaccccaggctctggtttgcacgcacctccatttgtgtggggccccacactgctccccgccatttgcttctgcccatgtgctctg

SEQ ID NO: 49878 - DNA, 201 bp, Homo sapiens
agacagagggcagagctcctctgtggctgtgacaccagaggacaccccccagccccagaaggcccagcgcaggccaaggttagaggtggtcagcctgttgygaggcaggagggtcagaggaaggagggtttcattgccaaggctcccctgctcatctccatcactgtgtctcctgtgctgggtgcgggcccgccgctgagc

SEQ ID NO: 49879 - DNA, 201 bp, Homo sapiens
gatacaaaaattagcctgtcgtgatagtgggcacctgtaatcccagctactcgggaggctgaggaaggagaattgcttgaacctgggaggcagaggttgcrgtgagccgagatcgcgccactgaactccagcctgggtgacagagcgagactgtctcaaaaaaaaaaaaaaaaaagagacttagcattttgtaagggctgc

SEQ ID NO: 49880 - DNA, 201 bp, Homo sapiens
agtgagcacctggctctgagttcaggacagtgtacttcgtgtgtgccaagttatgtgagcaccaagcagtcgggcaaatcccataggtcaggacttgagaraccacggttccaggctgcaatccaggctgtacagccaggccactgaacttaataagcatctacttcttcactttatttatttatttattattattttctg

SEQ ID NO: 49881 - DNA, 201 bp, Homo sapiens
gagggttcctgtggctcctgagagccagggccgtatggccgtatggggaggagggcagctgggccccgagcctcagtcactcatatttataatggtgagtrtagaggactgatggggcgagagctcctaaggagccgcagtaaggttctgagcagtgcttccacctccagcgacgcaccaagcctcctgaggagtccactg

SEQ ID NO: 49882 - DNA, 201 bp, Homo sapiens
ggtcgctgtaaatggactgacccctgctgggtcagctgtcttcatggtaaccagagacaggctgtctggagggttcctgtggctcctgagagccagggccrtatggccgtatggggaggagggcagctgggccccgagcctcagtcactcatatttataatggtgagtgtagaggactgatggggcgagagctcctaagga

SEQ ID NO: 49883 - DNA, 201 bp, Homo sapiens
ttacagacactgtgcaggccctgggcaggcagtgagcacctggctctgagttcaggacagtgtacttcgtgtgtgccaagttatgtgagcaccaagcagtygggcaaatcccataggtcaggacttgagagaccacggttccaggctgcaatccaggctgtacagccaggccactgaacttaataagcatctacttcttca

SEQ ID NO: 49884 - DNA, 201 bp, Homo sapiens
agaaaaggaaagccataaagttagagatgatatttgcaatacatatatatccaacaaaggactgggatctggactataaacagaaatcctacagatccacraggaaaagacattagcaaaagacttgactaagaatttttacacaagagaatatccacacggtggctcacacctgtaatcccagcactttgggaggctgag

SEQ ID NO: 49885 - DNA, 201 bp, Homo sapiens
ttttaaacgtggcatgctgcatacccttttcgagcagcctgtttccgcacattcttttcaagtcattaaactattccttgacgtcctttctcaaggctgtscgtggcccctattgttgagtatgtggattacttctggtttttaaacttttctaggcaatgctctccgaatgcctttgtagtcgagtattcgggaacagcc

SEQ ID NO: 49886 - DNA, 201 bp, Homo sapiens
tcgagaactctcgggacagccctgatgggcccacggacagattctcaagggaggagttagagtggcaggtaagacaaggcagcctgctgcacgcatacatrtgtgtgtgtgcgtgtgcatgtatgtgtgttgagggagctgggaatggaagggggcggtggttcagagctgcagctcccagattcctccatagaactagaa

SEQ ID NO: 49887 - DNA, 201 bp, Homo sapiens
ccacccacctcagcctcccaaagtgctgggattacaggtgttagccaccgtgcctggcccccattgcatctatttttaatggttagtgtgtcatcctgctrgccttgctcacctcgaggtaccaccttctggagggagcacagcttcggaatccaacaagccctggttcagtcccagcaccactgccggcctgaggccttg

SEQ ID NO: 49888 - DNA, 201 bp, Homo sapiens
cagctccctctgtctggaatctccccactcacttgtcttatccttcagttcttttttttttttttttcctttttttgagacagggtcttgctccatcaccsaggctggagtgcagtggtgtgatcatagctcgctgcagccttaacctcctgggcttaagtgatcctcccacctcagactcccaaagtgctgggattatag

SEQ ID NO: 49889 - DNA, 201 bp, Homo sapiens; identical to SEQ ID NO: 44298

SEQ ID NO: 49890 - DNA, 201 bp, Homo sapiens; identical to SEQ ID NO: 44300

SEQ ID NO: 49891 - DNA, 201 bp, Homo sapiens; identical to SEQ ID NO: 44302

SEQ ID NO: 49892 - DNA, 201 bp, Homo sapiens; identical to SEQ ID NO: 44836

SEQ ID NO: 49893 - DNA, 201 bp, Homo sapiens; identical to SEQ ID NO: 44426

SEQ ID NO: 49894 - DNA, 201 bp, Homo sapiens; identical to SEQ ID NO: 46333

SEQ ID NO: 49895 - DNA, 201 bp, Homo sapiens; identical to SEQ ID NO: 44427

SEQ ID NO: 49896 - DNA, 201 bp, Homo sapiens; identical to SEQ ID NO: 46335

SEQ ID NO: 49897 - DNA, 201 bp, Homo sapiens; identical to SEQ ID NO: 44050

SEQ ID NO: 49898 - DNA, 201 bp, Homo sapiens; identical to SEQ ID NO: 44432

SEQ ID NO: 49899 - DNA, 201 bp, Homo sapiens; identical to SEQ ID NO: 46448

SEQ ID NO: 49900 - DNA, 201 bp, Homo sapiens; identical to SEQ ID NO: 43946

SEQ ID NO: 49901 - DNA, 201 bp, Homo sapiens; identical to SEQ ID NO: 44189

SEQ ID NO: 49902 - DNA, 201 bp, Homo sapiens; identical to SEQ ID NO: 44191

SEQ ID NO: 49903 - DNA, 201 bp, Homo sapiens; identical to SEQ ID NO: 44065

SEQ ID NO: 49904 - DNA, 201 bp, Homo sapiens; identical to SEQ ID NO: 44193

SEQ ID NO: 49905 - DNA, 201 bp, Homo sapiens; identical to SEQ ID NO: 44069

SEQ ID NO: 49906 - DNA, 201 bp, Homo sapiens; identical to SEQ ID NO: 44196

SEQ ID NO: 49907 - DNA, 201 bp, Homo sapiens; identical to SEQ ID NO: 44072

SEQ ID NO: 49908 - DNA, 201 bp, Homo sapiens; identical to SEQ ID NO: 44199

SEQ ID NO: 49909 - DNA, 201 bp, Homo sapiens; identical to SEQ ID NO: 44201

SEQ ID NO: 49910 - DNA, 201 bp, Homo sapiens; identical to SEQ ID NO: 44203

SEQ ID NO: 49911 - DNA, 201 bp, Homo sapiens; identical to SEQ ID NO: 44311

SEQ ID NO: 49912 - DNA, 201 bp, Homo sapiens; identical to SEQ ID NO: 44207

SEQ ID NO: 49913 - DNA, 201 bp, Homo sapiens; identical to SEQ ID NO: 44312

SEQ ID NO: 49914 - DNA, 201 bp, Homo sapiens; identical to SEQ ID NO: 44313

SEQ ID NO: 49915 - DNA, 201 bp, Homo sapiens; identical to SEQ ID NO: 45608

SEQ ID NO: 49916 - DNA, 201 bp, Homo sapiens; identical to SEQ ID NO: 44314

SEQ ID NO: 49917 - DNA, 201 bp, Homo sapiens; identical to SEQ ID NO: 45610

SEQ ID NO: 49918 - DNA, 201 bp, Homo sapiens; identical to SEQ ID NO: 46588

SEQ ID NO: 49919 - DNA, 201 bp, Homo sapiens; identical to SEQ ID NO: 44315

SEQ ID NO: 49920 - DNA, 201 bp, Homo sapiens; identical to SEQ ID NO: 46590

SEQ ID NO: 49921 - DNA, 201 bp, Homo sapiens; identical to SEQ ID NO: 45612

SEQ ID NO: 49922 - DNA, 201 bp, Homo sapiens; identical to SEQ ID NO: 45617

SEQ ID NO: 49923 - DNA, 201 bp, Homo sapiens; identical to SEQ ID NO: 45619

SEQ ID NO: 49924 - DNA, 201 bp, Homo sapiens; identical to SEQ ID NO: 46377

SEQ ID NO: 49925 - DNA, 201 bp, Homo sapiens; identical to SEQ ID NO: 47053

SEQ ID NO: 49926 - DNA, 201 bp, Homo sapiens; identical to SEQ ID NO: 46383

SEQ ID NO: 49927 - DNA, 201 bp, Homo sapiens; identical to SEQ ID NO: 44229

SEQ ID NO: 49928 - DNA, 201 bp, Homo sapiens; identical to SEQ ID NO: 44230

SEQ ID NO: 49929 - DNA, 201 bp, Homo sapiens; identical to SEQ ID NO: 44231

SEQ ID NO: 49930 - DNA, 201 bp, Homo sapiens; identical to SEQ ID NO: 44233

SEQ ID NO: 49931 - DNA, 201 bp, Homo sapiens; identical to SEQ ID NO: 44235

SEQ ID NO: 49932 - DNA, 201 bp, Homo sapiens; identical to SEQ ID NO: 44238

SEQ ID NO: 49933 - DNA, 201 bp, Homo sapiens; identical to SEQ ID NO: 46712

SEQ ID NO: 49934 - DNA, 201 bp, Homo sapiens; identical to SEQ ID NO: 44242

SEQ ID NO: 49935 - DNA, 201 bp, Homo sapiens; identical to SEQ ID NO: 46713

SEQ ID NO: 49936 - DNA, 201 bp, Homo sapiens; identical to SEQ ID NO: 46492

SEQ ID NO: 49937 - DNA, 201 bp, Homo sapiens; identical to SEQ ID NO: 44244

SEQ ID NO: 49938 - DNA, 201 bp, Homo sapiens; identical to SEQ ID NO: 46714

SEQ ID NO: 49939 - DNA, 201 bp, Homo sapiens; identical to SEQ ID NO: 44247

SEQ ID NO: 49940 - DNA, 201 bp, Homo sapiens; identical to SEQ ID NO: 47067

SEQ ID NO: 49941 - DNA, 201 bp, Homo sapiens; identical to SEQ ID NO: 46866

SEQ ID NO: 49942 - DNA, 201 bp, Homo sapiens; identical to SEQ ID NO: 47095

SEQ ID NO: 49943 - DNA, 201 bp, Homo sapiens; identical to SEQ ID NO: 47110

SEQ ID NO: 49944 - DNA, 201 bp, Homo sapiens; identical to SEQ ID NO: 46280

SEQ ID NO: 49945 - DNA, 201 bp, Homo sapiens; identical to SEQ ID NO: 46402

SEQ ID NO: 49946 - DNA, 201 bp, Homo sapiens; identical to SEQ ID NO: 46404

SEQ ID NO: 49947 - DNA, 201 bp, Homo sapiens; identical to SEQ ID NO: 46410

SEQ ID NO: 49948 - DNA, 201 bp, Homo sapiens; identical to SEQ ID NO: 44120

SEQ ID NO: 49949 - DNA, 201 bp, Homo sapiens; identical to SEQ ID NO: 46513

SEQ ID NO: 49950 - DNA, 201 bp, Homo sapiens; identical to SEQ ID NO: 44270

SEQ ID NO: 49951 - DNA, 201 bp, Homo sapiens; identical to SEQ ID NO: 46516

SEQ ID NO: 49952 - DNA, 201 bp, Homo sapiens; identical to SEQ ID NO: 44271

SEQ ID NO: 49953 - DNA, 201 bp, Homo sapiens; identical to SEQ ID NO: 44272

SEQ ID NO: 49954 - DNA, 201 bp, Homo sapiens; identical to SEQ ID NO: 46521

SEQ ID NO: 49955 - DNA, 201 bp, Homo sapiens; identical to SEQ ID NO: 44273

SEQ ID NO: 49956 - DNA, 201 bp, Homo sapiens; identical to SEQ ID NO: 44275

SEQ ID NO: 49957 - DNA, 201 bp, Homo sapiens; identical to SEQ ID NO: 44276

SEQ ID NO: 49958 - DNA, 201 bp, Homo sapiens; identical to SEQ ID NO: 46530

SEQ ID NO: 49959 - DNA, 201 bp, Homo sapiens; identical to SEQ ID NO: 46758

SEQ ID NO: 49960 - DNA, 201 bp, Homo sapiens; identical to SEQ ID NO: 47161

SEQ ID NO: 49961 - DNA, 201 bp, Homo sapiens; identical to SEQ ID NO: 46133

SEQ ID NO: 49962 - DNA, 201 bp, Homo sapiens; identical to SEQ ID NO: 46135

SEQ ID NO: 49963 - DNA, 201 bp, Homo sapiens; identical to SEQ ID NO: 46137

SEQ ID NO: 49964 - DNA, 201 bp, Homo sapiens; identical to SEQ ID NO: 44145

SEQ ID NO: 49965 - DNA, 201 bp, Homo sapiens; identical to SEQ ID NO: 44155

SEQ ID NO: 49966 - DNA, 201 bp, Homo sapiens; identical to SEQ ID NO: 44286

SEQ ID NO: 49967 - DNA, 201 bp, Homo sapiens; identical to SEQ ID NO: 44159

SEQ ID NO: 49968 - DNA, 201 bp, Homo sapiens; identical to SEQ ID NO: 44287

SEQ ID NO: 49969 - DNA, 201 bp, Homo sapiens; identical to SEQ ID NO: 44163

SEQ ID NO: 49970 - DNA, 201 bp, Homo sapiens; identical to SEQ ID NO: 46557

SEQ ID NO: 49971 - DNA, 201 bp, Homo sapiens; identical to SEQ ID NO: 44288

SEQ ID NO: 49972 - DNA, 201 bp, Homo sapiens; identical to SEQ ID NO: 44289

SEQ ID NO: 49973 - DNA, 201 bp, Homo sapiens; identical to SEQ ID NO: 44291

SEQ ID NO: 49974 - DNA, 201 bp, Homo sapiens; identical to SEQ ID NO: 44293

SEQ ID NO: 49975 - DNA, 201 bp, Homo sapiens; identical to SEQ ID NO: 44296

SEQ ID NO: 49976 - DNA, 201 bp, Homo sapiens; identical to SEQ ID NO: 8256

SEQ ID NO: 49977 - DNA, 201 bp, Homo sapiens; identical to SEQ ID NO: 8334

SEQ ID NO: 49978 - DNA, 201 bp, Homo sapiens; identical to SEQ ID NO: 8257

SEQ ID NO: 49979 - DNA, 201 bp, Homo sapiens; identical to SEQ ID NO: 23259

SEQ ID NO: 49980 - DNA, 201 bp, Homo sapiens; identical to SEQ ID NO: 19281

SEQ ID NO: 49981 - DNA, 201 bp, Homo sapiens; identical to SEQ ID NO: 22116

SEQ ID NO: 49982 - DNA, 201 bp, Homo sapiens; identical to SEQ ID NO: 18321

SEQ ID NO: 49983 - DNA, 201 bp, Homo sapiens; identical to SEQ ID NO: 49159

SEQ ID NO: 49984 - DNA, 201 bp, Homo sapiens
ggtatttgactttctgagttattttactcaagataatggcctccaacccatccatgttgctgcaaaagacatgatttcattctttaaatatcctttcctgycttgagatcaaggaaatattgcctacatcttccccttaacattttctttttaatatttaactcttcaatacatttgggacttacttttatgtatgatgtg

SEQ ID NO: 49985 - DNA, 201 bp, Homo sapiens
tacccagtagagcctcaaaacatgtctgctaaaatgggaggcttttgttttcattttgttgctgcttgcaactatacaataaataaatacttattttggcwaagcagtacttaaatcaaaaaggaaattatctttgtgttattgatttttcttttcatattaataatgcttaactaacatttccctctggatgtccggtca

SEQ ID NO: 49986 - DNA, 201 bp, Homo sapiens; identical to SEQ ID NO: 49165

SEQ ID NO: 49987 - DNA, 201 bp, Homo sapiens
cagactgacatttcaacaagtacttctcatcatagctttttcagaagctctgaaaaagcatctgggggcatactgacattatcagatttttagggtggatratggaaataggacatttgctttaacccttcccaacaataaagcaagaaaccaacgaactgtcttcctacgtcaatcaagccgaattgattctgaaattta

SEQ ID NO: 49988 - DNA, 201 bp, Homo sapiens; identical to SEQ ID NO: 49166

SEQ ID NO: 49989 - DNA, 201 bp, Homo sapiens; identical to SEQ ID NO: 49168

SEQ ID NO: 49990 - DNA, 201 bp, Homo sapiens; identical to SEQ ID NO: 49170

SEQ ID NO: 49991 - DNA, 201 bp, Homo sapiens; identical to SEQ ID NO: 49171

SEQ ID NO: 49992 - DNA, 201 bp, Homo sapiens; identical to SEQ ID NO: 49174

SEQ ID NO: 49993 - DNA, 201 bp, Homo sapiens
gcaagcatcaccatcatcactaatcaactgaatctcattttgaacaaaatgagaatgcttatcaagactaccttataatacatttaaggaggccaggcacatacccataatcccagcactttggaagggtgaggtgggaggattgtttgaggccaggagttcgagaccagcgtgggcaacatagcaagacctcatctctac

SEQ ID NO: 49994 - DNA, 201 bp, Homo sapiens
atttgccttttcattaatgatttttaacatatagaagtttaaatttgtatttaacaaaatacatcaactcctattatgtattatttctttgcgtttaatctttttttttttttttgaaacaaagtttcactcttgttgcccaggctggagtgccatggcacgatctcggctcaccaccacctccgcctcccgggttcaaga

SEQ ID NO: 49995 - DNA, 201 bp, Homo sapiens; identical to SEQ ID NO: 49179

SEQ ID NO: 49996 - DNA, 201 bp, Homo sapiens
gtcaggctggataaaggagcatcttacccttcccaggacagactagtcggcctctgcagtctgactaaaaaccaaggagaccaaatgtgaagtcagcgtgsgacacaagagattcgagcggtgggtctaaggaaaggcttagatgctttgcctttgaaatctggtatgctggaaatctctgctgaggaagtttgaattcac

SEQ ID NO: 49997 - DNA, 201 bp, Homo sapiens
attcttatcctatggaaggatcccagcattagagactctgcccctttctgtgggaaagaatctatcttttttggatttgtttgatgtgctaactaacactycccccagtcacaccactagccatcaatcaaacagataaaccccttaggaatatctagtcaattgctaatcatttgaagacatcagccagtagaagggcat

SEQ ID NO: 49998 - DNA, 201 bp, Homo sapiens
gaggcttagtgagatatactaatctgcacaagactacatgtttaggttctatgagtggcagggtgaggtttaaacacttgtctctccaacgtccactccakgctgtttgcctctgtgtatgtaacttcaaacagccaaaatggccaagtaaggcaagaaaataaaaaaataaaaaacaaacaagtgaaaggcctgggtcct

SEQ ID NO: 49999 - DNA, 201 bp, Homo sapiens; identical to SEQ ID NO: 49160

SEQ ID NO: 50000 - DNA, 201 bp, Homo sapiens; identical to SEQ ID NO: 49161

SEQ ID NO: 50001 - DNA, 201 bp, Homo sapiens; identical to SEQ ID NO: 49162

SEQ ID NO: 50002 - DNA, 201 bp, Homo sapiens; identical to SEQ ID NO: 49164

SEQ ID NO: 50003 - DNA, 201 bp, Homo sapiens; identical to SEQ ID NO: 49169

SEQ ID NO: 50004 - DNA, 201 bp, Homo sapiens; identical to SEQ ID NO: 49167

SEQ ID NO: 50005 - DNA, 201 bp, Homo sapiens; identical to SEQ ID NO: 49173

SEQ ID NO: 50006 - DNA, 201 bp, Homo sapiens; identical to SEQ ID NO: 49176

SEQ ID NO: 50007 - DNA, 201 bp, Homo sapiens; identical to SEQ ID NO: 49175

SEQ ID NO: 50008 - DNA, 201 bp, Homo sapiens
caaaatgcttacgggccttacaatgagataacatcaggaggaacggtgcgtggaatggatctggcattctcacataaagcattatctttggtacaagtacrcacggcagggcattttggcttcgctggtttcttcccctcagtcagcaaaagcgcagataagagacataggaaataagcaattcttttcaggggaatgcag

SEQ ID NO: 50009 - DNA, 201 bp, Homo sapiens; identical to SEQ ID NO: 49177

SEQ ID NO: 50010 - DNA, 201 bp, Homo sapiens; identical to SEQ ID NO: 49178

SEQ ID NO: 50011 - DNA, 201 bp, Homo sapiens; identical to SEQ ID NO: 49180

SEQ ID NO: 50012 - DNA, 201 bp, Homo sapiens
tatgtaactagatctatgtaacttcctaggggaagggaggtgccttagcatatcaaaaggatgctttttaaaagagctatttattcatttaacaagtgagsaccagaaacacaatttatcactttctcagagacagcaaattcttatcctatggaaggatcccagcattagagactctgcccctttctgtgggaaagaatc

SEQ ID NO: 50013 - DNA, 201 bp, Homo sapiens; identical to SEQ ID NO: 49181

SEQ ID NO: 50014 - DNA, 201 bp, Homo sapiens; identical to SEQ ID NO: 49183

SEQ ID NO: 50015 - DNA, 201 bp, Homo sapiens; identical to SEQ ID NO: 49182

SEQ ID NO: 50016 - DNA, 201 bp, Homo sapiens
cttatatttgtttggtctttatcctgtttaaaaatctacttccagaattccaccttcccctaaaaatgaggaagatagggctccatgtgcatgtaccacawtcccatcagcaatagtcagttggagcagaggatttttaggtaagacatgtcttctctggtttacctcagtcaccactactccttattgtcttatactcaa

SEQ ID NO: 50017 - DNA, 201 bp, Homo sapiens; identical to SEQ ID NO: 49184

SEQ ID NO: 50018 - DNA, 201 bp, Homo sapiens
tattcatcttaattcagctgccataatactgcataaaggatgagggccgccaggcatgatggctcacacctgtaatcccagcactttgggaggccaaggcrggtggatcacctgaggtcaggaattcgagaccagcctggctaacatggtgaaaccctgtttctattaaaaatacaaaaaattagccaggcgtggtggcag

SEQ ID NO: 50019 - DNA, 201 bp, Homo sapiens
ttaccagttattgtatcaaggccggagacctctaggctaattatacccaaggcctaaggaggccggcctgtctgggaggagcctgtggggtctcaggagcrggggggatttcaccatgacactcgtttacctaggtctcctaacttcagcctactggggtcacctgcagctgccctagaattctagaagcctgaatcagcc

SEQ ID NO: 50020 - DNA, 201 bp, Homo sapiens
ttgtattaatacaaataattagacaaaatattcatcctactataatgcatcaggttttcaggccttggacttggacacttcattttctgaattgaggctcrttaagaatgccttttgagcagagggtgaggaagagtccaacagcttacgttcttgagcccacttctctcagactgggggtttgaacagaaaaatgcagca

SEQ ID NO: 50021 - DNA, 201 bp, Homo sapiens
tccagtctggccacccaaagcaatgcacaggtttgattttccttgtttctccatcttcattgaaccatcacatcaacagctcttctccaggaccccttttygcttcatcacatcttcctttggcgggtcttttcctgcccagtgtgcattcacatcctcctgtacaagtaccctgatgtgccccagggaaactcctcccac

SEQ ID NO: 50022 - DNA, 201 bp, Homo sapiens
acgtgatctgaagaaaacaaaaaagcaacagaatagagagagactgccagttataagtgggttatatgagtgttcgagaaggcaatatttgagttgagacytaaaagataagaagggaccaacttaaccaagaatgttgtatacaaaaggaatagcttgttaaagattctaagatgaatgaacgaatgaataggtttgttc

SEQ ID NO: 50023 - DNA, 201 bp, Homo sapiens
cccttttgtagagattcactctaaatccaggttgctttcaactatagaacttttccctttgagttcaggtggcctttctcctccacctcctggggtacttstgacccccactaccccaccgcccccaagtcacggtgctgtcattattcatcttaattcagctgccataatactgcataaaggatgagggccgccaggcat

SEQ ID NO: 50024 - DNA, 201 bp, Homo sapiens
gacatttccacaataatccatgattgtgtttacccaacaaagctctactgagcatcttctattcattaattcacccaacaagggtttattcagtatctacyagagaggcattgtaatgtggcgattaggaacacatgctctggagccttgaatccagactctgccacttactagctgtatgcccttgagctactgcattca

SEQ ID NO: 50025 - DNA, 201 bp, Homo sapiens
gaggcaggagaatcgcttgaacccaggaggtggaggttgcagtgagtggagatcatgccattgcactccagcttgagccacaagagcaaaactccgtcccaaaaaaaaaaaaaaaaggacaagggcacaggcctcacctgtccagcaggtcattatgatttctgtgtctccttacacagtggaaaaaaagacaatgatggc

SEQ ID NO: 50026 - DNA, 201 bp, Homo sapiens
aaaaatagtacctactgcaagactactggaaaatgagtggagagtggatgtgaaacacttggcacagtgcctagaacataagaacacgtaaacaggagtabctgctgctgctgctgctgctgctgctgctgctgctgctgctgctgctgctgttgttaaagtggttttgtcctgaaaggacttactcccaatatagtctta

SEQ ID NO: 50027 - DNA, 201 bp, Homo sapiens
caagctaacttttggaagacattatatttaaatattgggtctgaggactcagagctcaatttcctcaagaaataatgtcactgatggtggtgagtttcctaaaaaaagtccagggaagcctatttgacacatagtttaagatgctactaaaggcatcatccttctttcagaaagagaaaattaaagcattgggctgatgct

SEQ ID NO: 50028 - DNA, 201 bp, Homo sapiens
aacttttggaagacattatatttaaatattgggtctgaggactcagagctcaatttcctcaagaaataatgtcactgatggtggtgagtttcctaaaaaamgtccagggaagcctatttgacacatagtttaagatgctactaaaggcatcatccttctttcagaaagagaaaattaaagcattgggctgatgcttctaaa

SEQ ID NO: 50029 - DNA, 201 bp, Homo sapiens
ttcagtcaaaaacctggcggagtgcctgttgtttactgaagctggggaagaagcatctgcaacattacgaaaagcatattgtaaaaggcaacacatgcaarttaaacctcttgagctatgagtaaattgctgggaaaatttataactcatttaataaaacttgaagtaaatacatagtctggctcccagggaaaacaaaat

SEQ ID NO: 50030 - DNA, 201 bp, Homo sapiens
ccctgggggccctagcaaatgctttctgtcatcctattaacactactttctaattaggaccagtgcaaacctgatacttaggcagaaatgtctgtttattkatttattttgcgtgtggaaaaaaatattaaaaagatgtccaaaaagaagattcagaaaatctttgctcctgcccctcaggaattcgactcagctccccag

SEQ ID NO: 50031 - DNA, 201 bp, Homo sapiens
tggtgtggtctcggctcactgcaacctccacttcccacgttcgagtgattctcctgcctcagcctcctcagtacctgggattacagatgcccaccaccatkcccagctaatgttcgtatttttagtagagctggggtttcaccaagttggccaggatggtctcgatctcttgacctcgtgatctgcccgcctcagcctccc

SEQ ID NO: 50032 - DNA, 201 bp, Homo sapiens
ccaaccagggtgtcatctctcacagactgctgaggttggtgggtatgtggcccaatcagggactggaagacccagtctgggatcttgtggaactgctggtragaggaaatctctcttttttgactgaggttgatgagaagagaatatgaaagccttgtggagttcacagccacgttgcctcccttaggggaagtttacctg

SEQ ID NO: 50033 - DNA, 201 bp, Homo sapiens
gccacccaaagcaatgcacaggtttgattttccttgtttctccatcttcattgaaccatcacatcaacagctcttctccaggaccccttttcgcttcatcrcatcttcctttggcgggtcttttcctgcccagtgtgcattcacatcctcctgtacaagtaccctgatgtgccccagggaaactcctcccacctccctcca

SEQ ID NO: 50034 - DNA, 201 bp, Homo sapiens
aagcctagaataaaagggatgctctgaatttaaaatgctgtctagaaaacatcttgaccaactcctgttgatacaagagcctttctaccatgttggctttrtcatccagtctggccacccaaagcaatgcacaggtttgattttccttgtttctccatcttcattgaaccatcacatcaacagctcttctccaggacccct

SEQ ID NO: 50035 - DNA, 201 bp, Homo sapiens
aaccatgttcaatactatactagtgtcatgaaagaagtacaccatcatcacataagctagttgtaatgccaggttaaacaacatctaaaagctttcattaytgccaaacttcttggagccattcatatgacaacgagcattgcaaatgccaatcctccctcccccagtggaaagaaggtacaacatcttttaatctgtcaa

SEQ ID NO: 50036 - DNA, 201 bp, Homo sapiens
gcggggagcaaccatattttaccagcatttggtgtcagcgcaagtggcaaacacaacatcctaagaggagctatcgtgcctcctgcttcagaatggaaagygacacagaggtcattccattagtgatcgcagctgcttttaaacgaaacacatataacctgaatccaattaatgaaagtatctggccatcctcacagatgc

SEQ ID NO: 50037 - DNA, 201 bp, Homo sapiens
cagaaaggagaactgagagggaaaaagcatttcttcacacaattaatgatgtagctatgcacctccaaaatcatcttgggtaccaccagtagatgatgatrccagtaaagtgaatctcagtcagtcttcccagactccaaagaacagaattactgtgactagttcttgaggagaaaacccaaagaggcaaaagacaggaga

SEQ ID NO: 50038 - DNA, 201 bp, Homo sapiens
ggaaaaaaaaaaaaaagggaagaaaagaaccatcgagctagagggctctatctagtataaagtataaatagcaaatgtggtgtgagcagaccccatttacrgttatggggcatttcatacccacgtagacagtgccatgccctctgctcttggaggttgacaatgttcaggcctaagacatttccacaataatccatgatt

SEQ ID NO: 50039 - DNA, 201 bp, Homo sapiens
tctctcctcactaactctcagagctctccaaaataataggttctagcaatggttaagatccataggcccaaacaaccacattccttcattctaaagcctasaataaaagggatgctctgaatttaaaatgctgtctagaaaacatcttgaccaactcctgttgatacaagagcctttctaccatgttggctttgtcatcca

SEQ ID NO: 50040 - DNA, 201 bp, Homo sapiens
ttattgagcatccctgtgtgtcagatgccagggataccccaatgactacaacggatgggaccccagcccttgtggagttggattcccgcaatggaaggcaygcaacctgcatgggaaatgagggctgcagagtgtcgtggaggactctgaggctgtagagagaaagcaagaagcagaggtagctggggtgggagaaggggt

SEQ ID NO: 50041 - DNA, 201 bp, Homo sapiens
ccattttcatagattagttcattagactagcttttgcctgttgtgtcctgcaggaacacagatgatggacagggcagttctgagagtgggaagggacctgrgaaacagctggcacatatggactagctggtaattggggtgtgggaagaaacatggggaggaggggaaatcagagggtcctgagtggaatgaaggggtcct

SEQ ID NO: 50042 - DNA, 201 bp, Homo sapiens
tgcgcccggccagcttggttttattcattttagggagacatgagtcatcaatcaaatacatttaagaaatacattggtttggttcagaaaggcaggacaaygcaaagccggggcttccacgctataggtaaatttaaatactttctggttgacagttggttgagtttatctgaaggccggggatcaatggaaagaaaatgt

SEQ ID NO: 50043 - DNA, 201 bp, Homo sapiens
gtaaatgaatgtgtttacaaattacaagtaccaagaataagatgcattttgttctttgaaacagggtcttgctctgtcacccaggctgaagtgcagtggtrcaatcctagctcactgcagcctcaacctctcaggcaatcctcccacctcagcctcctgagtagctgagactacaggtgcacgctactacatccagctaat

SEQ ID NO: 50044 - DNA, 201 bp, Homo sapiens
actcccttttcaacacataaggtaacattcaatacaaatacctaatgtaacaggtcatctttaaaataaattgtttcctgccagcagaggtgtgctaaatmatcatcatcatcatcatcatcatcataatttatgagagatttggggctttcccaccttcttctttaattcaagattgctgtcccatacatcatcgataat

SEQ ID NO: 50045 - DNA, 201 bp, Homo sapiens
ctacaggcgcccgccaacacgcccggctaattttttgtatttttagtagagacggggtttcaccgtgttagccaggatggtctcgtgatccgcccgcctckgcctcttaaaatgctgggattacaggcgtgagccaccgcgcccggccagggacactttcatcacatatccatatggcttactctctcatttctattcaga

SEQ ID NO: 50046 - DNA, 201 bp, Homo sapiens
tggtggctcatgtctgtaattccagcactttggaaggccgaggtggctggatcacctgaggtcaagagttcgagaccagcctggccagcatggtgaaaccycatctctactaaaaatacagaaaattagtcgggcatggtggcagacgcctgtaatcccagcttctctggaggctgaggcaggagaattccttgaacccag

SEQ ID NO: 50047 - DNA, 201 bp, Homo sapiens
ggacccataaagcacaagcatttttccaaaggtaattttcaaggccagggcaagtaagtttctaagtcttagttttataaaactcttttttcaaagaaaawgacttacaataagaaaccgaagattcacaccactctccatattgcacaaaagagaaaaaagattgatatttttgtcaatatcgaccatttgacactttac

SEQ ID NO: 50048 - DNA, 201 bp, Homo sapiens
acctccagggaggtatgactccagtgccagattggtgctgggggaagaaaacaacaagaggaagcagctggcaccaaaaataaaccagtacacactaaaakgaataatttccttttcattggaaaaatggcccattccaggtctggggcacagaaatgtccaataaaaataaatctggacttaaggagatcattttttaaa

SEQ ID NO: 50049 - DNA, 201 bp, Homo sapiens
aggtatgactccagtgccagattggtgctgggggaagaaaacaacaagaggaagcagctggcaccaaaaataaaccagtacacactaaaaggaataatttscttttcattggaaaaatggcccattccaggtctggggcacagaaatgtccaataaaaataaatctggacttaaggagatcattttttaaaattattttat

SEQ ID NO: 50050 - DNA, 201 bp, Homo sapiens
tgtaatagaaccctgcttttatttgaaatagccatgtgttcaatttaaaaactcactttcccatcctcatttgcacttgtgctggtcatgtgacgctgctyttagcaataagatgaaggtggtggtttctgagggtagtgtccttttcagaataaaaagacaaagcttatttgccttcttcttcctttactttatattcct

SEQ ID NO: 50051 - DNA, 201 bp, Homo sapiens
ttcattggaaaaatggcccattccaggtctggggcacagaaatgtccaataaaaataaatctggacttaaggagatcattttttaaaattattttattttwttattattattattattattattattattattattattattatttgagatagagtcttgctctgtcacccaggctggagtgtagtggcatgatctcagct

SEQ ID NO: 50052 - DNA, 201 bp, Homo sapiens
gaaaaatggcccattccaggtctggggcacagaaatgtccaataaaaataaatctggacttaaggagatcattttttaaaattattttattttattattawtattattattattattattattattattattattatttgagatagagtcttgctctgtcacccaggctggagtgtagtggcatgatctcagctcactata

SEQ ID NO: 50053 - DNA, 201 bp, Homo sapiens
aaaatggcccattccaggtctggggcacagaaatgtccaataaaaataaatctggacttaaggagatcattttttaaaattattttattttattattattattattattattattattattattattattattatttgagatagagtcttgctctgtcacccaggctggagtgtagtggcatgatctcagctcactataac

SEQ ID NO: 50054 - DNA, 201 bp, Homo sapiens
ttggcatggatgtggtgaaaagggaacacttctacactgctgatgggagtgtaaagtaaatgcaaacgcatttaccactacagaaaacagtgtagagattmcttaaagaactaaaaatagaactaccattccatctagcaatcccactactgggtatctacccaaaggaaaagaagtcattatatgaaaaagacacctgca

SEQ ID NO: 50055 - DNA, 201 bp, Homo sapiens
caatgactggataaagaaaatgtggtatatatgcaccatggaatactactcaaccataaaagggaacgaaataatggcatttgcagcaacttggatggagygggaggccattattctaagtgaagtaatttaggaatggaaaacgaaatattgtatgttctcacttataaatgggagctaagctatgaggatgcaaaagca

SEQ ID NO: 50056 - DNA, 201 bp, Homo sapiens
cacttataaatgggagctaagctatgaggatgcaaaagcataagaatgatacaatagactttggactttggagactcaggaaaaggtgggaggggagtgarggataaaagactatagatcgggcaccgtgtacaatgctcaagtgacagttgcaccaaaatctcagaaatcaccactaaagaaagtatccatgtaagcaaa

SEQ ID NO: 50057 - DNA, 201 bp, Homo sapiens
gaaatcaccactaaagaaagtatccatgtaagcaaaaccacctgttccccaagaactattgaaataaaataaaatattttaaaaatgagtccatcaatgcrgcaaacttttttgttgtctgatttgaagaagttgccacatccactccagccttcagcaaccaccactcagatcagtcagaagtcatccatgttgaggcaa

SEQ ID NO: 50058 - DNA, 201 bp, Homo sapiens
caggttggaatgcagtggcacgatctccacttactgcaacctccacctcccgggttcaagagattctcctgcctcagcatccgaagtagctgggactacargcatgtgccaccacaccaggctaattttttttgtatttttagtagagacagggtttcaccatgttggtcaggctggtctcgaacttctgacctcaaatga

SEQ ID NO: 50059 - DNA, 201 bp, Homo sapiens
ccaataatgttctttatagaaaaagaagattctctggtctgggatccaatctaggttcacacagtacatttagttgtcatgtctctttggtctcaatctgyaacaattccttagtttttctttgtctttcatgatgttgacagtttaaaattttgtcttttggattatgtgatgttttgaattttgtaacatgtccctcaa

SEQ ID NO: 50060 - DNA, 201 bp, Homo sapiens
cgaagtagctgggactacaggcatgtgccaccacaccaggctaattttttttgtatttttagtagagacagggtttcaccatgttggtcaggctggtctcraacttctgacctcaaatgatctgcccacctcggcctcccaaagtgctggggttacaggcgtgagccaccgcgcctggacaaagatgttacttgctttttt

SEQ ID NO: 50061 - DNA, 201 bp, Homo sapiens
acctcaaatgatctgcccacctcggcctcccaaagtgctggggttacaggcgtgagccaccgcgcctggacaaagatgttacttgctttttttttgagacrgagttttgctcttgttgcccaggctagagtgcaatggtgtgatctcggctcactgcaacctccgcttcccgggttcaagcgattctcctgcctcagcttc

SEQ ID NO: 50062 - DNA, 201 bp, Homo sapiens
caggcgtgagccaccgcgcctggacaaagatgttacttgctttttttttgagacggagttttgctcttgttgcccaggctagagtgcaatggtgtgatctyggctcactgcaacctccgcttcccgggttcaagcgattctcctgcctcagcttccccagtagctgggattacaggcacctgccaccacgcccaactaatt

SEQ ID NO: 50063 - DNA, 201 bp, Homo sapiens
gttggtgtcctcaaccagtaaccattttatgagtctcaactcagtggggagtatatatgaaaaaattatttttcctcaaatcagtgctttcaaccatattmtactaaatccccttttcctatactttaacaacatgctggacagatatcatgattttccatttagattcctcactttcagtgtgaaaactgagttcagtcc

SEQ ID NO: 50064 - DNA, 201 bp, Homo sapiens
atgctccttatcaaactttcactgactagttgtagtatcaattaattacatttaaaaatttaaagaagggccgggtgtggtggctcacgcctgcactccaycctgggcgacaagagcaagactctgtctcaaaaaaaaaaaaaaaatttaaagaagaaacattgttttaaacttagattcaaacatcagtttgctacttat

SEQ ID NO: 50065 - DNA, 201 bp, Homo sapiens
tcctaaactcagacttcgcctcctgtattgcacctgaaagcacctgtaagtaccatctggccctccctatgttgccttatgggaattggggctcagggaayccaagctctgaagtcaccttggctgctgcttttactgtgaatacacgtctttgtctctgactcagagatctcctgttttctaacacgatgtatataaaaa

SEQ ID NO: 50066 - DNA, 201 bp, Homo sapiens
tgtggtggctcacgcctgcactccatcctgggcgacaagagcaagactctgtctcaaaaaaaaaaaaaaaatttaaagaagaaacattgttttaaacttarattcaaacatcagtttgctacttatcagctgtgtgaccttagggcaactcaccagatggctctgagcctcagtttcctcatgtgtagattgtagataata

SEQ ID NO: 50067 - DNA, 201 bp, Homo sapiens
gacgactgtctgtgaatcttcagcactcctacatgtttcgctcctgtgtgccaggattatctttctaggaatgcctagtgcaagcaggcagccctggagarataaagacaaggacttcccctgaagcaaatgtatttacattcctagataaataaagatcaaaacggtaactttcaccgagagatttacagacatctttcc

SEQ ID NO: 50068 - DNA, 201 bp, Homo sapiens
gctgtcccatacatcatcgataattatgctttctgctgacatagtcagattcaacactttaagtttgtcacacacattgttttgatattgagtgcttgatwtggaaattcttacaactgaaagtgttggaaaggatgagatttttaaaaggaaaatgaaggggaatgtccaaaaggagaagtttaagggaaaaaaaacttc

SEQ ID NO: 50069 - DNA, 201 bp, Homo sapiens
ggagcccctttctgggctggccaaggccggagcccactcccttagcttgcagggaggtgtggagggagaggcacgagcgggaaccggggctgcctgcggcrcttgcgggccagctggagttccgggtgggcgtgggcttggtgggccccgcactcgggcagccagtcagccctgctggccccaggtaatgggggacttagc

SEQ ID NO: 50070 - DNA, 201 bp, Homo sapiens
cctgggctcccagtttggtggcatttgaggatcccttcagcccccccactgcactgtgggagcccctttctgggctggccaaggccggagcccactccctyagcttgcagggaggtgtggagggagaggcacgagcgggaaccggggctgcctgcggcgcttgcgggccagctggagttccgggtgggcgtgggcttggtg

SEQ ID NO: 50071 - DNA, 201 bp, Homo sapiens
agagaataggctgtaaaatgtttcttatcagactgaattctgtgttgatattaatgccggagaggtataacaaggcatgtctgaccacccccttccatcayggcccgaaccagtctttcaggttaaattttaaaagtgccctggccaggagaaagtccattcagatggttggggggccttagaattttatttttggtttag

SEQ ID NO: 50072 - DNA, 201 bp, Homo sapiens
ctgaggcgggggaattgcttgaacctgggaggcggaggttgcagggaggcggaggttgcagggaggcggaggttgcagtgagccgagattgcgccactgcmctccagcctgggcgacactgcgagactctgtctcaaaaaaaaaaaaaaaaaaaaaaaaatttagtattagctatagggtttttttaaaaagtaggtctat

SEQ ID NO: 50073 - DNA, 201 bp, Homo sapiens
tgtggttaagaacttccccttatgccaggatgttgctcagaagggactgtcctaacttaggcacaggcggaataaatcaacctaagtgtccttggcccagmtcatcatagtgtcattaacatgacatttttgtggttttagccccttggtgggtttcacttaggcactcgtgggtaacaaccaagatggagtcactctggc

SEQ ID NO: 50074 - DNA, 201 bp, Homo sapiens
cttagctcccatttgtaagtgagaacacacaatatttggttttccattcctaagttacttcacttagggcctcccactccatccagttgctgcaaatgccrttatttcattcctttttatggttgagtagtattccaaggtgcatatataccacattttctttatccagtcgttggttgatgggcacttaggttggttcca

SEQ ID NO: 50075 - DNA, 201 bp, Homo sapiens
tgcctggcctcttctagcatttttgtgctttcaggtcttagatttaagtggtttttttttgtttgtttttgtttttgtttttgacagtctcactctgtccscaggctggagtgcagtggcgtgatcttggctcactgcaacctctgcctcccgggttcaagcgattctcctgcctcagcttccccagtagctgggattaca

SEQ ID NO: 50076 - DNA, 201 bp, Homo sapiens
ggggtttcaccgtgttagccaagatggtctcgatctcctgaccttgtgatctgcctgccttggccttccaaagtgctgggattacaggtgtgagccaccgygcccggcctagcatatatattaaaattggatgttacgaagaagattagcatgcctcctgtgaaaggatgacatgctgacgtggaaattcgtgctccatat

SEQ ID NO: 50077 - DNA, 201 bp, Homo sapiens
gcctggcctcttctagcatttttgtgctttcaggtcttagatttaagtggtttttttttgtttgtttttgtttttgtttttgacagtctcactctgtcccmaggctggagtgcagtggcgtgatcttggctcactgcaacctctgcctcccgggttcaagcgattctcctgcctcagcttccccagtagctgggattacag

SEQ ID NO: 50078 - DNA, 201 bp, Homo sapiens
tcaccatgttggccaggctggtctcaaactcctgactttaggctatccgcctgcctcggcctcccaaagtgctgggattacaggcgtgagccaccgcgccyggccaaagatgttattttctataaaggcaaccgttagaaccttcaactcattatttttaggctgacaaaaacatctgttattattatactacactatgta

SEQ ID NO: 50079 - DNA, 201 bp, Homo sapiens
ggagtgaaagtttaataaatgaaagaagaaagctatctatagtggagaggggagcccaagtgggctgccgtttttacagtttaatttaaaaggtttttggkttgtttgtttgtttgtttgtttgtttgttttttgagatgaagtcttgctctcgtcccccaggctagagtgcaatggtgcgatcttggctcactgcaacct

SEQ ID NO: 50080 - DNA, 201 bp, Homo sapiens
ccaccgcgcccggccaaagatgttattttctataaaggcaaccgttagaaccttcaactcattatttttaggctgacaaaaacatctgttattattatacyacactatgtattgtgaatagtttattttacaagcataatagagtattttgaaattacactctgctagaaccccttgctagttgttaattttacctagaaa

SEQ ID NO: 50081 - DNA, 201 bp, Homo sapiens
gggtgacagagcaagatctgtctcaaaaaaaaaataaataaataaaataaaataaaatataaaaaaaagagatgagaaacaaatgatcagatttgcagagyaatctttcaagaatttatcctatttacacatgcagaaatgtcaattacaacattactatcagggcaacaaattatcaagtaaagctaccaatcagaatta

SEQ ID NO: 50082 - DNA, 201 bp, Homo sapiens
tgtgccatgagcacctgcctcctgggtaaagatctgcaccatagattgtcacgtgggaggaatgtgccttgtgcaaccagactcctgtaagaactccgggwcctcagacctaagtggacttacgtgggcagagacatctcatatatgttcgtataatttgtagtcgtgccaaaagcaccttactgtgaccagcatggaggg

SEQ ID NO: 50083 - DNA, 201 bp, Homo sapiens
taaagcacaagcatttttccaaaggtaattttcaaggccagggcaagtaagtttctaagtcttagttttataaaactcttttttcaaagaaaatgacttayaataagaaaccgaagattcacaccactctccatattgcacaaaagagaaaaaagattgatatttttgtcaatatcgaccatttgacactttacaaaatca

SEQ ID NO: 50084 - DNA, 201 bp, Homo sapiens
aatcccatcctttacttgggtaccccaattacccaaagttggccaattagtgctgcagtctgtttcctttgggttgagaagtattttcagtattgtcccayttgtggttcatgagaaagatgttatcagaccccaacacttaaccaaagttagcctttgagttgggagtttccacactatagtcccctctgggtcgtcaga

SEQ ID NO: 50085 - DNA, 201 bp, Homo sapiens
tcttttttcaaagaaaatgacttacaataagaaaccgaagattcacaccactctccatattgcacaaaagagaaaaaagattgatatttttgtcaatatcraccatttgacactttacaaaatcagatattttgaatatgtgttatatctcagaaagacatcctcctctctgtgctataggggagaggagcatatccttta

SEQ ID NO: 50086 - DNA, 201 bp, Homo sapiens
ttgtaaaagtcaaagaagcagtttatgacctgccactctgcttagcacccaatatcaaactggcaaggctcaaacttgccccctgttgggccccatcatcrttaatccaacctctgaccagagagttttgacttgtgatctctgggaaagatggttaccctgagtaatagaaaaaataagaaagggaaaggagagagagaa

SEQ ID NO: 50087 - DNA, 201 bp, Homo sapiens
aattgaacaatttgtaaaagtcaaagaagcagtttatgacctgccactctgcttagcacccaatatcaaactggcaaggctcaaacttgccccctgttggrccccatcatcattaatccaacctctgaccagagagttttgacttgtgatctctgggaaagatggttaccctgagtaatagaaaaaataagaaagggaaag

SEQ ID NO: 50088 - DNA, 201 bp, Homo sapiens
taataataactgaaatacagagcctatagcattatttttccacaatatgtaatcacatatttataaatctgaaaataaaagaaatatcattagaatgtcastctgtacaaatttatggcaatatgcacaaaatacactaaaagctgccttatttttatgcagttgcatgctcacatatatatttctgtaacagacaatttt

SEQ ID NO: 50089 - DNA, 201 bp, Homo sapiens
taggaagcctaattacctttaaattgtacaacattttttgcataaattattttcatatttttatgacttacacagaccatttatgacatgcttggactttyggacttgtcctaaacatacctcttgtcaaacaaccattttactttagaacaagaatttaccatacaagatcctttgttatataaaatctttttctttata

SEQ ID NO: 50090 - DNA, 201 bp, Homo sapiens
ttcttgaaacattaagttttctgtctccagtttcccatttttattaaagacaaattatggtaacaccaacttgctttattatacttggcctgattgtttgyataaagtgtagcaagaataattatttttcacataagctttttgtaaattggaactctgttccatagaaggaatcttagataagatttttttagatccgag

SEQ ID NO: 50091 - DNA, 201 bp, Homo sapiens
cttctttatgctgaataggggcaatgatattcctgcctaactattagggtcttttgtgtttacggtagagaggagcttagttagaaagcattggcctgggygcagtgactcacgcctgtaatcccagcactttgggaggccgaggtgggcagatcacctgaggtcaggagtttgagaccaacctggccaacgtggtgaaac

SEQ ID NO: 50092 - DNA, 201 bp, Homo sapiens
gctgctggttgcccatttttatggctatttcttaatatgctaaacaaggggtgggttattcatgcctctcatttttagaccatatataataactttctgaygttgtcatggcatttgtaagttgtcatggcactggtgggagtgtagcagtgaggatgaccagaggtcactcttggtaccatcttggttttggtgggtttt

SEQ ID NO: 50093 - DNA, 201 bp, Homo sapiens
attaaagtgagaacaatgtattaagaaagtaaaggagtgaaagaatgggtactctatagacagcagccccaagggctgctggttgcccatttttatggctrtttcttaatatgctaaacaaggggtgggttattcatgcctctcatttttagaccatatataataactttctgacgttgtcatggcatttgtaagttgtca

SEQ ID NO: 50094 - DNA, 201 bp, Homo sapiens
tccttgacagtaaagacttagtttcattcactgatacagccctagacctagaccaacacctgttgtatatactagacactcaaaaaatatgtgttgaatgyatgaatggttatagtatgtaaaaaaatcccacaaaggatttacacagaattgtaaataataactgtattaggttaagaaccttggaaaataaagaacaag

SEQ ID NO: 50095 - DNA, 201 bp, Homo sapiens
caaggtttgtgagtgcaccaattgacactctgtatctagctgctctggttgggccttggagaacctttatgtctagctcagggattgtaaatacaccaatyggcactctgtatctagctcaaggtttgtaaacacaccaatcagcaccctgtgtttagctgaaggtttgtgagtgcaccaatcgacactctgtatctagct

SEQ ID NO: 50096 - DNA, 201 bp, Homo sapiens
gcatacctagtaggttacagtatagtgtaagcataacttttacatgcactgggaaaccaaaaaatttgtgtgacttgctttatcacaatattcactttatdgcagtggtctagaacaaaacctgatatcacaaaacctgatattcctgatatatgggcttatctctgaagtatacctgtatctcagtgaagatgttattat

SEQ ID NO: 50097 - DNA, 201 bp, Homo sapiens
cttgagcccaggagtttaagacaagcctgggttacatagtgagaccccatctctacaaaaaataaaaaattagctgggcatagtctcagctactcaggagrctgaggtgggaggattgcttgagccctgaaggtggaggcagcagtgagctgtgattgtaccactgcgctcgaggcttgaggacagagcaaaacactgact

SEQ ID NO: 50098 - DNA, 201 bp, Homo sapiens
agcctcctaagtgctgggattacaggcatgaaccaccacacctggccaattgaccgaatattttaatcccactgttgagacctactgctccaaaaaaaaascttcctttcaaaatattactactcatggacaatgttcctggtcacccaagagctctgatggagatgtacaagaaggttaatgttgttttcatgcatccta

SEQ ID NO: 50099 - DNA, 201 bp, Homo sapiens
aattagctgggcatagtctcagctactcaggagactgaggtgggaggattgcttgagccctgaaggtggaggcagcagtgagctgtgattgtaccactgcrctcgaggcttgaggacagagcaaaacactgactcaaaaaaaaaaaaaaaaaaaaaagaaagaaagtctacatccaatagccagaagtatgtctctaaggt

SEQ ID NO: 50100 - DNA, 201 bp, Homo sapiens
acaggtgcataccaccatgcctggctaatttttttatatttttggtagagtcagggttttgccatgttgcccaggctggtcttgaactcctgagctcaacmaatccacctgcctcagcctcctaagtgctgggattacaggcatgaaccaccacacctggccaattgaccgaatattttaatcccactgttgagacctact

SEQ ID NO: 50101 - DNA, 201 bp, Homo sapiens
aaagatatggaaccaacctaagtgcccatcaatcaatgactggataaagaaaatgtggtatatatgcaccatggaatactactcaaccataaaagggaacraaataatggcatttgcagcaacttggatggagtgggaggccattattctaagtgaagtaatttaggaatggaaaacgaaatattgtatgttctcacttat

SEQ ID NO: 50102 - DNA, 201 bp, Homo sapiens
tcaattaaggctcagatgattgttagcattttttcagcaataaagtattttataattagtgtatttatgttgcacatttatgacataatgttattgcatayctagtaggttacagtatagtgtaagcataacttttacatgcactgggaaaccaaaaaatttgtgtgacttgctttatcacaatattcactttatggcagt

SEQ ID NO: 50103 - DNA, 201 bp, Homo sapiens
actcaatatattgattgggttctaatcctaaaatactgatttttatactgtccaaagaaagtttgcaatcaaaacaaaggtcagaagagataagtaaaggmcagccagagagcaagattttgcactgattagctctcactattcagagtccagagaaatttactatagtggacacaaatactctagttgttccatagttat

SEQ ID NO: 50104 - DNA, 201 bp, Homo sapiens
ttggttatcctggtattcatggaatctcatcaattctggattcattcacaattttgaattttcacgcctgagaactggggaccagactataagttgataaytcttaacattttcacctctgagcccttgcccaagtagccaaatgatctcaagatatgtctgtttcagttagcctttgttgtataacaaatcacctctagc

SEQ ID NO: 50105 - DNA, 201 bp, Homo sapiens
gatatatgggcttatctctgaagtatacctgtatctcagtgaagatgttattatttatttatttatttgagacagagtctcactgtgtcacccaggttggratgcagtggcacgatctccacttactgcaacctccacctcccgggttcaagagattctcctgcctcagcatccgaagtagctgggactacaggcatgtgc

SEQ ID NO: 50106 - DNA, 201 bp, Homo sapiens
gaggcacaagaatcgcttgaactcaggaagtggaggttgcagcgaacaaccactgcactccatcctgggtgacagagcaagatctgtctcaaaaaaaaaataaataaataaaataaaataaaatataaaaaaaagagatgagaaacaaatgatcagatttgcagagcaatctttcaagaatttatcctatttacacatgca

SEQ ID NO: 50107 - DNA, 201 bp, Homo sapiens
gcaccagaccctgccaaaatgaaacaaaacaagaactggcaaaatgattgtttctaatataagccaggaaattgtttcacaggtcaagaatgaggaaaactttttttttttttcctaagatcttacctcttattgtctttaggagttcctgtttattattgaggtcatgtgttttgttaccaggtcaactagcttactcct

SEQ ID NO: 50108 - DNA, 201 bp, Homo sapiens
caccagaccctgccaaaatgaaacaaaacaagaactggcaaaatgattgtttctaatataagccaggaaattgtttcacaggtcaagaatgaggaaaactttttttttttttcctaagatcttacctcttattgtctttaggagttcctgtttattattgaggtcatgtgttttgttaccaggtcaactagcttactcctg

SEQ ID NO: 50109 - DNA, 201 bp, Homo sapiens
tatttataaatctgaaaataaaagaaatatcattagaatgtcactctgtacaaatttatggcaatatgcacaaaatacactaaaagctgccttatttttaygcagttgcatgctcacatatatatttctgtaacagacaattttactttgatgtgacaggagataatcgatcttgaagttaaagataataaatttgggtgt

SEQ ID NO: 50110 - DNA, 201 bp, Homo sapiens
gacaattttactttgatgtgacaggagataatcgatcttgaagttaaagataataaatttgggtgtgactaaggtgtataaatttcagttgatctatatakatttatagcaagatggttaaaatgtgaggttgctcatcagaggcatagggttatcttaattatctctgatatgtaaatcatttacttttcacaaaaggcc

SEQ ID NO: 50111 - DNA, 201 bp, Homo sapiens
taaagataataaatttgggtgtgactaaggtgtataaatttcagttgatctatatagatttatagcaagatggttaaaatgtgaggttgctcatcagaggyatagggttatcttaattatctctgatatgtaaatcatttacttttcacaaaaggccctctttcttgtgtaaacacaaacaaccataaattaaaataagta

SEQ ID NO: 50112 - DNA, 201 bp, Homo sapiens
gagttcctgtttattattgaggtcatgtgttttgttaccaggtcaactagcttactcctgcactgatgatcctggaatgaaagttttttttattgaaagtytatttgcagccaggtgtggtggctcacacctgtaatcccagcactttgggaggttgaggcaaaaggatcccttgagcccaggagtttaagacaagcctgg

SEQ ID NO: 50113 - DNA, 201 bp, Homo sapiens
tgattgtaccactgcgctcgaggcttgaggacagagcaaaacactgactcaaaaaaaaaaaaaaaaaaaaaagaaagaaagtctacatccaatagccagargtatgtctctaaggtccttgaccttccaagtataatgcaaaacacagaagagattgttttagaatgataaatttgactactaagcaaaaaattatgcatg

SEQ ID NO: 50114 - DNA, 201 bp, Homo sapiens
tcatttgcacttgtgctggtcatgtgacgctgcttttagcaataagatgaaggtggtggtttctgagggtagtgtccttttcagaataaaaagacaaagcytatttgccttcttcttcctttactttatattcctctttctgccaggaatataaatgtgactctgtggtgtcacgcgcatccgtgtgaagagaccaccaaa

SEQ ID NO: 50115 - DNA, 201 bp, Homo sapiens
accttagggcaactcaccagatggctctgagcctcagtttcctcatgtgtagattgtagataataatatttttatcataaaattgatgtgggtaatacatrtaaagtacttagcagagcgattaccatttattttatttcactagtttttacggaaattctttaaattttagtagtgtgtaggaagagatcatctttgtcc

SEQ ID NO: 50116 - DNA, 201 bp, Homo sapiens
ctgccacagtggatatgttgatgaaaagagtcaaactctgttaaatatttgaagagatttattctgagccaaatatgagtgaccatggcccatgacacagscctcaggagattctgagaatatgcgcccaaggtggtcggggcacagcttgggtttttttttttttttttttttgagacggagtctcgctctgtcacccag

SEQ ID NO: 50117 - DNA, 201 bp, Homo sapiens
tatgtatatatacacatgcgtgcatgtatgtatatatgcacatgtgcgtgcacgtatgtatatatgtacatgtgcgtgcacgtatgtgtgtatgcacataktgtgtgtgtgtgtgtgtgtgtgtgtgtgtatttttttgagacagagtctcgttctgttgcccaggctgcagtgcagtggcgtgatctcggcccactgcaa

SEQ ID NO: 50118 - DNA, 201 bp, Homo sapiens
taagggtctggagagtcatggcctacaaactataaattctcatcagatgggtttgatttaaccctatatatcgtgacttactttccaatctgactctggcrtaacattatgtgacaaagaagaaagtcaaaatattttaccccaaaacatgtttctttgccatattttgaaatggccctgcacagctgtcctttggagggg

SEQ ID NO: 50119 - DNA, 201 bp, Homo sapiens
ctcttagtgactttaacttttggtgaaaaccttggtaagttcagggttttaattaggtatggagccgaggacagcagacagaagtgcagataaggtctgatttttttttagcatttacgtgtcccaggccttacctagctgtaaagcaggaaagttttacagttacaagttatagtggcattttatgacacatttaggaag

SEQ ID NO: 50120 - DNA, 201 bp, Homo sapiens
gtttcaccatgctggccaggctggtctcgaactcccgacctcaggctatccgcctgcctcggcctcccaaagtgctgggattatagatgtgagccaatgcractggcctaagtgctgggattacgggagtgagccgctgcgcctggcctaagtgctggggtacaggcgtgagccaccaggccagcgaagtctccacaatct

SEQ ID NO: 50121 - DNA, 201 bp, Homo sapiens
cattgcagtacagcaggagaaaatgatgtcagcttgccccattattggtggtattaactttgattaactgttttcactgtcacattactatttttcttttktaattaattagtggtaattaattgtgttatgataagatgctccttatcaaactttcactgactagttgtagtatcaattaattacatttaaaaatttaaa

SEQ ID NO: 50122 - DNA, 201 bp, Homo sapiens
caggagaaaatgatgtcagcttgccccattattggtggtattaactttgattaactgttttcactgtcacattactatttttcttttgtaattaattagtrgtaattaattgtgttatgataagatgctccttatcaaactttcactgactagttgtagtatcaattaattacatttaaaaatttaaagaagggccgggtg

SEQ ID NO: 50123 - DNA, 201 bp, Homo sapiens
cccatgtctactaaaaatacaaacattagctgggcgtggtggtgcatatctgtaatctcagctattcaggaggctgaggcatgagaatcacttgaacccaggaggcggaggttgcagtgagctgagactgcaccactgcactccagcctgggcaaaaagagcgaaattccatctcaaaaaaaaaaaaaaagcagacggtaa

SEQ ID NO: 50124 - DNA, 201 bp, Homo sapiens
agcaggtagtcattaactaaatatgtggtggcagggagcttatcaggcagagcaaatagcatattctaaggaaatgagggagaaagttacataactttttytttcttttttttttttgagacagggtctcattctgttgtccaggctggagggcagtggtgcaatcatggtcagctggagccttaaactcctgggctcaag

SEQ ID NO: 50125 - DNA, 201 bp, Homo sapiens
atcagtttgctacttatcagctgtgtgaccttagggcaactcaccagatggctctgagcctcagtttcctcatgtgtagattgtagataataatatttttmtcataaaattgatgtgggtaatacatgtaaagtacttagcagagcgattaccatttattttatttcactagtttttacggaaattctttaaattttagta

SEQ ID NO: 50126 - DNA, 201 bp, Homo sapiens
aaacattgttttaaacttagattcaaacatcagtttgctacttatcagctgtgtgaccttagggcaactcaccagatggctctgagcctcagtttcctcaygtgtagattgtagataataatatttttatcataaaattgatgtgggtaatacatgtaaagtacttagcagagcgattaccatttattttatttcactagt

SEQ ID NO: 50127 - DNA, 201 bp, Homo sapiens
aggtggccagatttcaggctcagatccagaatggtgataagggtaccttcccttacagaaagaagataacatatagaatagcaacagctgatgtcaaaaarcctcttttcttttttaaaatagcggtgagtaactattactggaatggaatagataaacctaaatagaggtaaaggggtaatcccaggactcaggcttgcc

SEQ ID NO: 50128 - DNA, 201 bp, Homo sapiens
tctgaatgaataatcatttgttaaaagattccccacatcatttttcttacttttcttgctgtgtgctaggcattattctagctaaaaggaatacactggtraacaagactaataaggtccctgcctctatggagttgacatttgggatagaggtgggtgttggagatggacaataaacacgtgaatacataattacatatt

SEQ ID NO: 50129 - DNA, 201 bp, Homo sapiens
ggatgcgacttcatcaccagattgacctatcaagtgcaaggaaacttggcttcaggagaggctaacttacttctgtgtagtgtagggggaaaagagaaaamacacacacacacacacacacacacacatgtgcgcgcacgcacagcggtaaagcagaagtttccagctgggttttctgtccctttggccacataatcaagt

SEQ ID NO: 50130 - DNA, 201 bp, Homo sapiens
gggcgacagagccagactaagtctcaaaaaaaaagaaaaaagaattcaaagccaatgtaactagagggcaaaaaagaaagaaaaatgatgtggggaatctmtgaatgaataatcatttgttaaaagattccccacatcatttttcttacttttcttgctgtgtgctaggcattattctagctaaaaggaatacactggtga

SEQ ID NO: 50131 - DNA, 201 bp, Homo sapiens
gctcctgaaaggagaaattggatgaatgttggtgccattcaatgggatattcaagtggaaatgttaaatgtgcagttgaatataggcgctcaggccgggcrcggtggctcacgcctgtaatcccagcactttgggaggccgaggtgggtggatcatatgaggtcaggagtttgagactagtctggctaacatggtgaaccc

SEQ ID NO: 50132 - DNA, 201 bp, Homo sapiens
tgaggctagagaatgacttgaacccaggaggcttgaacccaggagccgagatcgtgccactgcactatagcctgggtgacagagtgagactccgtctcaaaataataataataataataataataataataataataataataataataaaaggaaaataggagctcagaggctgggcacggtggcttgtgcctgtaatcc

SEQ ID NO: 50133 - DNA, 201 bp, Homo sapiens
gaggctagagaatgacttgaacccaggaggcttgaacccaggagccgagatcgtgccactgcactatagcctgggtgacagagtgagactccgtctcaaaataataataataataataataataataataataataataataataataaaaggaaaataggagctcagaggctgggcacggtggcttgtgcctgtaatccc

SEQ ID NO: 50134 - DNA, 201 bp, Homo sapiens
ccaatatcaaactggcaaggctcaaacttgccccctgttgggccccatcatcattaatccaacctctgaccagagagttttgacttgtgatctctgggaargatggttaccctgagtaatagaaaaaataagaaagggaaaggagagagagaaaagccttgcctgtggcaggatggggaaggtgaagatctcagggagttg

SEQ ID NO: 50135 - DNA, 201 bp, Homo sapiens
aggctagagaatgacttgaacccaggaggcttgaacccaggagccgagatcgtgccactgcactatagcctgggtgacagagtgagactccgtctcaaaataataataataataataataataataataataataataataataataaaaggaaaataggagctcagaggctgggcacggtggcttgtgcctgtaatccca

SEQ ID NO: 50136 - DNA, 201 bp, Homo sapiens
ataataataataataataaaaggaaaataggagctcagaggctgggcacggtggcttgtgcctgtaatcccagctgtctgggaggccgaggccagtagatygcttgagctcgggagtttgagaccagtctgggcaacatggcaaaaccccttctctacaaaaaaatacaaaaattagctggtgcttggtggctcatgcctg

SEQ ID NO: 50137 - DNA, 201 bp, Homo sapiens
tttgagaccagtctgggcaacatggcaaaaccccttctctacaaaaaaatacaaaaattagctggtgcttggtggctcatgcctgtagtcccagacacttsggaggctgaggtgggaggatggcttgagcactggaagtcaaggctgcaatgagccatgatcgcaccattgcactccagcttgggtgacagagtgagaccc

SEQ ID NO: 50138 - DNA, 201 bp, Homo sapiens
tgcaatgagccatgatcgcaccattgcactccagcttgggtgacagagtgagaccctctaaaaaaaaaggaaaataggagctcagaggagaactggggacrtatttatccacaggtggtaatcagagccatggatgtggttaataacctggccaacgtggtgaaaccccgttgctaattaaaaaatacaaaaattggccgg

SEQ ID NO: 50139 - DNA, 201 bp, Homo sapiens
ttggctcactgcaacctctgcctcccaggattaagcgattctcgtgcctcagcctcccaactagctgggattacaggcatgcgccaccataccctgctaatttttttttttttttttagtagagacgggtttccccatgttggctgggctggtctcagactcttggccttaagtgatctgcctgccttggcctcccaaagt

SEQ ID NO: 50140 - DNA, 201 bp, Homo sapiens
cttcacctcttttcaggaggggatacaaataatctgtagctttatttatttacttatgcgacagagtcttactctgttgcccaggctggagtgcagtggcrtgatctcagctcactgcaacctccacctcctgggttcaagcgattctcccacctcagcctcccaagctgggattagcccgccaccatgcctagctaactt

SEQ ID NO: 50141 - DNA, 201 bp, Homo sapiens
tcacagaatgctgctgagagttaaggaatacgaggattgaaaaacagccactggatggaaagacaaaggggtcattgatagcgttgggaagagtcattttrggggagtggatgaagctagattgcagtgtcaagggaataagtacaagtgacagggagtgtagatgactgtgagaaacgtagacataaaagggaagagaga

SEQ ID NO: 50142 - DNA, 201 bp, Homo sapiens
gtttttctttgtctttcatgatgttgacagtttaaaattttgtcttttggattatgtgatgttttgaattttgtaacatgtccctcaatttggctttgttrgatatttccttgtgattagattcagattttgcatttttggcaaaaaactatataagagctattatgaccatctcattgcagtacagcaggagaaaatgat

SEQ ID NO: 50143 - DNA, 201 bp, Homo sapiens
agacaaaggggtcattgatagcgttgggaagagtcattttgggggagtggatgaagctagattgcagtgtcaagggaataagtacaagtgacagggagtgkagatgactgtgagaaacgtagacataaaagggaagagagataggccacagactcatccctccataaataacagttttgttattactatttactagtcatt

SEQ ID NO: 50144 - DNA, 201 bp, Homo sapiens
ttatcttactggcagatctgcaggtcagctgataattgtgcctcagactgacactcagatgcctaggctctggggttcaggttgtgctcatatctgtttcstgagtcttattctgggacccaggctgaagaagcagtgctggtgggacatgttgttcttatgaacaatggcaggactaggagagctatgtcaaaccaagag

SEQ ID NO: 50145 - DNA, 201 bp, Homo sapiens
cagtggcacgatctcggctcactgcaagctctgcctcccaggttcacactattctcctgcctcagcctccggagtagctgggactacaggcgcccgccacygcgcccggttaattttttatatttttagtagagacgggttttcaccatgttagccaggatggtctcgatctcttgaccttgtgatccacccgcctcggcc

SEQ ID NO: 50146 - DNA, 201 bp, Homo sapiens
ttagctgccttcccacggggcagggctcgggacctgcagcccgccatgcctgagcctcccaccccctctgtgggctcctgtgcggcccgagcctccccgaygagcaccaccccctgctccaaggcgcccagtcccatcgaccacccaagggctgaggaatgcgagcaaacggcgcaggactggcaggcagctccacctgca

SEQ ID NO: 50147 - DNA, 201 bp, Homo sapiens
atccagaatggtgataagggtaccttcccttacagaaagaagataacatatagaatagcaacagctgatgtcaaaaagcctcttttcttttttaaaatagyggtgagtaactattactggaatggaatagataaacctaaatagaggtaaaggggtaatcccaggactcaggcttgcctctcttatagcattataattact

SEQ ID NO: 50148 - DNA, 201 bp, Homo sapiens
agccaagtcaaacatattcaaggtctctctcctgtctttccattagtagtacatttgccagagcaagtcacagggccaggcccaagaagtataatcttccyacagtagaagggagaggggagtggatattcattgaacaataagccaaactactgatcaacctatcaatcatgctcatgttattaggttggtgtacagatc

SEQ ID NO: 50149 - DNA, 201 bp, Homo sapiens
atgttgcccagtctggttctcgaactcctgggcataagtgatccacctgcttcggcctcctaaagtgctaggattacaggtgtgagccactgtgcccagcsttaattaattattttaacattaattttatttttttaaaaaataagcaggccaggcatggtggcccatgcctgtaatcccagcactttgggaggccgaggc

SEQ ID NO: 50150 - DNA, 201 bp, Homo sapiens
cagccttaattaattattttaacattaattttatttttttaaaaaataagcaggccaggcatggtggcccatgcctgtaatcccagcactttgggaggccraggcaggcagatcatctgaagtcaggagttcgagaccagcctggccaacatggtgaaaccccatctctactaaaaatataaaaatcagccgggcgtggtg

SEQ ID NO: 50151 - DNA, 201 bp, Homo sapiens
ctgaggcaggagaatcgtttgaacccgggaagtggaagttgcagtgagccgagatctcgccactgtactccagcttggtgacagagcgagactccgtctcaaaaaaaaaaaaagcaatacatccaaatgcttcaaaattcagaaagaggccaggcacggtggctcacacctgtaatctcagcactgtgggaggccaaggca

SEQ ID NO: 50152 - DNA, 201 bp, Homo sapiens
gcgagactccgtctcaaaaaaaaaaaaagcaatacatccaaatgcttcaaaattcagaaagaggccaggcacggtggctcacacctgtaatctcagcactktgggaggccaaggcaggcggatcacctgaagtcaggagttcgagaccagcctggccaacatggtgaaactccatctatactaaaaatacaaaaattagcc

SEQ ID NO: 50153 - DNA, 201 bp, Homo sapiens
tgcttcaaaattcagaaagaggccaggcacggtggctcacacctgtaatctcagcactgtgggaggccaaggcaggcggatcacctgaagtcaggagttcragaccagcctggccaacatggtgaaactccatctatactaaaaatacaaaaattagccgggtgtggcgatgcacacctgtaatcccagctactcgggaag

SEQ ID NO: 50154 - DNA, 201 bp, Homo sapiens
cactgtgggaggccaaggcaggcggatcacctgaagtcaggagttcgagaccagcctggccaacatggtgaaactccatctatactaaaaatacaaaaatkagccgggtgtggcgatgcacacctgtaatcccagctactcgggaagctgaggcaggagaatcacttgaacctaggaggcggaggttgcggtgagccgaga

SEQ ID NO: 50155 - DNA, 201 bp, Homo sapiens
aatacaaaaattagccgggtgtggcgatgcacacctgtaatcccagctactcgggaagctgaggcaggagaatcacttgaacctaggaggcggaggttgcrgtgagccgagatcgtgccactgcactccatcctgggcaagggggagactctgtctcaaaaaaaaaaaaattcagaaagaactaaaagttcagtgaaagtt

SEQ ID NO: 50156 - DNA, 201 bp, Homo sapiens
gcgatgcacacctgtaatcccagctactcgggaagctgaggcaggagaatcacttgaacctaggaggcggaggttgcggtgagccgagatcgtgccactgyactccatcctgggcaagggggagactctgtctcaaaaaaaaaaaaattcagaaagaactaaaagttcagtgaaagtttacttttcaccgtattcctgaac

SEQ ID NO: 50157 - DNA, 201 bp, Homo sapiens
gctgaggcaggagaatcacttgaacctaggaggcggaggttgcggtgagccgagatcgtgccactgcactccatcctgggcaagggggagactctgtctcaaaaaaaaaaaaattcagaaagaactaaaagttcagtgaaagtttacttttcaccgtattcctgaacccctagtttccttcctggggcagctgtactttat

SEQ ID NO: 50158 - DNA, 201 bp, Homo sapiens
tcctgaacccctagtttccttcctggggcagctgtactttatttaaccaggagcctagtgatgaacatttgcttgttaacagtcttctattatgaatgaarcaatggataatcttgtatatgtcattttgtgcatacgtgagtgtcttcagtctatttccctagaagctgagactggtggagcttcgtaggcaagtgattt

SEQ ID NO: 50159 - DNA, 201 bp, Homo sapiens
ttttgacgttagtccttgattttgattcaacagaagcagccacttttggcatcttgttatagatgcacaggtggtaattgaagccatgagagttaaccaawatataaagaactgcagacagctgagaaggagtgctatcttcgtcctttattaagagtcagctattggccaggcgcagtggctcacgcctgtaatcccagc

SEQ ID NO: 50160 - DNA, 201 bp, Homo sapiens
agtacaaaaaattagctgggcgtgctggcgggcgcctgtagtcccagctactcgggaggctgaggcaggagaatcatttgaacctgggaggcagaggttgyagtgagccaagattgcaccactgcactggtgacagagtgagattccatctcaaaaaataaataaaaagtcagctattagcaccttcggaggctgaggtgg

SEQ ID NO: 50161 - DNA, 201 bp, Homo sapiens
gacagagtgagattccatctcaaaaaataaataaaaagtcagctattagcaccttcggaggctgaggtgggcagatcacctgaggtcaggagttggagacyagcctggccaacatggtgaaaccctctctctactaaaaatacaaaaattagctggatatggtggtgcatgcctgtaatcccagctactcaggaggctgag

SEQ ID NO: 50162 - DNA, 201 bp, Homo sapiens
ggtgaggacgtggagagtctttatatctagctcagggattgtaaatgcaccaatcagcaccctgtgtttagctcaaggtttgtgagtgcaccagtctacastctgtatctagctgctctggtgaggacgtggagagtctttatatctagctcagggattgtaaatacaccaatcagcaccctgtgtttagctcaaggtttg

SEQ ID NO: 50163 - DNA, 201 bp, Homo sapiens
tccagaattgccatgtgaaatgtgtgaaggacaagatgttctgtgtttggtaaatgtgtatgaggaagagagaaacaattagaagttctctgtcacacaayctacacactaccaggaagttattctagaaaaaataacgttctctaaaacgaaccatgcaatctgacacccgtcttccacctctcagggaagagaaacttc

SEQ ID NO: 50164 - DNA, 201 bp, Homo sapiens
tctgtgtttggtaaatgtgtatgaggaagagagaaacaattagaagttctctgtcacacaatctacacactaccaggaagttattctagaaaaaataacgytctctaaaacgaaccatgcaatctgacacccgtcttccacctctcagggaagagaaacttcaaaggcaggaggcagggccaatgcatgatgtgttctatt

SEQ ID NO: 50165 - DNA, 201 bp, Homo sapiens
attagaagttctctgtcacacaatctacacactaccaggaagttattctagaaaaaataacgttctctaaaacgaaccatgcaatctgacacccgtcttcyacctctcagggaagagaaacttcaaaggcaggaggcagggccaatgcatgatgtgttctattgtcccaaggagacctgcctgagccttgaccctagtttc

SEQ ID NO: 50166 - DNA, 201 bp, Homo sapiens
agtctagagtagaggtgagcaaactttttctgtaaagagcagatggtggctgggcaccgtggctcacgcctgtaatcccagcactttgggaggctgaggcmggcagatcacctgaggtcagcagttcaagaccaacctggccaacatagcaaagccccatgtctactaaaaatacaaacattagctgggcgtggtggtgca

SEQ ID NO: 50167 - DNA, 201 bp, Homo sapiens
agagtccggtgagagcaccaaagatcaaaaaaaagatgcagtaaatgggagggaaggagggcagaagggatacccatgtgttactgaagtcaacttttatytattctgaagttttgcactatagtctgtgggaaatacattttctctgtattactgagtgttcctgcaaactcaggctcttgaaccacagatattaatcta

SEQ ID NO: 50168 - DNA, 201 bp, Homo sapiens
ttgtggcacggtaacttgttagcttgcaagtagcagaaaatctcagacttttcagtttctgacttcacaagaaggaattaagaaaagtcaggaaaaatgtraataaactgaggtatctgtcccatccgaaagtgaccgggtgactctcttagtttaagaggatttatggaactgaaggcagaaatctgagaggccaggtag

SEQ ID NO: 50169 - DNA, 201 bp, Homo sapiens
gagatttattctgagccaaatatgagtgaccatggcccatgacacagccctcaggagattctgagaatatgcgcccaaggtggtcggggcacagcttgggtttttttttttttttttttttgagacggagtctcgctctgtcacccaggctggagtgcagtggcgtgatctctgctcactgcaagctccacctcccaggtt

SEQ ID NO: 50170 - DNA, 201 bp, Homo sapiens
agatttattctgagccaaatatgagtgaccatggcccatgacacagccctcaggagattctgagaatatgcgcccaaggtggtcggggcacagcttgggtttttttttttttttttttttgagacggagtctcgctctgtcacccaggctggagtgcagtggcgtgatctctgctcactgcaagctccacctcccaggttc

SEQ ID NO: 50171 - DNA, 201 bp, Homo sapiens
gatttattctgagccaaatatgagtgaccatggcccatgacacagccctcaggagattctgagaatatgcgcccaaggtggtcggggcacagcttgggtttttttttttttttttttttgagacggagtctcgctctgtcacccaggctggagtgcagtggcgtgatctctgctcactgcaagctccacctcccaggttca

SEQ ID NO: 50172 - DNA, 201 bp, Homo sapiens
tttttttttgagacggagtctcgctctgtcacccaggctggagtgcagtggcgtgatctctgctcactgcaagctccacctcccaggttcacgccattctyctgcctcaagcctcccgagtagctgggactacaggtgcctgccactgcgcctggctaattttttgttttagtagagacggggtttcaccgtgttagccag

SEQ ID NO: 50173 - DNA, 201 bp, Homo sapiens
acattcctggaggtaaaattgctggatgaagtcaacactattagttgcctatttaaaaaatatccccctctacacatacacacacacacacacacacacayacaccccattttttgtaatagaaccctgcttttatttgaaatagccatgtgttcaatttaaaaactcactttcccatcctcatttgcacttgtgctggtc

SEQ ID NO: 50174 - DNA, 201 bp, Homo sapiens
agccagtcagccctgctggccccaggtaatgggggacttagcacgcgggccagtggctgcggagggtgtactgggtcccccagcagtgctggcccaccggygctgcgctcgatttctcgccgggccttagctgccttcccacggggcagggctcgggacctgcagcccgccatgcctgagcctcccaccccctctgtgggc

SEQ ID NO: 50175 - DNA, 201 bp, Homo sapiens
ccctgctggccccaggtaatgggggacttagcacgcgggccagtggctgcggagggtgtactgggtcccccagcagtgctggcccaccggcgctgcgctcratttctcgccgggccttagctgccttcccacggggcagggctcgggacctgcagcccgccatgcctgagcctcccaccccctctgtgggctcctgtgcgg

SEQ ID NO: 50176 - DNA, 201 bp, Homo sapiens
cacgcgggccagtggctgcggagggtgtactgggtcccccagcagtgctggcccaccggcgctgcgctcgatttctcgccgggccttagctgccttcccayggggcagggctcgggacctgcagcccgccatgcctgagcctcccaccccctctgtgggctcctgtgcggcccgagcctccccgacgagcaccaccccctg

SEQ ID NO: 50177 - DNA, 201 bp, Homo sapiens
gctctggtgaggacgtggagagtctttatatctagctcagggattgtaaatgcaccaatcagcaccctgtgtttagctcaaggtttgtgagtgcaccagtstacagtctgtatctagctgctctggtgaggacgtggagagtctttatatctagctcagggattgtaaatacaccaatcagcaccctgtgtttagctcaag

SEQ ID NO: 50178 - DNA, 201 bp, Homo sapiens
ctctggtgaggacgtggagagtctttatatctagctcagggattgtaaatgcaccaatcagcaccctgtgtttagctcaaggtttgtgagtgcaccagtckacagtctgtatctagctgctctggtgaggacgtggagagtctttatatctagctcagggattgtaaatacaccaatcagcaccctgtgtttagctcaagg

SEQ ID NO: 50179 - DNA, 201 bp, Homo sapiens
tctcgtgatccgcccgcctcggcctcttaaaatgctgggattacaggcgtgagccaccgcgcccggccagggacactttcatcacatatccatatggcttrctctctcatttctattcagataccaccttgacagcggagctgtcccagactacccttgtgtaaagcagtatttccacacccctcccctggactacctgtc

SEQ ID NO: 50180 - DNA, 201 bp, Homo sapiens
ttgtatacttcaggccgtggcctcatctttaatacgctatactgagcttctttatacaatagtctcagggcagaattctaagagcaagagcagaagccagragaccttttcaaaatgaaattcagaagtcatcacttctccattttattggtcaaagtcacaagaccagcccaagattcaagaggtgggtaaatagacttc

SEQ ID NO: 50181 - DNA, 201 bp, Homo sapiens
tctgtctcaaataaataaataaataaataaaaataaaaaaaataaattagccaataacatagtagcttaaaacaacaataaacacaaattccccagggtcrttatggtgggatgcgacttcatcaccagattgacctatcaagtgcaaggaaacttggcttcaggagaggctaacttacttctgtgtagtgtagggggaaa

SEQ ID NO: 50182 - DNA, 201 bp, Homo sapiens
attttaaacagcacatgacaaatcttgctgcccttctatccgctaaaggtaaaaaaccaaacgtccataattctccaaaggcaaagatagagtttttccartacagatgtaagtcagcctattatccacacattcccaacaaatggcctttaagagcctttggtgccaaattcaacaaatggaagggttttacacaggtta

SEQ ID NO: 50183 - DNA, 201 bp, Homo sapiens
agacttcctgctgagagagaaggcagttagaggctggttaggcagatagagagggagggtctctggagaagggcagtgttcacaagaacgctagcaggacmgtacctacaccgcctctgcagctaatgggaagaaatgtggttaagaacttccccttatgccaggatgttgctcagaagggactgtcctaacttaggcaca

SEQ ID NO: 50184 - DNA, 201 bp, Homo sapiens
tcagatccagaatggtgataagggtaccttcccttacagaaagaagataacatatagaatagcaacagctgatgtcaaaaagcctcttttcttttttaaartagcggtgagtaactattactggaatggaatagataaacctaaatagaggtaaaggggtaatcccaggactcaggcttgcctctcttatagcattataat

SEQ ID NO: 50185 - DNA, 201 bp, Homo sapiens
agtttggtcgacatggtgaaaccctatctctattaaaaatacaaaaagaattagccgagcgtggtggcacacgcctgtaatcccagctacttgggaagctraggcataagaattgtttgatcctaggaggccagatcatgtcactgcactgcagccttggcaacagaatgagactctgtcaccaaagaataaattaataca

SEQ ID NO: 50186 - DNA, 201 bp, Homo sapiens
ggaaggccgaggtggctggatcacctgaggtcaagagttcgagaccagcctggccagcatggtgaaacctcatctctactaaaaatacagaaaattagtcrggcatggtggcagacgcctgtaatcccagcttctctggaggctgaggcaggagaattccttgaacccaggaggtggaggttgcagtgagccgagatcact

SEQ ID NO: 50187 - DNA, 201 bp, Homo sapiens
ctttcatatttatgtgatacctttcacgattgatgccattcacttcttttttttttgagacagaatctcactctgttgcccaggtaagagtgcagcagcamgttattggctcactgcaacctctgcctcccaggattaagcgattctcgtgcctcagcctcccaactagctgggattacaggcatgcgccaccataccctg

SEQ ID NO: 50188 - DNA, 201 bp, Homo sapiens
acgattgatgccattcacttcttttttttttgagacagaatctcactctgttgcccaggtaagagtgcagcagcaagttattggctcactgcaacctctgsctcccaggattaagcgattctcgtgcctcagcctcccaactagctgggattacaggcatgcgccaccataccctgctaatttttttttttttttttagta

SEQ ID NO: 50189 - DNA, 201 bp, Homo sapiens
agagctgtaacaccgcgagggtccgcagcttcattgttgaagtgagaccaagaacccaccaattccggacacattggtactcttgaaaaaaaaaatctccygcagtactaaaagctaataattcattgatgactaattttgacttagtttactttccttataacaactagctgagatgagctactctaaaagtataggatg

SEQ ID NO: 50190 - DNA, 201 bp, Homo sapiens
gttcatgcctaatcctgtcacccatagctgtcagcaaagagtgcaaggcagattatttgaaagagaatagcagttaatagtgtcaaacccattcttagccragaaggactttactgagagaggcctctaactccctaaatcttagaagggataactcttctaatttgggcctctaacccaaggttggttaagcgttcttgc

SEQ ID NO: 50191 - DNA, 201 bp, Homo sapiens
aagatctgcagcttcactcctgagccagcgagaccacgaacccaccagaaggaagaaactccaaacacatctgaacatcagaagggacagactccagacgygccaccttaagagctgtaacaccgcgagggtccgcagcttcattgttgaagtgagaccaagaacccaccaattccggacacattggtactcttgaaaaaa

SEQ ID NO: 50192 - DNA, 201 bp, Homo sapiens
ttgggaaggtgaggcacaagaatcgcttgaactcaggaagtggaggttgcagcgaacaaccactgcactccatcctgggtgacagagcaagatctgtctcaaaaaaaaaataaataaataaaataaaataaaatataaaaaaaagagatgagaaacaaatgatcagatttgcagagcaatctttcaagaatttatcctatt

SEQ ID NO: 50193 - DNA, 201 bp, Homo sapiens
cctctaaaattagtagcctataatggcatctgtttattgttcatatttctgtgggttgaaatttggactggaatcagctgagtggtgcttctgctgatctyccctggaaccacttgacttgtcatctctctaagatggtcttttgtttacatacgtagcacttggtgctatcaacttgtatacttcaggccgtggcctcat

SEQ ID NO: 50194 - DNA, 201 bp, Homo sapiens
ctgctgatctcccctggaaccacttgacttgtcatctctctaagatggtcttttgtttacatacgtagcacttggtgctatcaacttgtatacttcaggcygtggcctcatctttaatacgctatactgagcttctttatacaatagtctcagggcagaattctaagagcaagagcagaagccagaagaccttttcaaaat

SEQ ID NO: 50195 - DNA, 201 bp, Homo sapiens
gcttctctggaggctgaggcaggagaattccttgaacccaggaggtggaggttgcagtgagccgagatcactgcattgcactccagcctgggcgacagagygagactctgtctaaaaaaaaaaaaaaaaaattgtggcacggtaacttgttagcttgcaagtagcagaaaatctcagacttttcagtttctgacttcacaa

SEQ ID NO: 50196 - DNA, 201 bp, Homo sapiens
aacactcttgtttgtaagatttagtaggccgggtgctggtggctcacgcctgtaatcccagcactttgggaggccgaggtgggcggatcacgaggtcaagwgatggagaccatcctagccaacactgtgaaaccctgtctctactaaaaatacaaaaattagctgggcgtagtggcatgcacctgtagtcccagctactcg

SEQ ID NO: 50197 - DNA, 201 bp, Homo sapiens
tgttgccacttgctagtgttgaaaaagcctcctgcttcaggttcactatcagcatgaatgaagaaaaggtggccagatttcaggctcagatccagaatggwgataagggtaccttcccttacagaaagaagataacatatagaatagcaacagctgatgtcaaaaagcctcttttcttttttaaaatagcggtgagtaact

SEQ ID NO: 50198 - DNA, 201 bp, Homo sapiens
atggatcagtagaatcaatattgcgaaaatgaacatactgccaaaagcaatctgcagattcaatgcaatttccatcaaaataccatcatcattcttcacakaactagaaaaaaagctgggcgcggtggctcacgcctgtaatcccagcactttgggaggcagaggtgggcagatcatgaggtcaggagatcgagaccatcc

SEQ ID NO: 50199 - DNA, 201 bp, Homo sapiens
gggcctaaagatgtgactgaattgcttcaatcacatgctaaaaaaagctttaatggatgaagagttgctttttatggatgagcaaagaaagtggtttcttragagggaatatattcctggtgaagatgctgtggatattgttgaaatgataatgaaggatttagaatattccataaatttagttgataaagcacctttaaa

SEQ ID NO: 50200 - DNA, 201 bp, Homo sapiens
gattgacccttggcaaaccctcggaaatgttcttaggatgttctttatgtcactaattgatgattttgttgtgtacacttggagcaatgtaccatgccatrctggcttgctaatttgctttgcacaaacattgagattgatgatgtacccctggtctcattgttgtgatcctgagttttggttgctatggctaatcgcata

SEQ ID NO: 50201 - DNA, 201 bp, Homo sapiens
acaattatctttgcaatctgagtttactccttattaaatttgttctcaattctttaggaagattgaattttagtgtataaatcctgttgacaaatgaggtwctagaatgatgagaattctctttaagaggccatttctgagataaatctacatagcaagtaggtctagttgctcagtccttacacctccaagggagcctgg

SEQ ID NO: 50202 - DNA, 201 bp, Homo sapiens
tacaggagtatacttaattgttaaaagctgtaaatagcttctattagtttagtccatgcagttaattcctgtttgatatttatgaacatttcagctttccrtgagtccgaaagttttttcctgtattttaatattacagtgttcaaaggtattagaaacctgaatttaagagcacctgttagagtcctatagctgattata

SEQ ID NO: 50203 - DNA, 201 bp, Homo sapiens
ttttgtaaatgctcgtcctgaaggccctctaggtatgattggagattaatttattgaaaaatgtatatacttgtatatatacatatacacatatatatacrtacatatatatatgtatatatgtatacagagagagaaagaagaaaaagagagcagagaggaaagaaggaaagaaaaggagaaacaaggagaaaggaaaag

SEQ ID NO: 50204 - DNA, 201 bp, Homo sapiens
tgtaaaccattttattaaaatattaatcctgctgttcctgcaattcctaaaacaaattaaacaaaataattagcctgaaaaaattttttaacattctcagkaaaactacttgaaataagtcataaaattatgaggcattttcctgtccttatttaaaaaatcttcctagagaaaatggcaagtagctctggcatctaatat

SEQ ID NO: 50205 - DNA, 201 bp, Homo sapiens
ttcacattagtattttgggtttgagtgcctttcagggaatgctctgtcagtcttgaaaatcaacatagttacatagatcaagcccataaagaggtaaaatrcaatgtttccattcttcctcattgaaagagaatgggaccttaagtagtagatgagggcagaaaactctgagtaaactgcaattaattttaaggaaagcag

SEQ ID NO: 50206 - DNA, 201 bp, Homo sapiens
tctcagtctcttcctgttgatataagggttagtcatctttttcttctagatggatctgataaatttgtgctttttttccatatctttatgtgttacttctktatatattttaataacacaaccaattctaccacagtgagactgaactataagtttgctaagtttcaaatggaatttttagcatgtcaatagagaaccacc

SEQ ID NO: 50207 - DNA, 201 bp, Homo sapiens
tttgaattcttggaaaacccacttacattgtaacaaacttatacttctataggaatatgtgcacacacacacacaaacacatgcacacacacacacacacattccccttctaacttcttaaatctgcaacacgtaagaaagctcaactccatctagtgctttgtagccaaagcaaagtttgaatgatcttcccagattttt

SEQ ID NO: 50208 - DNA, 201 bp, Homo sapiens
ctttgaattcttggaaaacccacttacattgtaacaaacttatacttctataggaatatgtgcacacacacacacaaacacatgcacacacacacacacacattccccttctaacttcttaaatctgcaacacgtaagaaagctcaactccatctagtgctttgtagccaaagcaaagtttgaatgatcttcccagatttt

SEQ ID NO: 50209 - DNA, 201 bp, Homo sapiens
tcttttagttttttcaagccatctccagccatagaaaattgcctggtgattgtacacaacatacatgtaaacatataacacacacacacacacacacatayatatatatattagttattaagttaattctggctgaagggagaatggattttagggaaatgagactgaaggcaggcgtactattttggataagcatcgcaa

SEQ ID NO: 50210 - DNA, 201 bp, Homo sapiens
aacgaatgtgataagcattgtcggggcagacctggggaggattatatcacatgccatttctccctatacattcatgtgtatatactttaattcatccaagyaaaattcaatgaaaataacttttaacttcttcccaaggtactcaccaatacctgtccactggaaaacccaaaggggaaggagaacaagcagagggcactt

SEQ ID NO: 50211 - DNA, 201 bp, Homo sapiens
gtatcagtaataaaagtgccaagaggaaaataaggcagtataagaaaatagaaaatgatggcgatggcctctctgagggagtgaaatttgattacataccycaataaattaaagaaacaaggtatgtgaatatctgggaagagtgtttcagcaaagggaaccacactacaaaggtttaaggcaggaacatgtttgatatct

SEQ ID NO: 50212 - DNA, 201 bp, Homo sapiens
gtggtaagcagcaggtcagagacagccagaggacagataaggaatggccccaagggccactgtggtaggactttgaattttaccccaagtgtgagaggaascccttggacgatagactagaggagtgacactacatgattttggtttaaaaaggcttactctggctgctgcgtgaagattggaccattgggggttgaaggg

SEQ ID NO: 50213 - DNA, 201 bp, Homo sapiens
ttcatgttttaatagaaatatttagaaagaaaaataagccaatataaatacagtatcagtaataaaagtgccaagaggaaaataaggcagtataagaaaakagaaaatgatggcgatggcctctctgagggagtgaaatttgattacatacctcaataaattaaagaaacaaggtatgtgaatatctgggaagagtgtttc

SEQ ID NO: 50214 - DNA, 201 bp, Homo sapiens
agaacttgacatggtgaacctaaaatttatattaacatgcaagagaatcagaataaccaaaatagtcttgaagaagaatacagttagaaagctcacacttyctgatttcaaagttattacaaagctgcaataatcaagacaatgtggtactggcattagaatagacatttaaactaatggaaatggacagagtctagaaag

SEQ ID NO: 50215 - DNA, 201 bp, Homo sapiens
actagccaggtgtggtggcgggcgccttgtagtcccagctactcaggaggctgtggcaggagaattgcttgcactcaggaggtggaggttgcagtgagccragatcacactacttctctccagcctggacaacagagtgagactctgtctcaaaaaaaaaaaaaaaaaaattacccattcaccagatcagtcgctgcacac

SEQ ID NO: 50216 - DNA, 201 bp, Homo sapiens
cactacattatcctttttatctatttaattcttggttgttattcgggaccattaaaaataaaaataacaagtttagataaagtttcaattcatacaatgckgataggaatttataaaaagctttttcatccagagcagtcagagagaatgtgatcccttaaatgtcctgttgttgttgttgttttctgtagtgtttctctc

SEQ ID NO: 50217 - DNA, 201 bp, Homo sapiens
aagccaaaattgacaaatgggatctaattaaactaaagagcttctgcacaccaaaagaaattaccatcagagtgaacaggcaacctacagaatgggagaamatttttgcaatctactcatctgacaaagggctaatatccagaatctacaatgaactcaaattgacaagaaaaaaaacaaccccatcaaaaagtgggcaaa

SEQ ID NO: 50218 - DNA, 201 bp, Homo sapiens
aaaaacaagaaatgaggcaaggattctgtatttaataaatggcactgggaaaactggctagccatatgtagaaagctgaaactggatcccttccttacacyttacacaaaaattaattcaagatggattaaagacttaaatgttagacctgaaaccataaaaaccctagaagaaaacctaggtaataccattcgggacata

SEQ ID NO: 50219 - DNA, 201 bp, Homo sapiens
aactatactacaaggctatagtaaccaaaacagtgtggtactggtaccaaaacagagatatagaccaatggaacagaacagagccctcagaaataatgccrcatatctgcaaccatctgatctttgacaaacctgacaaaaacaagaaatgaggcaaggattctgtatttaataaatggcactgggaaaactggctagcca

SEQ ID NO: 50220 - DNA, 201 bp, Homo sapiens
tggcaagaatgtataatattgagtcactttggaaaataatttgacaggtcttcaaaaagatgaacatggaattaccatatgacagcaattccattcaatgsccaagagattggagacatattttcacacaagaacatatatataaatgtttagagcagcattatatatacagccccaaagtggaaataacacagatgccta

SEQ ID NO: 50221 - DNA, 201 bp, Homo sapiens
ttttctaaatgacatatatcttcagattcaacaatcatgacgattgaagagaagaacaatggtaattcccatctctacaagatgctggaatgctctgcccrtattcccctgatctcccactcccatattagctccaggtgtgacttcattcccaaatccagcacctgcaactttctggcagagtgccgtcctcaggttgtg

SEQ ID NO: 50222 - DNA, 201 bp, Homo sapiens
ccgagtcaggctgatcacctgaggtcaggagctcgagaccagcctggccaatatggtgaaaccctgtctctactaaaaatccaaaaaaaaaaaaaaaaaaagatactgttgtgacctggagtttaatacctagaggattaactttaaaactcagtaaatgtcatgaaaagagatggcactttgggcatatttgagtaggaa

SEQ ID NO: 50223 - DNA, 201 bp, Homo sapiens
ttacttactgtattacctctctcctcttactaaaataccagctcccttgctgcagggatttttatctgtttgttcagtgatgcatctttacgtacagaaaygataacagtgccagagacatagagggacataaacatcaatgatatctgtggaatgagtgaatgatcagacaattctagatatggaaaacagcatattacc

SEQ ID NO: 50224 - DNA, 201 bp, Homo sapiens
accattgcagctacctcctagggttgtttatatttagagcttctaaatatatattctatattccatagaatattctacattccataaattccacatatatktagaagctgtaagaatagtgatgggtccacagtgagtactagctactgtcttgtttcacacacatttgttgaatatgtacaaattactattaatacaaaa

SEQ ID NO: 50225 - DNA, 201 bp, Homo sapiens
tgtgtaattatgtattctacttgttaaagaaggccctgtccctccaaatgacataagcttcaagctttgccaaaccttgctctgcccctgatgtggtatgyatttaatataagctgaaactcagttccatttctaagcctggcaaacagtagtcgttataagagaggaaacatgtcactttgtaaatgaggtgaccctgag

SEQ ID NO: 50226 - DNA, 201 bp, Homo sapiens
ttggctttcctacttgttatgataattatggccatttgcctctaaaagttaagtgccaccacctggcctcagcagccacagactgtctcatcccctgagtrgagtggagcgaagtggagttctagagcagcatctgctgttattaactctagcctacagaggacagtcacacctgagattgtcaacaatatttgtgtcaca

SEQ ID NO: 50227 - DNA, 201 bp, Homo sapiens
actcttttagttttttcaagccatctccagccatagaaaattgcctggtgattgtacacaacatacatgtaaacatataacacacacacacacacacacayatatatatatattagttattaagttaattctggctgaagggagaatggattttagggaaatgagactgaaggcaggcgtactattttggataagcatcgc

SEQ ID NO: 50228 - DNA, 201 bp, Homo sapiens
tcctactgggagtcctttaagaattgttggaatacatctcagaagtgtcctaccaaacagtaaataagtttggtgtattttctacaattcccatcttccawtagttacaaaataatggaaagtagggcctggaagagatatttgtataccacgttcatagcagcattactgacattatctaaaacatgaaagcaacccagt

SEQ ID NO: 50229 - DNA, 201 bp, Homo sapiens
attctcatcatggaacaacctgcaaccacaaaacagtactggtccttctctcagtttcttgtatgcacagtctgaactattagcactggaagattccccayctggtaagtggttggtcttgcctatccaggtgtaggagcagaaaaactccacctccatcctcttagggtcctggaattaaattgacattgtaacagatta

SEQ ID NO: 50230 - DNA, 201 bp, Homo sapiens
aaaagataaatactgtatgattccacttatgtgagatactaagagtaatcaaaaatcatagagacaaaaagtagaataatggtttccagggttggggtggyggggaaatgggaagttagtgtttaatggatgtagagttttttttacaaggtggaaaaagtcatggagatggctggtggtgatggttgcacattgaattgt

SEQ ID NO: 50231 - DNA, 201 bp, Homo sapiens
ctagaatttttttaaaagttcattgagtgatttcaattcatattcagttttgggaaccactaacttaatatacatttctttatctaagaaatgtaagctayatcctagtttttggttctgtgagcagaagttaagccattcacttttaaacatttttactaagttataacataatgacatgtctttatttttgaagcaatg

SEQ ID NO: 50232 - DNA, 201 bp, Homo sapiens
ttcacttttaaacatttttactaagttataacataatgacatgtctttatttttgaagcaatgaagaaatattttggattttctgtgaaatcattgttgartacactgtcaattgtgttattcattatcatttataaactatatcttataagaaattacattcaggccaggcatggtagctcatgcctgtaatcccagcac

SEQ ID NO: 50233 - DNA, 201 bp, Homo sapiens
ctactcttttagttttttcaagccatctccagccatagaaaattgcctggtgattgtacacaacatacatgtaaacatataacacacacacacacacacayatatatatatatattagttattaagttaattctggctgaagggagaatggattttagggaaatgagactgaaggcaggcgtactattttggataagcatc

SEQ ID NO: 50234 - DNA, 201 bp, Homo sapiens
ccgcgcccggccaagacactactcttttagttttttcaagccatctccagccatagaaaattgcctggtgattgtacacaacatacatgtaaacatataamacacacacacacacacacatatatatatatattagttattaagttaattctggctgaagggagaatggattttagggaaatgagactgaaggcaggcgta

SEQ ID NO: 50235 - DNA, 201 bp, Homo sapiens
cagcactttgggaggctgaggcaggtggattacctgaggacaggagttcaagaccagcctagccaacatggcaaaaccctgtctcaactaaaaatactaamattagccgggtgtgatgtcgggtgcctgcaattccaactacttgggaggctgaggcaggagaattgcttgaacccaggagatggaggttgcagtgagatg

SEQ ID NO: 50236 - DNA, 201 bp, Homo sapiens
accgcgcccggccaagacactactcttttagttttttcaagccatctccagccatagaaaattgcctggtgattgtacacaacatacatgtaaacatatawcacacacacacacacacacatatatatatatattagttattaagttaattctggctgaagggagaatggattttagggaaatgagactgaaggcaggcgt

SEQ ID NO: 50237 - DNA, 201 bp, Homo sapiens
tcaaaagacaacattaagaaaataaaaaagacaaccatggaatgaaagaaactcattatctgatgagacagattaagataatgtaaagaaataaaaaaaaattaaaatctgagaaatttgaataaatatttttcagaaaaagatatataaatggccgataagcacacaaaaagacacacaacatcatttgtcattaggaaa

SEQ ID NO: 50238 - DNA, 201 bp, Homo sapiens
ttttgctggaaaatatgagtgaactatacagtaaagcctcacaatgtttccatctgctaggtaaatgaatcaagaatagttttacattcataattacagarggaaagtgtgaaagacccttattccttttttcccttctcttaaaaaatggtgaatagggcctttaatactcaatcttaaatgaatgttgtatattttggc

SEQ ID NO: 50239 - DNA, 201 bp, Homo sapiens
aaggtaggtttgttagttttcagagaaatgaaaccaataggctagagagattagatagatagatagatagatagatagatagatagatagatagatagataaagagggcattaattatgggaattggctcatgcaattatggaggctgagaagtcccacaaaataccacttgcaaactggagaattagaataccagtgtta

SEQ ID NO: 50240 - DNA, 201 bp, Homo sapiens
agaaagaaatgctaactacatttttaatgaaaaattggtaaacaagaaaagagaagaatctaagaaacaatacatagcaaaaaatataggaagcatgtagrtcaagttaaatataattaaccacatataattaataataattattaattgaacacatacaaaaagatataaaactaaacttctatagaaaattataatcta

SEQ ID NO: 50241 - DNA, 201 bp, Homo sapiens
agagttaaacaaaagaggctgtaaacacatgcaaggacaaagtcctgagtgtgggccagtaagactcaagggcctgctgcctggatagcttcaaatcaccractgttgcagattatcccttcattagaaatcaatacaacagctccagcctccagtgtccatactgtgaggaacccggcatcctctcagttgctccataaa

SEQ ID NO: 50242 - DNA, 201 bp, Homo sapiens
gaaggtaggtttgttagttttcagagaaatgaaaccaataggctagagagattagatagatagatagatagatagatagatagatagatagatagatagataaagagggcattaattatgggaattggctcatgcaattatggaggctgagaagtcccacaaaataccacttgcaaactggagaattagaataccagtgtt

SEQ ID NO: 50243 - DNA, 201 bp, Homo sapiens
tgaaggtaggtttgttagttttcagagaaatgaaaccaataggctagagagattagatagatagatagatagatagatagatagatagatagatagatagataaagagggcattaattatgggaattggctcatgcaattatggaggctgagaagtcccacaaaataccacttgcaaactggagaattagaataccagtgt

SEQ ID NO: 50244 - DNA, 201 bp, Homo sapiens
atgaaggtaggtttgttagttttcagagaaatgaaaccaataggctagagagattagatagatagatagatagatagatagatagatagatagatagatagataaagagggcattaattatgggaattggctcatgcaattatggaggctgagaagtcccacaaaataccacttgcaaactggagaattagaataccagtg

SEQ ID NO: 50245 - DNA, 201 bp, Homo sapiens
gtccaaaagccagagaaactggaattctaatgtcctaggtcaggagaagatagatgtcccagctcatgaaaagagtgaatttgcactttcttaacctcttwgttctatgcaagccctcagaattggatgatacccacctacattggtgagggaagctctcctttcctcagtccactgattaaaatgctaattgcttccaga

SEQ ID NO: 50246 - DNA, 201 bp, Homo sapiens
gatgaaggtaggtttgttagttttcagagaaatgaaaccaataggctagagagattagatagatagatagatagatagatagatagatagatagatagatdgataaagagggcattaattatgggaattggctcatgcaattatggaggctgagaagtcccacaaaataccacttgcaaactggagaattagaataccagt

SEQ ID NO: 50247 - DNA, 201 bp, Homo sapiens
ttttaagtgggagccaaatgataagagcttaggaacacaaagaaagaaacaacagacactggggtctacttgttggggggatggtaggagaagggagaagyacagaaaagtatattcataagaatgcttaagtcaccaagaatgatgagccaggagccaacacagtcaataagtgaagtccagtgacattcctctcccctc

SEQ ID NO: 50248 - DNA, 201 bp, Homo sapiens
acactgcctggattacaataccagcttttcgattcactagctgagtgacctcaggcaaatttcataacttctctttgccttaatttccttatgtgtataargtaaaataatagtacttaccacatggaaatcttaggagaaaatgaatcaacatacgtaaagtgtctagaatagcacctagcatagtatcactataaaatg

SEQ ID NO: 50249 - DNA, 201 bp, Homo sapiens
ggtttcccaagaagattttgatatgaaaaacttgtgctaatcaactcacaaggggacttcaagatcacaattcacatttgatgaactgtcattctgatttrtttgtcatcttattttaaatttaacatgagaaagtgaaagaaattgagttcctctttatgcaagtctagtagtcaatagtacggactctgtgttcacact

SEQ ID NO: 50250 - DNA, 201 bp, Homo sapiens
aaagcagagagctaccattcaacacagcaatctcattactggggaaatacccagaggaatagaaagctttctaccataaagatatatgcacatcaatgttsattgcagcactattcacaatagcaaagacatggagtcagccttaaagcccatcagtgacagactggataaagaaaatgtagtacatgtacaccatagaat

SEQ ID NO: 50251 - DNA, 201 bp, Homo sapiens
gcccttagttttactcctaactgaatggtcactcactgtcttctttgctagtttcctcctccttctgatccctaaagtatggagtgtcctaggactccatwcttaaatctcttctctatgtgctctttcttcattggtgaggcaattcaataatttagatgccatctttttcaaactcccaaattaatacccccagcccac

SEQ ID NO: 50252 - DNA, 201 bp, Homo sapiens
taataaacaaattatcaaaaacaaactgataaatgaatgccttcaattcagagtatctgaaattagttactacttgagaaaccctgaactgccctgaagayttgaggctaacttgtgaaagaaacttggtagaagttttgacaaataggacctcagtctttaaaatatattagataacaccaaatactggttgtgaagcca

SEQ ID NO: 50253 - DNA, 201 bp, Homo sapiens
ctgtcctagtgatgtctgagctgttaatcttgtcttttcttttaatctaggtaatgataatgggttctttttcaatattgtttgagcttcattaacatgtrtgttgtctgctgtaatttctttttcattcaagcagtactttgaagctaactttataaggctctctcctgctccaggccaaactttgacttccctttttat

SEQ ID NO: 50254 - DNA, 201 bp, Homo sapiens
ctcttagttcactgtaattaccaaaatgcataactacagccaaagtttttcagagttaattttcttcaacctctttttctcgggcttcctagaaaagatgraaaaagtgagaggaaggtgagagcttgtggataagcctaattcttattctgtcctagtgatgtctgagctgttaatcttgtcttttcttttaatctaggt

SEQ ID NO: 50255 - DNA, 201 bp, Homo sapiens
actgttgatctgggaaccatgctttgagaaccacagccacagtcatttgtctgagcttctcctatctgagccagcccctccacttaggtatttgggcccayggtctcccactcactggaggctccaagaagtctccccactctcacagcaccagttcctgtatctttcctggataatttccactggtttatagtcatccca

SEQ ID NO: 50256 - DNA, 201 bp, Homo sapiens
gtttctaacaggctcccgggtaatggctatactgttgatctgggaaccatgctttgagaaccacagccacagtcatttgtctgagcttctcctatctgagmcagcccctccacttaggtatttgggcccacggtctcccactcactggaggctccaagaagtctccccactctcacagcaccagttcctgtatctttcctg

SEQ ID NO: 50257 - DNA, 201 bp, Homo sapiens
tgcagagaggcagcatattattcatattataatatgataaatgctataatagaacatgtagtacatgtttccacctctaggacactccttttgggtgtggyccctctcaggtaaacaggaaaacatagtaacaataaacatcagtatagattataagttcataaagtaagatgttgactgcaacaccataagcatagcttt

SEQ ID NO: 50258 - DNA, 201 bp, Homo sapiens
tgtggtaggactttgaattttaccccaagtgtgagaggaagcccttggacgatagactagaggagtgacactacatgattttggtttaaaaaggcttactstggctgctgcgtgaagattggaccattgggggttgaagggagaaaagcagagacactagttggaaggccactgcagtagtccatgtgagaacaattgcac

SEQ ID NO: 50259 - DNA, 201 bp, Homo sapiens
gagagattagatagatagatagatagatagatagatagatagatagatagatagataaagagggcattaattatgggaattggctcatgcaattatggagrctgagaagtcccacaaaataccacttgcaaactggagaattagaataccagtgttataattcattctgaatctgagagcctgagaaccagtgagctgatg

SEQ ID NO: 50260 - DNA, 201 bp, Homo sapiens
tttgaattttaccccaagtgtgagaggaagcccttggacgatagactagaggagtgacactacatgattttggtttaaaaaggcttactctggctgctgcrtgaagattggaccattgggggttgaagggagaaaagcagagacactagttggaaggccactgcagtagtccatgtgagaacaattgcaccttgatgaagg

SEQ ID NO: 50261 - DNA, 201 bp, Homo sapiens
agaaaaatgagaaaagaaggggagaataaatgaaaatcaaattgaagagggaggaactagaaaaactgtaggacaaagtgtaaatgaaagaaaatagagcsgggcgcggcggctcacgcctgtaatcccagcactttggaaggccaaggcgtgcggatcacgaggtcaggagctcgagaccatcctggctaacacagtgaa

SEQ ID NO: 50262 - DNA, 201 bp, Homo sapiens
aggtcattgaggtgagaacttcaaggatttgaagaggctattgggtaagaagcaacattaacgcaaatatcttactttttaaatacatactttttttttttaaatagagatgagcgtctcgctatgttgaccagcctgggctcaaactcctggtctcaagtgatcttcccatctctgcctcccaaagtcctgggattacag

SEQ ID NO: 50263 - DNA, 201 bp, Homo sapiens
acctacagaatgggagaaaatttttgcagtctatccatctgacaaggtctgatatccagaatctacaaggaacttaaacaaatttacaagaaaaaaaaaaacaaccctatcaaaaagcgggtgaaggacatgaacagacacttctcaaaagaagacttttatgtggccaataaacatatgaacaaaagcttaccatcatca

SEQ ID NO: 50264 - DNA, 201 bp, Homo sapiens
aattctgtgaagaaagtcattggtagcttgatggagatggcattgaatctataaattaccttgggcagtatggccattttcatgatattgattcttcctaytcatgagcatggaatattctttcatttctttgtatcctcttttatttcattgagcagtggtttgtagatctccttgaagaggtccttcacatcccttgta

SEQ ID NO: 50265 - DNA, 201 bp, Homo sapiens
cgtacagaggcagaattacctggaagctaatgaaacaactttatgaactctctcttacatggaaccctccaggaacttgagaagggccctggcaatgtgtytccttcatcaaatttaaaacgtgccaaattatgatgttttagcagcaattgtttaagactgctgtgtttttcttttacaactgcatccttcatacatttt

SEQ ID NO: 50266 - DNA, 201 bp, Homo sapiens
agtttctgcacttccagcacactcccaggtgatgctaatgcatcagaacacagaaaattatttgagtgacatttttctcaattcttgtgacaactaggacmactctcaatgcatgggaaagaagtttacgcatcacatacaatggacttcttaggatattagggccaaaattcttacaaaatcagagttgagaaaagctgc

SEQ ID NO: 50267 - DNA, 201 bp, Homo sapiens
catatcagtctttcatgaggaaatgattgttaaagcaccacacagatataaagtgtatattttttatgaagcacagaattctgtgaagggaagcaccaagyaaacaatgcacggtgcactccggggaaagctctgagctgtgattcattctcagaatgagggaaataatgacctcagcctatgcacacttccttatgaatt

SEQ ID NO: 50268 - DNA, 201 bp, Homo sapiens
cactccttgtgttgacaaggcacacaatgtggttggatcatgtagattaataaccaatgcaagtgctgacccatgtttctttggttaaaatatagataagwtgttggagagaatttcaaaaaacaagagttttgaaaatgttcacttaaacataatatctcacatttttctaggctctagttatatttttttacaacacta

SEQ ID NO: 50269 - DNA, 201 bp, Homo sapiens
gaacacatggacacagggaggggaacatcacacaccagggcctgttaggggttgggggaaaggggaaggagagccttaggacaaatgcctaatgcatgtgrggcttaaaacctagatgataggtgcagcaaaccaccatggcacatgtatacctatgtaacaaacctacacgttcagcacatgtatcccagaatttaaagt

SEQ ID NO: 50270 - DNA, 201 bp, Homo sapiens
cacaaatttcagagaggatcacatgtataaggcaaagtcgaaggacttgggatagggcagagtgaagaagtggtgctggggagtaatgtaaaggtcaatgmgacatgttacttgttctcagagaggtcatgggttaagctgaagtgcagagaggcagcatattattcatattataatatgataaatgctataatagaacat

SEQ ID NO: 50271 - DNA, 201 bp, Homo sapiens
tgacccgattttccaggtgccatctgtcaccgctttctttgactaggaacaggaattccctgaccccttgtgcttccccggtgaggcgatgcctcgccctscttcggctcgcacacagtggactgcacccactgtcctgcaactactgtctggcactccccagtgagatgaacctggtaactcagttggaaatgcagaaat

SEQ ID NO: 50272 - DNA, 201 bp, Homo sapiens
gtggcgcctacagaggcaggcaggcctccttgagctgtggtgggctccgcccagttcgagcttctctgccactttgtttacctaatcaaataactacctcrgcaatgccgggcgcccctcccccagcctcgctgccaccttgcagtttcatcttggactactgtgctagcaatgagcgagactccgtgggcggaggaccct

SEQ ID NO: 50273 - DNA, 201 bp, Homo sapiens
cattatgatgttagctggttattttgctcattagttgatgcagtttcttcctagccttgaaggtctttacaatttggcatgtttttgcagtggctggtacyggttgtacctttccatgtttagtgcttccttcaggagcttttttagggcaggctaggtggtgacaaaatctctcagcatttgcttgtctgtaaagtattt

SEQ ID NO: 50274 - DNA, 201 bp, Homo sapiens
attgcaacccctgcctttttttttgtttgttttccatttgcttggtagatcttcctccatcattttattttgagcctatctgtgtctctgcatgtgagatrggtttcctgaatacagcacactgatgggtcttgactctttatccaatttgccagtctgtgtcttttaattggagcatttagcccatttacatttaaagtt

SEQ ID NO: 50275 - DNA, 201 bp, Homo sapiens
agccctttgtcagatgagtagattgcaaacattttctcccattctgtaggttccctgttcactctgatggtaatttcttttgctatgcagaagctctttastttaattagatcccatttgtcaattttggcttctgttgccattgcttttggtgttttagacatgaagtccttgcccatgcctatgtcctcaatggtattg

SEQ ID NO: 50276 - DNA, 201 bp, Homo sapiens
agtattccatggtgtatatgtgccacattttcttaatccagtctatcattgttggacatttaggttggttccaagtctctgctattgtgaatagtgctgcwataaacatacgtgtgcatgtgtctttatagcagcatgatttataatcctttgggtatatatccagtaatgggatggctgggtcaaatggtatttctagtt

SEQ ID NO: 50277 - DNA, 201 bp, Homo sapiens
aggcattttcctgtccttatttaaaaaatcttcctagagaaaatggcaagtagctctggcatctaatatatatatttttttatatatgtataatttttttwaattttattattatactttaagttttagggtacatgtgtacaacgtgcaggtttgttacatatgtatacatgttccatgttggtgtgctgcacccattaa

SEQ ID NO: 50278 - DNA, 201 bp, Homo sapiens
tcccttatgttgagctattgctcttagttcactgtaattaccaaaatgcataactacagccaaagtttttcagagttaattttcttcaacctctttttctygggcttcctagaaaagatggaaaaagtgagaggaaggtgagagcttgtggataagcctaattcttattctgtcctagtgatgtctgagctgttaatcttg

SEQ ID NO: 50279 - DNA, 201 bp, Homo sapiens
ctgattggcctggagtcagatctggatccttgtactgggcaaccatctatgggaggaagttgtgttaccctacctactttattttatttatttatttatttttgccattgtaaaccattttattaaaatattaatcctgctgttcctgcaattcctaaaacaaattaaacaaaataattagcctgaaaaaattttttaaca

SEQ ID NO: 50280 - DNA, 201 bp, Homo sapiens
aatttaagattacaaaaaaatctgaaaaatatataaaagtaaatatgtttaaagtgataacaaaaggaataaaaccataaagcaagaataaaacactatcmaaaagcaaattaaaaagcagcaatgacactaagaaataatatatttatagttttgaaatttaaaactcaatggacaggttaaaaagcagatcagttacaa

SEQ ID NO: 50281 - DNA, 201 bp, Homo sapiens
tcatattttaaatttaatacatggagtagttagaaacacaaaaaatggtcaattaaaaaagtgaatgctctttgaagttcctttgtaaaaaagatagccawtatttctgaagaatttaacctgaagttatcttcattaaaggccaaagacttattcataatacttagtattcttgtttcctctttatctttaaaaaaatat

SEQ ID NO: 50282 - DNA, 201 bp, Homo sapiens
gtacaagcaattcggctatagcaaatacagaacagtcatagagtatgtctgggtcaacaacagagagcccgatggagacgcttacaatgtgaggaaagcgmcttccagagacactgacaagaaatccattgcctcatcctgtgcgccctgaagacgttgaataaccgtgggcagtgttctaggcagatgcttcaggtattt

SEQ ID NO: 50283 - DNA, 201 bp, Homo sapiens
tactttgataaaaacgatcatgagtcatagttgagtatacttattcttatgaaacctagcatgactgactacctttattttcatcattataacctaataartagccacttatttttcttctgataacctcaagcaataacattcttttgtaaatttggccttgtaaaaactatgcttgggtggtctatgattactgctatg

SEQ ID NO: 50284 - DNA, 201 bp, Homo sapiens
agcactttgggaggctgaggcaggtggattacctgaggacaggagttcaagaccagcctagccaacatggcaaaaccctgtctcaactaaaaatactaacattagccgggtgtgatgtcgggtgcctgcaattccaactacttgggaggctgaggcaggagaattgcttgaacccaggagatggaggttgcagtgagatga

SEQ ID NO: 50285 - DNA, 201 bp, Homo sapiens
cttcaaaagaacaatatttaaactgactgctgtcttttcaataaaaacaattaaagccaaaaggccatgtaatagtttctccaaaatccagcaaaaatatyttgccatcctaaaattttataccgagcaaaaatattatttgggaataaaggtaaaataaatatatttccaagtaaaacaaacctaacagaatttggcacc

SEQ ID NO: 50286 - DNA, 201 bp, Homo sapiens
cctacattggtgagggaagctctcctttcctcagtccactgattaaaatgctaattgcttccagaaacacccacacagacatacccagaaatagtgttttrccaggcatttggatatctcttaatctagtcaagtcaatacctaaaatcatgcatctcagtgggagaaacataagtggttagaggtgatctaatctccacg

SEQ ID NO: 50287 - DNA, 201 bp, Homo sapiens
tgcatgatgcgctaagtattccagaaccttcctcaatctttctaaatagatatatgaggaaaaatacatagacacacacacacacacacacaaactcacayatacaaacacaaagaaatacctggatgttagaagtaaaaatgaatctaaaatccagcaagtgcctgtgttagaagatactgttgtgtggctcacgcctgt

SEQ ID NO: 50288 - DNA, 201 bp, Homo sapiens
ggaccattgggggttgaagggagaaaagcagagacactagttggaaggccactgcagtagtccatgtgagaacaattgcaccttgatgaaggtaggtttgwtagttttcagagaaatgaaaccaataggctagagagattagatagatagatagatagatagatagatagatagatagatagatagataaagagggcatta

SEQ ID NO: 50289 - DNA, 201 bp, Homo sapiens
ttccacccaggatgtcatattgcttctaatttatcatcttggcgaaggtgagtggggccatctgtgagcttccacttggccttcctcataagcaccacgcrctaaccaactgcaccactggagccactccacttggcttttcctaccataatagctgttattccataagccaaggaatgatgttagggttctgctggaaag

SEQ ID NO: 50290 - DNA, 201 bp, Homo sapiens
gcagctacaaatgctgagattaaagcaagtctattctaaataccttttgtaactgtctatctggaaaattaaggagttgccctgaagaggactcagctctraccaaaattcttagtgagttccttaatgtgtggacatggtgatttcttcacctataaagtggagttgatgaaacttatatgccctacatgctgcaaagga

SEQ ID NO: 50291 - DNA, 201 bp, Homo sapiens
tacaaatgctgagattaaagcaagtctattctaaataccttttgtaactgtctatctggaaaattaaggagttgccctgaagaggactcagctctaaccaraattcttagtgagttccttaatgtgtggacatggtgatttcttcacctataaagtggagttgatgaaacttatatgccctacatgctgcaaaggattgtt

SEQ ID NO: 50292 - DNA, 201 bp, Homo sapiens
agtttctcatgtttggcctttttgaatattgagcaagaaattgccacttctctatgtgacctaattgtataaaaacatatgcaaaaattaaatggttctcyaatttagctaagcataaaagataccccatgacctgtagaatactataaaaggcttccttaaacacattattcaattaattcaggatatacgcatgaggcc

SEQ ID NO: 50293 - DNA, 201 bp, Homo sapiens
cctgattggcctggagtcagatctggatccttgtactgggcaaccatctatgggaggaagttgtgttaccctacctactttattttatttatttatttatttttgccattgtaaaccattttattaaaatattaatcctgctgttcctgcaattcctaaaacaaattaaacaaaataattagcctgaaaaaattttttaac

SEQ ID NO: 50294 - DNA, 201 bp, Homo sapiens
aaaatttatgttctaagcataaatgtatgttgcttgatttaaatatttgtattgtctcctaagctaattttttaaatattaaaatatgtgttactttgaggaaaaacttgtatgcattacctaaaaatatcattgaaccaagacctaaataatttgactatagtaataccatttttctaaagatgattttctttagtatct

SEQ ID NO: 50295 - DNA, 201 bp, Homo sapiens
tgctcatattttaaatttaatacatggagtagttagaaacacaaaaaatggtcaattaaaaaagtgaatgctctttgaagttcctttgtaaaaaagatagycattatttctgaagaatttaacctgaagttatcttcattaaaggccaaagacttattcataatacttagtattcttgtttcctctttatctttaaaaaaa

SEQ ID NO: 50296 - DNA, 201 bp, Homo sapiens
gcctgattggcctggagtcagatctggatccttgtactgggcaaccatctatgggaggaagttgtgttaccctacctactttattttatttatttatttatttttgccattgtaaaccattttattaaaatattaatcctgctgttcctgcaattcctaaaacaaattaaacaaaataattagcctgaaaaaattttttaa

SEQ ID NO: 50297 - DNA, 201 bp, Homo sapiens
aaggaagcatgtcgggaccacggaaaaggacagaaaacttggcagagaaggaacacacagctcactggcacagctctgaggagcatgtgggccacagagasagaggtcacttaagagagttgcgtcatatataaagacagcatgaaagaaagctgacagggatagaggggagaccaagcaagctttaaaaaatatttagtg

SEQ ID NO: 50298 - DNA, 201 bp, Homo sapiens
tgcctgattggcctggagtcagatctggatccttgtactgggcaaccatctatgggaggaagttgtgttaccctacctactttattttatttatttatttatttttgccattgtaaaccattttattaaaatattaatcctgctgttcctgcaattcctaaaacaaattaaacaaaataattagcctgaaaaaatttttta

SEQ ID NO: 50299 - DNA, 201 bp, Homo sapiens
tgaagagttggctgcttctccacctaaggtaaggcaagaaagttcatctcccatgggctgaatgcagactctatggaagaagatcagactgtgctgtcttsaaagagactcatcctagaagtctctctgaatgagacgagtgactccagcctagagtggttctgagaaactagcaagcagaagggaaaaaaatcataagcc

SEQ ID NO: 50300 - DNA, 201 bp, Homo sapiens
ggccacagaattttgcctgattggcctggagtcagatctggatccttgtactgggcaaccatctatgggaggaagttgtgttaccctacctactttattttatttatttatttatttttgccattgtaaaccattttattaaaatattaatcctgctgttcctgcaattcctaaaacaaattaaacaaaataattagcctg

SEQ ID NO: 50301 - DNA, 201 bp, Homo sapiens
tgcactcaggaggtggaggttgcagtgagccaagatcacactacttctctccagcctggacaacagagtgagactctgtctcaaaaaaaaaaaaaaaaaaattacccattcaccagatcagtcgctgcacacaaagctgcagaggctgaagagatctacttaggaaagatacaaccttagtccagcagctagaattgtagc

SEQ ID NO: 50302 - DNA, 201 bp, Homo sapiens
aagcagccaccaagtcaataatagcgtcaaaggctatcatggtcggcacttgctcctagagttaggcagcacaaagcattctctaccttatttggataacyacttccagctgattgttgccatgggaaaatacaggtccaacgtttccagatcctccaatttttcagtgttttaggacagctgagtattggccattttatt

SEQ ID NO: 50303 - DNA, 201 bp, Homo sapiens
aatctacaatgaactcaaattgacaagaaaaaaaacaaccccatcaaaaagtgggcaaaacttatgaacagacaattctcaaaagacgacatttatgcagycaaaagacacataaaaaatgctgatcatcactggccatcagagaaatgcaaatcaaaaccacaatgagataccatctcacaccagttagaatggcaatca

SEQ ID NO: 50304 - DNA, 201 bp, Homo sapiens
ccaaaattgacaaatgggatctaattaaactaaagagcttctgcacaccaaaagaaattaccatcagagtgaacaggcaacctacagaatgggagaaaatktttgcaatctactcatctgacaaagggctaatatccagaatctacaatgaactcaaattgacaagaaaaaaaacaaccccatcaaaaagtgggcaaaact

SEQ ID NO: 50305 - DNA, 201 bp, Homo sapiens
tctggcaggacagttacaggtcctgggacgctggcctcagtggtggtagagtgatgaccatcctccgggtttcacttgcaatgaccttttctgcttcaacracagacaggtggatattttggtcaatctctttggtatctaaccaaattgcaatcgacatgtacaagcaattcggctatagcaaatacagaacagtcatag

SEQ ID NO: 50306 - DNA, 201 bp, Homo sapiens
tgtaaattggatattgagggaaggtaaacacaggacagaagaaaatcactcagagtaagactttggaggatgctctggcttatttatttatttatttattwtttatttatttatttatttatttatttcagattgacccagcctactcctcacccagcatcactatgcttagaaatgtgtagtttatttacatatacttct

SEQ ID NO: 50307 - DNA, 201 bp, Homo sapiens
ttgtaaattggatattgagggaaggtaaacacaggacagaagaaaatcactcagagtaagactttggaggatgctctggcttatttatttatttatttattatttatttatttatttatttatttatttcagattgacccagcctactcctcacccagcatcactatgcttagaaatgtgtagtttatttacatatacttc

SEQ ID NO: 50308 - DNA, 201 bp, Homo sapiens; identical to SEQ ID NO: 31175

SEQ ID NO: 50309 - DNA, 201 bp, Homo sapiens; identical to SEQ ID NO: 31537

SEQ ID NO: 50310 - DNA, 201 bp, Homo sapiens; identical to SEQ ID NO: 31423

SEQ ID NO: 50311 - DNA, 201 bp, Homo sapiens; identical to SEQ ID NO: 30784

SEQ ID NO: 50312 - DNA, 201 bp, Homo sapiens; identical to SEQ ID NO: 31402

SEQ ID NO: 50313 - DNA, 201 bp, Homo sapiens; identical to SEQ ID NO: 31422

SEQ ID NO: 50314 - DNA, 201 bp, Homo sapiens; identical to SEQ ID NO: 30273

SEQ ID NO: 50315 - DNA, 201 bp, Homo sapiens
gagtgctaattagatggacaaatgaatggtcaccctcaaaaggcacattatgcctagtcacagctcttctgaatgccctggtcgctactttaatagctctktgactttcaatggtacaaggtcaagaagagttgccttttgctggaaccttcccaacagaccccattctgcccaccagaaccggaagttgtgtctttgcaa

SEQ ID NO: 50316 - DNA, 201 bp, Homo sapiens
tgtaaacactaaatgtttcacttcctgttaattcattttgccagttggcaaaacagacagagctgtgcagttacttaaaagaaaacagctaccaccagtayaattcttagtaactcaggcctcacctcgggccaacaatgaaaaggtcctcttagctgaacactaattatcatcacagggacacaattaactatcgttttc

SEQ ID NO: 50317 - DNA, 201 bp, Homo sapiens
aataacattcctttaatttactgtgtttgctttttagaccctattttgtttttccattttgaagaactaaatgccccagatgaatcagtcaacaatatgtyggctgctctcacattcagccttctgctgttttataatagtacccttatcttatttcaagaaaagaatgacaaacttatagctgcaaatgctaaatttatg

SEQ ID NO: 50318 - DNA, 201 bp, Homo sapiens
agatttcaattatgctactgtggagtccctgctctctgagagcttctaattgtgcagggcacaccaggtcctaatattgagtaggtactccatgtttgctraagaaattagacaataagcatcccataaccaaagaaggcccaaagtgagctttctccttgtgttgggtaacaatgtcctagctcatgtaaacactaaatg

SEQ ID NO: 50319 - DNA, 201 bp, Homo sapiens; identical to SEQ ID NO: 22888

SEQ ID NO: 50320 - DNA, 201 bp, Homo sapiens; identical to SEQ ID NO: 23548

SEQ ID NO: 50321 - DNA, 201 bp, Homo sapiens; identical to SEQ ID NO: 23311

SEQ ID NO: 50322 - DNA, 201 bp, Homo sapiens; identical to SEQ ID NO: 21216

SEQ ID NO: 50323 - DNA, 201 bp, Homo sapiens; identical to SEQ ID NO: 23317

SEQ ID NO: 50324 - DNA, 201 bp, Homo sapiens; identical to SEQ ID NO: 23318

SEQ ID NO: 50325 - DNA, 201 bp, Homo sapiens; identical to SEQ ID NO: 20180

SEQ ID NO: 50326 - DNA, 201 bp, Homo sapiens; identical to SEQ ID NO: 21273

SEQ ID NO: 50327 - DNA, 201 bp, Homo sapiens; identical to SEQ ID NO: 22553

SEQ ID NO: 50328 - DNA, 201 bp, Homo sapiens; identical to SEQ ID NO: 21066

SEQ ID NO: 50329 - DNA, 201 bp, Homo sapiens; identical to SEQ ID NO: 20683

SEQ ID NO: 50330 - DNA, 201 bp, Homo sapiens; identical to SEQ ID NO: 18098

SEQ ID NO: 50331 - DNA, 201 bp, Homo sapiens; identical to SEQ ID NO: 20614

SEQ ID NO: 50332 - DNA, 201 bp, Homo sapiens; identical to SEQ ID NO: 20615

SEQ ID NO: 50333 - DNA, 201 bp, Homo sapiens; identical to SEQ ID NO: 19675

SEQ ID NO: 50334 - DNA, 201 bp, Homo sapiens; identical to SEQ ID NO: 20689

SEQ ID NO: 50335 - DNA, 201 bp, Homo sapiens; identical to SEQ ID NO: 23042

SEQ ID NO: 50336 - DNA, 201 bp, Homo sapiens; identical to SEQ ID NO: 20691

SEQ ID NO: 50337 - DNA, 201 bp, Homo sapiens; identical to SEQ ID NO: 20623

SEQ ID NO: 50338 - DNA, 201 bp, Homo sapiens; identical to SEQ ID NO: 20624

SEQ ID NO: 50339 - DNA, 201 bp, Homo sapiens; identical to SEQ ID NO: 21912

SEQ ID NO: 50340 - DNA, 201 bp, Homo sapiens; identical to SEQ ID NO: 20329

SEQ ID NO: 50341 - DNA, 201 bp, Homo sapiens; identical to SEQ ID NO: 23543

SEQ ID NO: 50342 - DNA, 201 bp, Homo sapiens; identical to SEQ ID NO: 23544

SEQ ID NO: 50343 - DNA, 201 bp, Homo sapiens; identical to SEQ ID NO: 23545

SEQ ID NO: 50344 - DNA, 201 bp, Homo sapiens
gggaggttcagactcttggagccagaggctgcatgacctctaaactgtaatttctttttttttttttttgagacagagtctggctctaccgcccaggctgragtgcaatggcgcgatctcggctcactgcaagctccgcctcccgggttcacgccattctcctgcctcagcctcccgagtagctgggactacaggcgcccg

SEQ ID NO: 50345 - DNA, 201 bp, Homo sapiens; identical to SEQ ID NO: 8296

SEQ ID NO: 50346 - DNA, 201 bp, Homo sapiens; identical to SEQ ID NO: 8241

SEQ ID NO: 50347 - DNA, 201 bp, Homo sapiens
acaatatgggaaaaatccaccctcaagattcaattacctcccgctgggtccctaccacaacacctggggattatgggagccacaattcaagatgagatttkggtgggacacagtcaaaccatatcagtccctatcttaaacaaataatacaaaaaaaacccaagatttcaaaatcagggttaaactctctgtcaagctggt

SEQ ID NO: 50348 - DNA, 201 bp, Homo sapiens
ctgggtccctaccacaacacctggggattatgggagccacaattcaagatgagatttgggtgggacacagtcaaaccatatcagtccctatcttaaacaartaatacaaaaaaaacccaagatttcaaaatcagggttaaactctctgtcaagctggttggaatttgcaagacagaatcagtttcccagtgctgctgtaac

SEQ ID NO: 50349 - DNA, 201 bp, Homo sapiens
ttcagtacagatcactgaaatttccagaacttcctcttccccttacttgaaatccgatctgtccctcaagcacttgtctcattcatgctccttcatgcttycccagtgggaagaactctatctccctttccttctgacctccaacaacaggtgcaccactcgtgtaaggctatcactgatcttgctgcttccaatcttatt

SEQ ID NO: 50350 - DNA, 201 bp, Homo sapiens
acttgtttaagcattcaaatgtaactcatatcaagtatttatgacactttgtaatagtaaaatattgggcagatgccagaaagtaaggtggaaagcttatkttgataagcagtaaaaggactttattctcttggttctgtccattttgtctttctaaggaggagcccccaacctttgtggcaccagggactggcttcatgg

SEQ ID NO: 50351 - DNA, 201 bp, Homo sapiens
tcaaagaacagaagaagaccattagacatcccacagaggatttggatatcagaaatgttaaacattaggaatatctcaaaagatagcttgtatacagaatmtattttaaagaaaatttaaaatgtaacttattttataaatttgcttgttcactaaataatacatgagaatacttgttcaagaggatgggaagctaaaagt

SEQ ID NO: 50352 - DNA, 201 bp, Homo sapiens
aaagcttatgttgataagcagtaaaaggactttattctcttggttctgtccattttgtctttctaaggaggagcccccaacctttgtggcaccagggactkgcttcatggaagacaatttttccacagatggggtggggatggtgggatggcttcaggatgattcaagcatattacatttattgttcactttatttctatt

SEQ ID NO: 50353 - DNA, 201 bp, Homo sapiens
cttgttcactaaataatacatgagaatacttgttcaagaggatgggaagctaaaagtctatcacgattgttataaatttgctaacaactaatattttcctytaggaaacaagaagtagctcatgaggatgatttgactttcttcctcagatcatttcatgcatagataggggagatcctatactttctgtttattttctgc

SEQ ID NO: 50354 - DNA, 201 bp, Homo sapiens
gcatgatccttggcagcagtgccaatcctgagacggcagcacgtggtgaagggggtctcctgcaaagaaagctgagggtgagagtgggcaaaggaaatacmgtatagaaatctataaggatttattcaggagagattaaatgtattcagatcatctttacataaaatggtctctactctcatctcttttttttctctactt

SEQ ID NO: 50355 - DNA, 201 bp, Homo sapiens
ctttaggaaacaagaagtagctcatgaggatgatttgactttcttcctcagatcatttcatgcatagataggggagatcctatactttctgtttattttcygctgcttaaacagaattttgcagttaaataatttgtcagtgttcacatgtagctgaaagaaacagaactgaaacccaattctgtggcttcaattaaagtg

SEQ ID NO: 50356 - DNA, 201 bp, Homo sapiens
atgtagctgaaagaaacagaactgaaacccaattctgtggcttcaattaaagtgtaaaaaacataacaattcaccatcagtctaatgaaatatttacacartctttcatggtcacgttttgtatacaaagagcaggtgctattattattttgattccaataacttaacattaaaacgtcagccacaagctgagattcctcc

SEQ ID NO: 50357 - DNA, 201 bp, Homo sapiens
agttgagaagcctccattctcagtaacaactgtcttcggatgtcatgatactaagacccttcactttcttttgtcatctcaggccacatatgttcgacctragagctgctatcttcccagctggttgacgcctcagtacttggatgctcacttcttagtctcacgcttttactcccgaaccaacagcttcctgaagattgt

SEQ ID NO: 50358 - DNA, 201 bp, Homo sapiens
aggccacatatgttcgacctgagagctgctatcttcccagctggttgacgcctcagtacttggatgctcacttcttagtctcacgcttttactcccgaacsaacagcttcctgaagattgttccagaaccaaagcagcttgaatgtaatcaccagaaggttgttactgtgcattactccctaaacagtgaagcatatgagg

SEQ ID NO: 50359 - DNA, 201 bp, Homo sapiens
ttccagaaccaaagcagcttgaatgtaatcaccagaaggttgttactgtgcattactccctaaacagtgaagcatatgaggatgattccaatgtaaagttmttctatttggtaagtctcagtcagtgggttcctggaatcctgttcaattgcacgtctgcttagcccagcacagcttagaaatcatgcatcagtcatgcca

SEQ ID NO: 50360 - DNA, 201 bp, Homo sapiens
tgattccaatgtaaagttcttctatttggtaagtctcagtcagtgggttcctggaatcctgttcaattgcacgtctgcttagcccagcacagcttagaaakcatgcatcagtcatgccacggtgaccagagtaagggcagccttctcactttgctggtgaatactgttcgatccattaacaacaaacaaacacatagaacg

SEQ ID NO: 50361 - DNA, 201 bp, Homo sapiens
agaaagtccagtccatgaatactcaaagagaacaaaaagtatactattctctaatacaccccagcacaaaattgctacacattgctgatgcgagtatatgratggtgtagacacacaaggaaagctgagtaccactgatgttatttagtttgcaagctgggattacaggtcagaaagagttacatctggcattccatctcc

SEQ ID NO: 50362 - DNA, 201 bp, Homo sapiens
ttgttggttttttgttttttgcttttaaagcaaagcccactagagacagcaccacatatgtgactggtaaggcaacagcagaagaaaggagtccttttatyaggagtcttgacctaaaaagccaagtcctaataatgaaaaaacaatgagcaaagaaagaggaagaaaatggctgtgaaagaagagaggacagtggaaatg

SEQ ID NO: 50363 - DNA, 201 bp, Homo sapiens
gcctccaagccatcacaaagacggcctcggctccccttcccctcctctgattctgacgataaatcctttggaagagcatctcaggctcacacaccaattarcatttctcataccggtgcacaagggccgtgaaaagtgattccatagtaaattagtctggaaattgcctgaattgtgatgccgggagatgtcctctaggtt

SEQ ID NO: 50364 - DNA, 201 bp, Homo sapiens
ctattttattcagtctacaggcaggatcactccatggaggcctgctcctttccttccttttcccccatttctaaactgtgatccatgccccactctgaaasaaccattttgacagtctattgtgtagccttcttaggacattagccaccccaacgcaaacaccccggcaatgggagttttccagaggcttctccccggccc

SEQ ID NO: 50365 - DNA, 201 bp, Homo sapiens
tccccttcccctcctctgattctgacgataaatcctttggaagagcatctcaggctcacacaccaattagcatttctcataccggtgcacaagggccgtgmaaagtgattccatagtaaattagtctggaaattgcctgaattgtgatgccgggagatgtcctctaggtttgggatggcggggagaagggagaactttctt

SEQ ID NO: 50366 - DNA, 201 bp, Homo sapiens
atcgaataaattactggattcagatccatcatgaccattggttttaaaaataatctgaagcgagtgagtgcagcctccaagccatcacaaagacggcctcrgctccccttcccctcctctgattctgacgataaatcctttggaagagcatctcaggctcacacaccaattagcatttctcataccggtgcacaagggccg

SEQ ID NO: 50367 - DNA, 201 bp, Homo sapiens
agtggtaaacatggagagaactgagaggagatacagagaggtggaaggagaaggaagaaggagaggaaactctgcaagggaaacttgggcaaatgtctacrtttatttacttgtctgataaggaaatggtggagtataggaatggccaataatctaagacaaaaacaattagtgctagatacagaaatcaaaattgaagca

SEQ ID NO: 50368 - DNA, 201 bp, Homo sapiens
attgtattaaagtttattagagaacctgcttaaaaatacaaaataaaaatatagattacatagcctaaatgttagagatttcatttccatgagtctggggkggggagcctcagaaagtgtatttttaaagagcaccttattctattctaataatatccatattattctaataatattctaataatatccgtattattctaa

SEQ ID NO: 50369 - DNA, 201 bp, Homo sapiens
  misc_feature (1)...(201): n = A,T,C or G, or insertion/deletion polymorphism (see Tables 1-2)
ctacattcactagactgttgcttaattttaatttccagagcaggaatctaatttttagtgctccaaagaccttgtagtaatctaaatccgaaatcacttcngtaagatagcatgtggttcctgttctccttggttcatggttgaagcttctatttctaagaatgcaactcctctatttaaccaaagcagtgagaatttcta

SEQ ID NO: 50370 - DNA, 201 bp, Homo sapiens
aaatttgactacataataaaaatatagtaatgatgcaactgggctcattatcaaatgagccaagatatagagcatatacctagtttcttctgcccaaatcytacatcggtcttttctttcattttctgcaatttcattgctgatggtgcctttcttttcctttaagtcagtgttttgtagaatattcaaacatactttttc

SEQ ID NO: 50371 - DNA, 201 bp, Homo sapiens
agggagagatagtatgaaccagaaggggacatgaaggagttgttgtattggttcttggctggtttatacaagatttagtgcagacagtcattagtgactasagcagaatcagcctcattttaataattgtttttagagaaaaatcaagcagcttagaacaatgaaaatgtgattttactaggttcttgttcactagttttt

SEQ ID NO: 50372 - DNA, 201 bp, Homo sapiens
caagcagcttagaacaatgaaaatgtgattttactaggttcttgttcactagttttttgaaatagaccaagctgagtttaaaaaaaaatctaaaaaaaaargacaaattaagtaataaaaactaaatttgttgaacacagttgaagccatctgcattggaagtattacaaatagcaaacaaaaagggatagtactctaggt

SEQ ID NO: 50373 - DNA, 201 bp, Homo sapiens
aaatagcaaacaaaaagggatagtactctaggttcatttctcattattagaatctcatccaaatggttaacgtcttcccatggcacctttgggtaatatawtcattttcttcctatgaggaaatctcatgagaagctctacctctcttaatgcttgagttaatgttgcagcagtagctttcttcaataccatctcaatatt

SEQ ID NO: 50374 - DNA, 201 bp, Homo sapiens
agattcaattccatgaatttagaataacaagtaggcccttaattcaactgttatatttctcagttccaagaattctggacaaggtttatgaatcctgttcytatctccagacacattacgttttattagtgaatgaatgctgcaattagtgggaaggagcacttagcaacttggggagtgggcaaaggaccctatgtactc

SEQ ID NO: 50375 - DNA, 201 bp, Homo sapiens
gaaactctgcaagggaaacttgggcaaatgtctacatttatttacttgtctgataaggaaatggtggagtataggaatggccaataatctaagacaaaaamaattagtgctagatacagaaatcaaaattgaagcatttcaaaaagaggcaaccagcagtgtaaaacattgcaactgtcagagtgaagactgaccacgaat

SEQ ID NO: 50376 - DNA, 201 bp, Homo sapiens
aatcaaaattgaagcatttcaaaaagaggcaaccagcagtgtaaaacattgcaactgtcagagtgaagactgaccacgaatttgttgataaggaagttatkattcatctaagagggcatttttattatgttggagagacccaagggcaggattgcttactgagactgcagggtgtatgttgtgaaagagagagaagtaaat

SEQ ID NO: 50377 - DNA, 201 bp, Homo sapiens
gcaactgtcagagtgaagactgaccacgaatttgttgataaggaagttattattcatctaagagggcatttttattatgttggagagacccaagggcaggrttgcttactgagactgcagggtgtatgttgtgaaagagagagaagtaaatgaaaattcttgaaaactaggcagatgagtttcaatataatcaatagatat

SEQ ID NO: 50378 - DNA, 201 bp, Homo sapiens
taggcagatgagtttcaatataatcaatagatattcaaactttcagtcagaaatcagtatttgtttgggttgtcctaaatgtgtttatgtttctttgcttmataatagatttataattaacctcttcactcatctagaaaaaaaaccttgagttcatatattaacattatttttatttttatttcagtatccagtgatcac

SEQ ID NO: 50379 - DNA, 201 bp, Homo sapiens
ttaacattatttttatttttatttcagtatccagtgatcacccttcaggtaagataactaatagttgaagaattgttttctcattttttgaacatctctcyaaacctcaaaatcaaaaggcagctcacagggaagattgtctatttaaattgtcgcagaattattaatttcatgtagacagcctcaagaggacagaaatag

SEQ ID NO: 50380 - DNA, 201 bp, Homo sapiens
gatgctcaatgagaagaaaacatatcactccttctctgtggaagaatatggtaaataatagcaatgaaaatattacctatcaataaaaaaattataaaatmtttccaattttgcaagggcaagattattaaataatgaattttcaagtgagtatctcttcctttcctctttccttgtcctctgttactattttagggttct

SEQ ID NO: 50381 - DNA, 201 bp, Homo sapiens
  misc_feature (1)...(201): n = A,T,C or G, or insertion/deletion polymorphism (see Tables 1-2)
aatccgaaatcacttctgtaagatagcatgtggttcctgttctccttggttcatggttgaagcttctatttctaagaatgcaactcctctatttaaccaangcagtgagaatttctactgcaatcctttgacaatcatccttgattggaagcaccatggggaagtaaagggcttcttgaaaatcaaagcagctgcagcatt

SEQ ID NO: 50382 - DNA, 201 bp, Homo sapiens
caggccagatctgacccactggcatttattacattttctgctaaaggagccactctcaacctggaagagaggagatctgtggcaatcagatccagagagartgtggtctttgtacagactgataaacccacctacaagcctggacagaaaggtgagtgtacctaaatcaggttaccctcaactaatgtcacttatatgata

SEQ ID NO: 50383 - DNA, 201 bp, Homo sapiens
  misc_feature (1)...(201): n = A,T,C or G, or insertion/deletion polymorphism (see Tables 1-2)
tctaagaatgcaactcctctatttaaccaaagcagtgagaatttctactgcaatcctttgacaatcatccttgattggaagcaccatggggaagtaaaggncttcttgaaaatcaaagcagctgcagcattatcataactcccttattagttctcaccccccgaatgttgacttattattgtcaattaggccaaatatgat

SEQ ID NO: 50384 - DNA, 201 bp, Homo sapiens
gagaacctgcttaaaaatacaaaataaaaatatagattacatagcctaaatgttagagatttcatttccatgagtctggggtggggagcctcagaaagtgyatttttaaagagcaccttattctattctaataatatccatattattctaataatattctaataatatccgtattattctaataacattctaatcacatat

SEQ ID NO: 50385 - DNA, 201 bp, Homo sapiens
  misc_feature (1)...(201): n = A,T,C or G, or insertion/deletion polymorphism (see Tables 1-2)
tcttgaaaatcaaagcagctgcagcattatcataactcccttattagttctcaccccccgaatgttgacttattattgtcaattaggccaaatatgattanccaactccctgctttagtaataactacatttgcataagaacaggattaatggactgttccctcaaatatgggtcatagataagaagatcatttgtaccaa

SEQ ID NO: 50386 - DNA, 201 bp, Homo sapiens
aacatcacacaacaaggcctgtcgtgcagtggggagagggggagggatagcactaggagaaatacctaatgtaaatgacgagttaatgggtgcagcacagmaacatggcacatgtatacatatgtaacaaacctgcacgttgtgcacaagtaccctagaacttaaagtataataattaaaaataaaataaaatgtgatata

SEQ ID NO: 50387 - DNA, 201 bp, Homo sapiens
agtttcttctgcccaaatcttacatcggtcttttctttcattttctgcaatttcattgctgatggtgcctttcttttcctttaagtcagtgttttgtagartattcaaacatactttttccagaaagtttcatttgcatcaagaagtttcagatctttctttaaacttatcttaagacctggaactactagtcctctaaaa

SEQ ID NO: 50388 - DNA, 201 bp, Homo sapiens
aaattgagccaggagtcttacacaattgagagatattcagttttcaaaaaattgatcattacaatctgagattataatgctacaaatattcataatctacycagcatcatgcttctttttgaataaaaatatggtgtgatattaactatgattgctaaaacctcattgcacagtttattgttgcttcatatttataatgca

SEQ ID NO: 50389 - DNA, 201 bp, Homo sapiens
cagcatcatgcttctttttgaataaaaatatggtgtgatattaactatgattgctaaaacctcattgcacagtttattgttgcttcatatttataatgcartatattaactactatatagtggcatgaacaaaatatgaaaaagcatagtaaacagataaaatagaaagtgagaccagactaatatggtgatggtagtcta

SEQ ID NO: 50390 - DNA, 201 bp, Homo sapiens
ataactaatagttgaagaattgttttctcattttttgaacatctctctaaacctcaaaatcaaaaggcagctcacagggaagattgtctatttaaattgtygcagaattattaatttcatgtagacagcctcaagaggacagaaataggtttccacccccaccaccatgtgattcatattagcatgcacccattaatacag

SEQ ID NO: 50391 - DNA, 201 bp, Homo sapiens
gttttctcattttttgaacatctctctaaacctcaaaatcaaaaggcagctcacagggaagattgtctatttaaattgtcgcagaattattaatttcatgyagacagcctcaagaggacagaaataggtttccacccccaccaccatgtgattcatattagcatgcacccattaatacagacaataataatatagacaacg

SEQ ID NO: 50392 - DNA, 201 bp, Homo sapiens
ttcatatttataatgcaatatattaactactatatagtggcatgaacaaaatatgaaaaagcatagtaaacagataaaatagaaagtgagaccagactaayatggtgatggtagtctaagacagtatttcagcagaagactacaatctagctagcgacaatctgagaaccaaggcgatcaacagtgaaaactgtcaaaaga

SEQ ID NO: 50393 - DNA, 201 bp, Homo sapiens
ttttttgaacatctctctaaacctcaaaatcaaaaggcagctcacagggaagattgtctatttaaattgtcgcagaattattaatttcatgtagacagccycaagaggacagaaataggtttccacccccaccaccatgtgattcatattagcatgcacccattaatacagacaataataatatagacaacgggcaagtat

SEQ ID NO: 50394 - DNA, 201 bp, Homo sapiens
ggtagtctaagacagtatttcagcagaagactacaatctagctagcgacaatctgagaaccaaggcgatcaacagtgaaaactgtcaaaagacaacgaatyatgacctggacttcagtctttacaacaggatacctgacaaatttcatttcatgtagtttagaaacctgttagaactaagcattcttttgtggtctctcag

SEQ ID NO: 50395 - DNA, 201 bp, Homo sapiens
tatgcactggggataaaatatggctcgcctttaagaaatcagagattgacacagaaaataaatgtaaaaaaatcacagctagctctaaaatatactaagtrctgtaatatgcatctatgtgacctcagataggagagtaaccaattctccttgggtgatgtgaggacgcactcatgttttgaatcctaagtaagttggaaa

SEQ ID NO: 50396 - DNA, 201 bp, Homo sapiens
aatatgattacccaactccctgctttagtaataactacatttgcataagaacaggattaatggactgttccctcaaatatgggtcatagataagaagatcrtttgtaccaaatgtttatggcaaggagtttccatggcacaacaaactgcatgtgcttatgtatagagatggaaattgatgtagcatttccaaaaatgatg

SEQ ID NO: 50397 - DNA, 201 bp, Homo sapiens
ttggaaacctaagtaggaaacaccttgctgaaactttataatgaataaaaacatccagcatgcaaaaatacgctttcttattctcaggatccagaaggcartcgaatacaacagtgggtgaatgaggagtctgtgggagggattctacaactctccttccagttaatctcagagcccatcctcggatggtatgaaatcacc

SEQ ID NO: 50398 - DNA, 201 bp, Homo sapiens
tcgaatacaacagtgggtgaatgaggagtctgtgggagggattctacaactctccttccagttaatctcagagcccatcctcggatggtatgaaatcaccrtggagatgctcaatgagaagaaaacatatcactccttctctgtggaagaatatggtaaataatagcaatgaaaatattacctatcaataaaaaaattata

SEQ ID NO: 50399 - DNA, 201 bp, Homo sapiens
tatctttgcaagccagtgtttctaattgctggacattatctggttcagtattccatttagataaatagattcaatgcatggctggcctatgagatttgggyattcataataaatttgactacataataaaaatatagtaatgatgcaactgggctcattatcaaatgagccaagatatagagcatatacctagtttcttct

SEQ ID NO: 50400 - DNA, 201 bp, Homo sapiens
tggctggcctatgagatttgggcattcataataaatttgactacataataaaaatatagtaatgatgcaactgggctcattatcaaatgagccaagatatrgagcatatacctagtttcttctgcccaaatcttacatcggtcttttctttcattttctgcaatttcattgctgatggtgcctttcttttcctttaagtca

SEQ ID NO: 50401 - DNA, 201 bp, Homo sapiens
tggtatgaaatcaccatggagatgctcaatgagaagaaaacatatcactccttctctgtggaagaatatggtaaataatagcaatgaaaatattacctatyaataaaaaaattataaaatctttccaattttgcaagggcaagattattaaataatgaattttcaagtgagtatctcttcctttcctctttccttgtcctc

SEQ ID NO: 50402 - DNA, 201 bp, Homo sapiens
atatcactccttctctgtggaagaatatggtaaataatagcaatgaaaatattacctatcaataaaaaaattataaaatctttccaattttgcaagggcargattattaaataatgaattttcaagtgagtatctcttcctttcctctttccttgtcctctgttactattttagggttctccatctactgtgatttttatc

SEQ ID NO: 50403 - DNA, 201 bp, Homo sapiens
attttctcctaaaatcttcataaaatttctattgtagtatctttattactattttaaagatgaagatattgagaaacactttcccaagttcaacacctgaraagtgatgaatttggaattcaaaatatgcatttttctatccaattccaaaatccagtcttaggcacttcaacgtcctcctcacactgtttattaatggca

SEQ ID NO: 50404 - DNA, 201 bp, Homo sapiens
agaaacactttcccaagttcaacacctgagaagtgatgaatttggaattcaaaatatgcatttttctatccaattccaaaatccagtcttaggcacttcarcgtcctcctcacactgtttattaatggcaaacataagcaaaggttgatggtttgtaaaggagaaacaattgttttgtatgaatgtatttatgttaatatg

SEQ ID NO: 50405 - DNA, 201 bp, Homo sapiens
acaaacataggattttgacagccacaatgaattctttcattcttcctactctgcacctgtctgtggccttttcctctaccatgttctgtcacatccacatmattatctcgtgtcacagagccttccctgtgacttctgtgatgtatggctatgggcatggaatggatgtacttaacattatggcttttttattctttcttc

SEQ ID NO: 50406 - DNA, 201 bp, Homo sapiens
atggaaaagcaagtacatgaattcatagatgttaacaagcagtgcatttgtaaagctaaaaagaaacattttacctggtgtcctttcagatcatcagtctytctgctcagtcaagcacaattcttttaatccctatcttcatccacttgtctctctaaaattgattgggcttctcctaggatcttcatgtttgtacaaaga

SEQ ID NO: 50407 - DNA, 201 bp, Homo sapiens
aggattttgacagccacaatgaattctttcattcttcctactctgcacctgtctgtggccttttcctctaccatgttctgtcacatccacatcattatctygtgtcacagagccttccctgtgacttctgtgatgtatggctatgggcatggaatggatgtacttaacattatggcttttttattctttcttcctatttat

SEQ ID NO: 50408 - DNA, 201 bp, Homo sapiens
ttgactgctatttttatctagatagatagaccaatagatagatagatagatagatagatagatagataggatagataggatagataggggtggttttgttktttttttttttttttttttttttttagacagagtctcactcttttgcccaggctggaagtgtggtgacacgatctcagctcactgcaacctctgcctccc

SEQ ID NO: 50409 - DNA, 201 bp, Homo sapiens
tagagatggggggtctccctatattgctagggctggcctcaaacacctaggctcaagcagtcctcccacttcagcctcccaaagtgctacaattttaggcrtgtgccacagcacttggcctactgcagtagagatatagatacgaatacttttcttaagggtactgtacagttaggctgccctggaaccattatgtctctt

SEQ ID NO: 50410 - DNA, 201 bp, Homo sapiens
ggtggctcacgcctgtgatcccaacactttgggaggcggaggcgggcagatcacctgaggtcaggagtttgagaccagcctggccaacacggtgaaacccygtctctactaaaaatacaaaaattagccgggtgtggtggcatgcacctgtaatccccgctacctaggaggctgaggcaggagaatcactggagcctcgga

SEQ ID NO: 50411 - DNA, 201 bp, Homo sapiens
gtcaagtattgggttataagcagtagagataagagaacaggaatttggaaggaaagaacaccacgagctacattcattgggaatgcttggtggaaaaggtrgttctcaaggcaagttaaggaagaattttcagcaagacctgcaaagtcataaaaatgagtacgaatgtgacagataaggagacactggctgctcagaatt

SEQ ID NO: 50412 - DNA, 201 bp, Homo sapiens
ttttaggcatgtgccacagcacttggcctactgcagtagagatatagatacgaatacttttcttaagggtactgtacagttaggctgccctggaaccattmtgtctctttgagtttccttctctactctgaactttaagtgtctattttcttattttctagttcatagaagacatttcactatcacaactgtgtatttact

SEQ ID NO: 50413 - DNA, 201 bp, Homo sapiens
tttctaatcatataaatctcagtattcttggacatcaaggaagtcttatatttttaagcaaccctgtctgctaccatcttcccaacaaccccaccaccatstgttttgatgcctacacagaagatataagccagtggatcctacatttttttcaagtatttgctgaaatacaaagatttatcaaaattgctaagaagcagg

SEQ ID NO: 50414 - DNA, 201 bp, Homo sapiens
ggatcttcatgtttgtacaaagaaagcccaagctaaattttcaaggtcaaggaaaaaacatacgcttttccctgcctagataaaaccttcagacagaccaraataatggactagcattgctactgtccagatgttcatgtcctcccaaaatttgtatgttggaacctaaaatccaatgtgatagtattaagaggtatgata

SEQ ID NO: 50415 - DNA, 201 bp, Homo sapiens
aaggtcaaggaaaaaacatacgcttttccctgcctagataaaaccttcagacagaccagaataatggactagcattgctactgtccagatgttcatgtccycccaaaatttgtatgttggaacctaaaatccaatgtgatagtattaagaggtatgatagttgatacagtttggctgtgtccccacccaaatctcatcttg

SEQ ID NO: 50416 - DNA, 201 bp, Homo sapiens
aaattaaaacattagctgggcatggtggctcacacctatggtcttagctcctcgggaggctaaggtgagaggatcacctaagcctggggaggtcgaggctrcagtgagctatgatcataccactacattccagcctgggtgacagagcaagactgtctcaaaaaagaaaaaggaagaagaaggaggaggaaggaggaagaa

SEQ ID NO: 50417 - DNA, 201 bp, Homo sapiens
gagggctaataaacatcatatatacatgatgtttattacatatatattatatatattaggtatgtaatatatatgtattacatatatacacacacacacayatatatatatatatgtacacacacatatatatacaaagtctggctctatcacccaggctggagtgcagaggcacaatcttggctcactgcaacctctgcc

SEQ ID NO: 50418 - DNA, 201 bp, Homo sapiens
ctactaaaaatacaaaaattagccgggtgtggtggcatgcacctgtaatccccgctacctaggaggctgaggcaggagaatcactggagcctcggaggcaraggctgcagtgaactgagatcgcgccactgcactgcagcctggatgacagagcaagagtctgtctcaaaaaaaaaaaaaagaattagatcacagccccaa

SEQ ID NO: 50419 - DNA, 201 bp, Homo sapiens
acccgggaggcagaggttgcagtgagctgagaacgcgccactacactccagcctgggagacacagcgagactctgtctcaaaaaacaaaaacaaaaaacamcaacaacaaaaaaacaagtctctgctgactgcttgaactgaagacatctagtctcaggaactgtgaagcctccatcttccactatggccacagggaagga

SEQ ID NO: 50420 - DNA, 201 bp, Homo sapiens
ggaattctatgcagccataaaaaatcaaaatcatgtcctttgcagcaacatagatgcagctggaggccattattctaagcaaagaaatgcaggaaaagaawaacaaataccgtatgttctcacttacaaatgagagctacacatcaggtacttatggacataaagatggcaatactaggcactagggatgcctagaggtga

SEQ ID NO: 50421 - DNA, 201 bp, Homo sapiens
gaattctatgcagccataaaaaatcaaaatcatgtcctttgcagcaacatagatgcagctggaggccattattctaagcaaagaaatgcaggaaaagaaaracaaataccgtatgttctcacttacaaatgagagctacacatcaggtacttatggacataaagatggcaatactaggcactagggatgcctagaggtgag

SEQ ID NO: 50422 - DNA, 201 bp, Homo sapiens
catgtaccctctgaatataaagtaaaagttgggggaaaaaagagcagttttgctactgaagcttctggaatgtaactgaacaaccttttctcagatccagstattggataagaaatcaaatccagccatacgtggctgtgtacttctttgactatattattatcatattaagtagacttgatttcttaaaaagaaaataaa

SEQ ID NO: 50423 - DNA, 201 bp, Homo sapiens
gccctgcaaccacagattccactcaggtattgctcatatgcctcagtgtactctgactcagtggctttcagtccctgctcctcttccttctgctgtccctrttatcaccactggcatttctgttcctttccttctatgtctctccaactcccagagggaggatttgaccaactgtgtttggtcatcacccaatatcaaatc

SEQ ID NO: 50424 - DNA, 201 bp, Homo sapiens
tgggaacatgctccactgtttccagctttgtatagaaatttctaatcatataaatctcagtattcttggacatcaaggaagtcttatatttttaagcaacyctgtctgctaccatcttcccaacaaccccaccaccatctgttttgatgcctacacagaagatataagccagtggatcctacatttttttcaagtatttgc

SEQ ID NO: 50425 - DNA, 201 bp, Homo sapiens
tttttattgcactcagcatttttaattgttgctagcaggaaggttagtcagatgtcttagaccacaggaccactgtattgccagaatctaaagtcaaaaakccgctttaaaacataaagctaattatgtcactctcctgctttgaaactttcaatgcttttctcatgatatacagtgtaaatctgagctcctaagtgctct

SEQ ID NO: 50426 - DNA, 201 bp, Homo sapiens
caaatttacagaaacagagtgagtccatgtaagaaacctgaccttatacacagggacgatgcactgaaacctgtttcacagcaaagggaactgaaagtttytaaagcagtcaccacagcagccacgtggcttagaacacaaaacagacagccccctaaattatgaagtcatacacacagctgctaaataacagcactgagt

SEQ ID NO: 50427 - DNA, 201 bp, Homo sapiens
aagcagtgcatttgtaaagctaaaaagaaacattttacctggtgtcctttcagatcatcagtctctctgctcagtcaagcacaattcttttaatccctatyttcatccacttgtctctctaaaattgattgggcttctcctaggatcttcatgtttgtacaaagaaagcccaagctaaattttcaaggtcaaggaaaaaac

SEQ ID NO: 50428 - DNA, 201 bp, Homo sapiens
tatcaaatcaacataatgtacacttataagctagggatgcctgagaacataaccttcgatgtatctatttagtgcttgcaataaacagtgtgccatttatygtacttgggttggcacgtgcatgtctccaaattaataagaatgaaaaatgtaagtgatttagccaaagctgtaccataatccagtgatcatattgcatgc

SEQ ID NO: 50429 - DNA, 201 bp, Homo sapiens
acagtgtgccatttattgtacttgggttggcacgtgcatgtctccaaattaataagaatgaaaaatgtaagtgatttagccaaagctgtaccataatccartgatcatattgcatgcaagtaattaacaagttgcacctggtgagtaggaaggcaggcagccagaggctccagagccatcagaagggctgtcagggcacaa

SEQ ID NO: 50430 - DNA, 201 bp, Homo sapiens
agtcccagctacttgggaggctaaggcacgaggaatcgctcgaacccaggaagaggaggttgcagtgagccgagattgcaccactgcgctccagcctggcracagagcgagactccgtctcaaacaaacaaataaacaaaaaaaccctttgtgcccaccgtatgctagcgtaaaagtaatctgaatttgaaagtcaatcag

SEQ ID NO: 50431 - DNA, 201 bp, Homo sapiens
cctgtgcttctatgtgggaacatgctccactgtttccagctttgtatagaaatttctaatcatataaatctcagtattcttggacatcaaggaagtcttayatttttaagcaaccctgtctgctaccatcttcccaacaaccccaccaccatctgttttgatgcctacacagaagatataagccagtggatcctacatttt

SEQ ID NO: 50432 - DNA, 201 bp, Homo sapiens
gcatcaccatgccaaactaatttttgtatttttagtagaaacaaggtttcactatgttggccaggctgatctcgaactcctggtatcaagtgatccacccrcctcggcctcccaaaatgctaagattacaggtgtgagccaccatacccggccagcaacttttttttttttaagaatactatctatggtgactatttctag

SEQ ID NO: 50433 - DNA, 201 bp, Homo sapiens
atggaaaaaaaatccacctttgccagagcaaaggaagccagtgaaagaagtaattcattgggagtataattataagcatttagcattgttttgaacatgasaaaaaggcaagctttcatctaacagattttcataatctcaagaaataattcatctgccatttattttcagggaaatgtggtgcttcttggaagaagccca

SEQ ID NO: 50434 - DNA, 201 bp, Homo sapiens
atggactgacccaaggcccctgtgtcaggttgtgcaggtctgcactgcataactttaagggtaccatttccatccctactccccaaacttgtgccacacarcagccctggaagttacccgtctatagcatggaaaagcaagtacatgaattcatagatgttaacaagcagtgcatttgtaaagctaaaaagaaacatttta

SEQ ID NO: 50435 - DNA, 201 bp, Homo sapiens
actctgaaaactgaaacacgccaacaagttttctgttaccagtattttttttttaactctgtgcccaggccaggcgcggtggctcacgccggtaatctcakcgctttgggaggccgaggcgggcggatcgcgaggtcaggggtttgagcatcctggccaacatggtgaaaccccgtctttactaaaaatacaaaaatcagc

SEQ ID NO: 50436 - DNA, 201 bp, Homo sapiens
agatctatatttagtatgtctttaggagcatcatggttccttattcagaggatgagattgtatggaaatggcctatcccatgcagttcagcacaaggagayccagtgcagtacaggaacaatgtatgaaatgcttaaaaatgactattcattgcacattagagaatgcctatgtcacatttttacaattacagaactcttt

SEQ ID NO: 50437 - DNA, 201 bp, Homo sapiens
tctgcactgcataactttaagggtaccatttccatccctactccccaaacttgtgccacacagcagccctggaagttacccgtctatagcatggaaaagcragtacatgaattcatagatgttaacaagcagtgcatttgtaaagctaaaaagaaacattttacctggtgtcctttcagatcatcagtctctctgctcagt

SEQ ID NO: 50438 - DNA, 201 bp, Homo sapiens
gctaaaaagaaacattttacctggtgtcctttcagatcatcagtctctctgctcagtcaagcacaattcttttaatccctatcttcatccacttgtctctmtaaaattgattgggcttctcctaggatcttcatgtttgtacaaagaaagcccaagctaaattttcaaggtcaaggaaaaaacatacgcttttccctgcct

SEQ ID NO: 50439 - DNA, 201 bp, Homo sapiens
agaggtatgatagttgatacagtttggctgtgtccccacccaaatctcatcttgaattgtagctcccataattcccatgtgttgtaggagggacccggtgraaggtaattgaatcatggggacaggtctttcccatgccattctcatgatagtgagtaagtctcatgagatctgatggttttataaaggggagttctcctg

SEQ ID NO: 50440 - DNA, 201 bp, Homo sapiens
ctatcattcatagtggaccccctctatcatcacagagaaaatcattgatgaccagcactgactccaatattacccaagatctatatttagtatgtctttakgagcatcatggttccttattcagaggatgagattgtatggaaatggcctatcccatgcagttcagcacaaggagacccagtgcagtacaggaacaatgta

SEQ ID NO: 50441 - DNA, 201 bp, Homo sapiens
agtgcaggatagtcataaatgcctgtaaatactgaagaggcacgacctcataagcagccacaaaaatgcaaactagagccacaaggtatgaagtgatgacraggatgtggagccaaaggtgcctggtgcctgttccttgtatatttatatttttacaattttaatttctgcagggtctttttctttttttttaaacagagt

SEQ ID NO: 50442 - DNA, 201 bp, Homo sapiens
gagctgcaggcatgaccaacctgcgttcactctcattctaatcttaagatttcatcctttctacacacactcggtgtgaacagtctgcaaaccgtggtgasagcccattggtggggtatgaagtctgagaagaggtatacaatttttcccaccacatccagttccccccacaatagttgtagggtcctctggagcccaaat

SEQ ID NO: 50443 - DNA, 201 bp, Homo sapiens
tatgtctttaggagcatcatggttccttattcagaggatgagattgtatggaaatggcctatcccatgcagttcagcacaaggagacccagtgcagtacasgaacaatgtatgaaatgcttaaaaatgactattcattgcacattagagaatgcctatgtcacatttttacaattacagaactcttttttttttttttgga

SEQ ID NO: 50444 - DNA, 201 bp, Homo sapiens
acctcagcctcctaaactgctgggattacaggcatgagccactgtccccggcaacattacagtctatcatttttataaaaatagcagcaacctgtaaaagytcccagtggaaagctgcatggtcatacagggagggttcaccaggaaagttcctacctgcctgtctgccaagtgaccttaaaagggagcataacttggtga

SEQ ID NO: 50445 - DNA, 201 bp, Homo sapiens
tatttttagtagagacagggtttcaccatgttgcctaggctggtctgaaactcctgacctcaagtgtttctcccacctcagcctcctaaactgctgggatwacaggcatgagccactgtccccggcaacattacagtctatcatttttataaaaatagcagcaacctgtaaaagttcccagtggaaagctgcatggtcata

SEQ ID NO: 50446 - DNA, 201 bp, Homo sapiens
atttaactttaaaatagcataaaaattcttcttagtaaatcgtaactaacaagaagaaggaaatataatggtcgataattaatcaaatatccaaaatgacrgctaagggaaaaaaatccaccaccgccacctgaacgacctttcagtgaaatgagcgttgtggattttagaattcagaattctctgttcttgttcctgtga

SEQ ID NO: 50447 - DNA, 201 bp, Homo sapiens
ctaaaccaaaacagtgttttagctccaggtattaatggccacttctggagccataagcaaagctgataatatagctcctaaataaagaactggaatatggytggcaaagaatcaccttcttaatttcttaagaatgttcaactctggcacaaagtggacaaggtgagtatgggtgaatatccttctagagagatgagacta

SEQ ID NO: 50448 - DNA, 201 bp, Homo sapiens
tattattcaaccatcagaaaagaaccaactccttcctagataagagacaacagcacttgcccctacccatactaatgccacggctatttgtccatcaaagkaaatgaatggctttgtatttgaatagaaaagaggggcactctgagctctgaggtgacagataatgcactgatcagtcactctccagtgggggtatcagaa

SEQ ID NO: 50449 - DNA, 201 bp, Homo sapiens
atatggttggcaaagaatcaccttcttaatttcttaagaatgttcaactctggcacaaagtggacaaggtgagtatgggtgaatatccttctagagagatragactagaagactgaggatctacagaaggggatgcccagttattctctctccccctactctcgaaactcactcattaattcatgtatttatcaaaatggc

SEQ ID NO: 50450 - DNA, 201 bp, Homo sapiens
tagaacacaatatcccaggagcaagaaaccaacgttatcatcacattacaaacagtgtttctgttcatacaaagatcatatcagctttttacttggactarcacacttgcctccctggccctcggggaccatagcatgatctagcagtgccagtgagttaacaaaggcttaccaagttccatggtagggcacagggagagc

SEQ ID NO: 50451 - DNA, 201 bp, Homo sapiens
aaactataaaagaaaattaagtaaattattacaacaagttgtggacaatggttgtctgggacagagaaagctacgatggagaagggcacaaatggagattstgcggtgcttatgatattctatttccttcatctgggtggtggctacatgaatagcaggtttatattatttgttaaactgtatattcatgtttgtgcactt

SEQ ID NO: 50452 - DNA, 201 bp, Homo sapiens
gtctgtaagagatcagggacattgggagcagcatctatccaaccacgcagaaggacagtgggtgcccaaaccaaagggccaattaggcaacctggtcacartaggagttagactgaggagctgccactccctaattcacaggagcccagaaggctcaaacagatttaaaacacacaaaggagggcatgggagcagcagatc

SEQ ID NO: 50453 - DNA, 201 bp, Homo sapiens
tctgggacagagaaagctacgatggagaagggcacaaatggagattgtgcggtgcttatgatattctatttccttcatctgggtggtggctacatgaatarcaggtttatattatttgttaaactgtatattcatgtttgtgcactttttctgtatatatggtatatttcccacaggatgtttttcagaaaggttatatag

SEQ ID NO: 50454 - DNA, 201 bp, Homo sapiens
agttggttagccttgattccaacccctgatttcaagcattggagggctaataaacatcatatatacatgatgtttattacatatatattatatatattagrtatgtaatatatatgtattacatatatacacacacacacacatatatatatatatgtacacacacatatatatacaaagtctggctctatcacccaggct

SEQ ID NO: 50455 - DNA, 201 bp, Homo sapiens
gagcagcatctatccaaccacgcagaaggacagtgggtgcccaaaccaaagggccaattaggcaacctggtcacaataggagttagactgaggagctgccwctccctaattcacaggagcccagaaggctcaaacagatttaaaacacacaaaggagggcatgggagcagcagatcctcccagaccccttgttagtcacag

SEQ ID NO: 50456 - DNA, 201 bp, Homo sapiens
tatattatttgttaaactgtatattcatgtttgtgcactttttctgtatatatggtatatttcccacaggatgtttttcagaaaggttatatagacatatragactagatggtctggtaaaagaatgacaggtgatagacaaaaggcaaacaaaaaatataatcaggaggtaataagtgctatgaagaaaagaaaagcagg

SEQ ID NO: 50457 - DNA, 201 bp, Homo sapiens
taaaagaatgacaggtgatagacaaaaggcaaacaaaaaatataatcaggaggtaataagtgctatgaagaaaagaaaagcaggataggggaataggttgrgaagagagaactatttaacggcttgtagcaccaggatctccatagttaagcctcatggagtgccactgtgaacacagcaaaggcaatgcaaattgaatgc

SEQ ID NO: 50458 - DNA, 201 bp, Homo sapiens
cggcctcccaaaatgctaagattacaggtgtgagccaccatacccggccagcaacttttttttttttaagaatactatctatggtgactatttctagcccrccatgatagcgagtgtcttcaaagagagctgcaggcatgaccaacctgcgttcactctcattctaatcttaagatttcatcctttctacacacactcggt

SEQ ID NO: 50459 - DNA, 201 bp, Homo sapiens
gggagaggccccctcaaaacaggaactcctgccggctgacttaattacagcacagcaagggaatccactacaaaggcaggagccactgaacagagagctgytgagatccgtcctcggtacacggacagatggttctgctgcttctcggctggtataagaccttatagaagactctgaaaactgaaacacgccaacaagttt

SEQ ID NO: 50460 - DNA, 201 bp, Homo sapiens
tcatctcctctgaaaggccatgcctggccctcatttctcaaatagccaccccagccagcacccccgccagtcttgttattcctccaccttgctttatttastttttagcacatatcaccctgtaaaattatgcatttacttgcttaagcttttgttgcctttctcccccacaagtgtgtcaacccgctgagggcaggaact

SEQ ID NO: 50461 - DNA, 201 bp, Homo sapiens
cctggtgcctgttccttgtatatttatatttttacaattttaatttctgcagggtctttttctttttttttaaacagagtctcactctgtcgcccaggctrgagtgcagtggcgtgatctgatctcggctcactgcaaccttcacctcccgggttcaagcaattctcctgcctcagcctcccaagtagctgggattacagg

SEQ ID NO: 50462 - DNA, 201 bp, Homo sapiens
ccatgccattctcatgatagtgagtaagtctcatgagatctgatggttttataaaggggagttctcctgcacacaccctcttgcctgctgccatgtaagaygtacctttggtcttccttcaccttctgccatgactgtgaggcctccgcagccacctggaactgcaagtccattaaataaattacccagtcgtgggtatgt

SEQ ID NO: 50463 - DNA, 201 bp, Homo sapiens
tgagataactcagatgagatggaatggtggggactctggtgaattagagattcacgctctttctaaaagaaaggtgaaggttcatgcctgtaattccagcmctttgggatgtaaaggcagaagatcgcttgaggcaaggaatttgagaccaggccagccaatatagtgaagtgttgtctctacaataaatttaaaaattag

SEQ ID NO: 50464 - DNA, 201 bp, Homo sapiens
tcacgctctttctaaaagaaaggtgaaggttcatgcctgtaattccagcactttgggatgtaaaggcagaagatcgcttgaggcaaggaatttgagaccasgccagccaatatagtgaagtgttgtctctacaataaatttaaaaattagccaggtgtggtgatgcacacctgtagtcccaggtactcaggaggctgagat

SEQ ID NO: 50465 - DNA, 201 bp, Homo sapiens
ctcccaaagtgctacaattttaggcatgtgccacagcacttggcctactgcagtagagatatagatacgaatacttttcttaagggtactgtacagttagsctgccctggaaccattatgtctctttgagtttccttctctactctgaactttaagtgtctattttcttattttctagttcatagaagacatttcactatc

SEQ ID NO: 50466 - DNA, 201 bp, Homo sapiens
gacattgttatgcaagtagatagaatattaacctgcctggattaatgaaagcaattactaagtgctgttactataagtggaatagtttcactgtatcacaygtcctggtgattcttcatttagcccagatgatgccaggggctatttgacaaaatgtttcgtatatctaagaagacatattttgctggtttaaaccataat

SEQ ID NO: 50467 - DNA, 201 bp, Homo sapiens
gtttcaccatgttgcctaggctggtctgaaactcctgacctcaagtgtttctcccacctcagcctcctaaactgctgggattacaggcatgagccactgtscccggcaacattacagtctatcatttttataaaaatagcagcaacctgtaaaagttcccagtggaaagctgcatggtcatacagggagggttcaccagga

SEQ ID NO: 50468 - DNA, 201 bp, Homo sapiens
ctagggataatgcaaattataagtaccataggataccattatacacccatcagttgagccaaatgttaaaatctgacaatatccaatgatggtgagaatasagaattctcatacactgctggaaggtaaataaattggtatgatcgctttggaaaatacaggcaggttgaagattggcaattctacaccactgtgatcacg

SEQ ID NO: 50469 - DNA, 201 bp, Homo sapiens
ggagccttgaagatgtttttaaaaaattaagtgagcagttgaggtaaataatgaatgattttacaatcacagatcatttaactttaaaatagcataaaaattcttcttagtaaatcgtaactaacaagaagaaggaaatataatggtcgataattaatcaaatatccaaaatgacggctaagggaaaaaaatccaccaccg

SEQ ID NO: 50470 - DNA, 201 bp, Homo sapiens
aaattataagtaccataggataccattatacacccatcagttgagccaaatgttaaaatctgacaatatccaatgatggtgagaatagagaattctcatamactgctggaaggtaaataaattggtatgatcgctttggaaaatacaggcaggttgaagattggcaattctacaccactgtgatcacgctcatagaaattc

SEQ ID NO: 50471 - DNA, 201 bp, Homo sapiens
gagccttgaagatgtttttaaaaaattaagtgagcagttgaggtaaataatgaatgattttacaatcacagatcatttaactttaaaatagcataaaaattcttcttagtaaatcgtaactaacaagaagaaggaaatataatggtcgataattaatcaaatatccaaaatgacggctaagggaaaaaaatccaccaccgc

SEQ ID NO: 50472 - DNA, 201 bp, Homo sapiens
agccttgaagatgtttttaaaaaattaagtgagcagttgaggtaaataatgaatgattttacaatcacagatcatttaactttaaaatagcataaaaattcttcttagtaaatcgtaactaacaagaagaaggaaatataatggtcgataattaatcaaatatccaaaatgacggctaagggaaaaaaatccaccaccgcc

SEQ ID NO: 50473 - DNA, 201 bp, Homo sapiens
gggctaataaacatcatatatacatgatgtttattacatatatattatatatattaggtatgtaatatatatgtattacatatatacacacacacacacayatatatatatatgtacacacacatatatatacaaagtctggctctatcacccaggctggagtgcagaggcacaatcttggctcactgcaacctctgcctc

SEQ ID NO: 50474 - DNA, 201 bp, Homo sapiens
aacaataaagcatttttaatttgaaaaattagttgactgctatttttatctagatagatagaccaatagatagatagatagatagatagatagatagataggatagataggatagataggggtggttttgttttttttttttttttttttttttttttagacagagtctcactcttttgcccaggctggaagtgtggtgac

SEQ ID NO: 50475 - DNA, 201 bp, Homo sapiens
ggggcttacgatcctcattttctgggtttgggtgatgttagaggaaagtgccccagcccagcaccattcctttttgcttctggtttggagctctagaccasagccttagttctggtcagttgttaagtaattatttaacagtgtgacgttcagacctgcatgacatctatacagtgtccagtaaagaaagagaaagccatg

SEQ ID NO: 50476 - DNA, 201 bp, Homo sapiens
cacgatctcagctcactgcaacctctgcctcccaggttcaagcgattctcctgtctcagcctccccagtagctcagagtacaggcgcctgccaccacaccyggctaatttttgtatttttaatagagacggggtttcaccatgttggccaggctggtctcgaactcctgacctctagtgacccgcccaccttggcctccta

SEQ ID NO: 50477 - DNA, 201 bp, Homo sapiens
tgagctcatgatatcaccatccacctgcttccccaagcccaagctttggaagccacagtgaatgtgaggcactattggctaacatgtaacagtgaccatgygacagtaattgttaacagtgtgcaagagaaaactgtaaggctggctgctaaatatgcctgataaataactgtcaacttaacgctggtagtatgattagga

SEQ ID NO: 50478 - DNA, 201 bp, Homo sapiens
tatatatgatctaatacaaaaataaacatcagtcctatactgttagatgaagaaataggttccaagatttaagaggcagaactgagaatgcaagtcctgcrctatcatcctccacacgcctctcctttgtccctctccaccttccttccccctttattttcctttcctagaagggaaggagggtgtcagcatctcaatcaa

SEQ ID NO: 50479 - DNA, 201 bp, Homo sapiens
atctgtggtaagtgctattcaaaatgggtgtccaggccaggcgcggtggctcacgcctgtaatcccagcactttgggaggctgaggcggatggatcatttraggttaggggtttgagaccagcctggccaacatggtgaaaccccacctctactaaaaatagaaaaattagctgggcgtagtggcgggcgcctgtactccg

SEQ ID NO: 50480 - DNA, 201 bp, Homo sapiens
attttcctttcctagaagggaaggagggtgtcagcatctcaatcaaaagtcaaaactcacatgtcaacaggtaagtgacagatgatgtaaatgagggaagmacagagatagtgagataactcagatgagatggaatggtggggactctggtgaattagagattcacgctctttctaaaagaaaggtgaaggttcatgcctg

SEQ ID NO: 50481 - DNA, 201 bp, Homo sapiens
agtcgccgcatttcctctggtgtataacatgttgttgatgcagttattgtcctttgttttttttttagctctgtttccttaaatgccaaaactacacacacgaagtatgtaatacgaacactgtgacaatgaggagatgcaagtaacattttattcacctgaagaaactaaaccccaacattttgctttttgtctacagac

SEQ ID NO: 50482 - DNA, 201 bp, Homo sapiens
gtcgccgcatttcctctggtgtataacatgttgttgatgcagttattgtcctttgttttttttttagctctgtttccttaaatgccaaaactacacacacgaagtatgtaatacgaacactgtgacaatgaggagatgcaagtaacattttattcacctgaagaaactaaaccccaacattttgctttttgtctacagaca

SEQ ID NO: 50483 - DNA, 201 bp, Homo sapiens
aagaatgtacaataatgccactgaagcaatttagaacttacaatgcccatagcatagaatctattatatatagatatctaattatatctatctaaacacayacatatacagatgctcctcaactgatgatgagattatgtcctagtaaacccatcatagtttgaaaaatatcataagtcaaaaatacatttaatacgccta

SEQ ID NO: 50484 - DNA, 201 bp, Homo sapiens
tgcagtgagccgaaatcacaccactgcaatccagtctgggcaacagagcgagacactgtctcaaacaaaacaaaaacaaaaacaacaacaacaaaaaaacytaacttaaaaatactaaatattcagtgaaaactagagtcatgctaaaccaaaacagtgttttagctccaggtattaatggccacttctggagccataagc

SEQ ID NO: 50485 - DNA, 201 bp, Homo sapiens
ccaaagggccaattaggcaacctggtcacaataggagttagactgaggagctgccactccctaattcacaggagcccagaaggctcaaacagatttaaaayacacaaaggagggcatgggagcagcagatcctcccagaccccttgttagtcacaggtactcctggtctggctctcaaaagcaaggccttcccaactttgt

SEQ ID NO: 50486 - DNA, 201 bp, Homo sapiens
  misc_feature (1)...(201): n = A,T,C or G, or insertion/deletion polymorphism (see Tables 1-2)
ctggttaccttactctgacagtgatgcagccagaggcactaaagggttagcccaagggccccagccctgcatttggcccatgaaggggcttacgatcctcnttttctgggtttgggtgatgttagaggaaagtgccccagcccagcaccattcctttttgcttctggtttggagctctagaccagagccttagttctggtc

SEQ ID NO: 50487 - DNA, 201 bp, Homo sapiens
tcagatcacttcttaccctcaagtagattctctctcagtctaagccaccatcatctcttacctgaactactgcaatagcctcctaacttggctcactcttycactgtctgcaaggaataaccagagtgatcttttaaaaacatgtatgaaatcacatcactcaggcggcttaaaataaaatccagacttctcaccagggct

SEQ ID NO: 50488 - DNA, 201 bp, Homo sapiens
aaagggccaattaggcaacctggtcacaataggagttagactgaggagctgccactccctaattcacaggagcccagaaggctcaaacagatttaaaacayacaaaggagggcatgggagcagcagatcctcccagaccccttgttagtcacaggtactcctggtctggctctcaaaagcaaggccttcccaactttgtta

SEQ ID NO: 50489 - DNA, 201 bp, Homo sapiens
gtcacaggtactcctggtctggctctcaaaagcaaggccttcccaactttgttacagtcagctatgctgaagccttggctggcagaaactgacaagccccrtaacacagctttccccatctggccccaaaccatctctccaggctcacctcccctctcaccccattccatctacctccctactgcaacaacacagacactg

SEQ ID NO: 50490 - DNA, 201 bp, Homo sapiens
gtgagaatagagaattctcatacactgctggaaggtaaataaattggtatgatcgctttggaaaatacaggcaggttgaagattggcaattctacaccacygtgatcacgctcatagaaattcgcaaacatgttcaccaggctatatgtacaacaggtgcagagcagcactattcataatagcccaaacaatgaaagcaag

SEQ ID NO: 50491 - DNA, 201 bp, Homo sapiens
gggtcaatgttttgccttaattcctgacttgcatctttttaactctgacactaatttttctcttggttcacctaagacatctataatgtaactttattgtkctacatttcagatcattttctggcaatgcttctttgacatagcatacaaattttgcaacatgaagcaatatacatttcttgacttcaaaaaaatatggtt

SEQ ID NO: 50492 - DNA, 201 bp, Homo sapiens
tggaaaatacaggcaggttgaagattggcaattctacaccactgtgatcacgctcatagaaattcgcaaacatgttcaccaggctatatgtacaacaggtrcagagcagcactattcataatagcccaaacaatgaaagcaagtcaaaacccatcaactaaaaaatggataaactgtggtacaatcatacaatgggatact

SEQ ID NO: 50493 - DNA, 201 bp, Homo sapiens
ggaaaaaaagtaaacttccttaatttacattcactgactactcagattgaacatctcttcccatttactgatttacttgcaaatcctctctgactagttgstctttgtccttttttcctattgcattatgttgttttcaataaactcatcgtacctatattttaggaataataattgtttgtaagtcatccacatcgcact

SEQ ID NO: 50494 - DNA, 201 bp, Homo sapiens
ggataaactgtggtacaatcatacaatgggatactataccataacaaaatgaaataactagcactgtgtacaacaacctggagaatctcacacacacacamaaaaaaatgttaaatgaaagaaaaagcattaaataatatatgcaatattattccattcatgtaaagttcaaaaagcagacaaaaactaaattatgtgtga

SEQ ID NO: 50495 - DNA, 201 bp, Homo sapiens
aacatctcttcccatttactgatttacttgcaaatcctctctgactagttggtctttgtccttttttcctattgcattatgttgttttcaataaactcatygtacctatattttaggaataataattgtttgtaagtcatccacatcgcactatttcttccaaactgttctttttcatttctaaaaccaaataagtcagtc

SEQ ID NO: 50496 - DNA, 201 bp, Homo sapiens
ataaactgtggtacaatcatacaatgggatactataccataacaaaatgaaataactagcactgtgtacaacaacctggagaatctcacacacacacaaamaaaaatgttaaatgaaagaaaaagcattaaataatatatgcaatattattccattcatgtaaagttcaaaaagcagacaaaaactaaattatgtgtgata

SEQ ID NO: 50497 - DNA, 201 bp, Homo sapiens
gtttccttaaatgccaaaactacacacacgaagtatgtaatacgaacactgtgacaatgaggagatgcaagtaacattttattcacctgaagaaactaaamcccaacattttgctttttgtctacagacacagttcctgtaaacacagaatcaaatacggtgcgcgtagaaaataaaaagatcctcccacactatggcact

SEQ ID NO: 50498 - DNA, 201 bp, Homo sapiens
gatctggcagcattagactgtcaacaattgaagaaaagaaaataagaaaagctgtctatattttgggtgcttcatgagagaataatcttaatgatgaaatwtttttaaggcttagaaaactaatgaagccctcaaatatggtgtgagatctctttataagaatgctgcaagagtcagatgtgaagcgaaggctgttgtaat

SEQ ID NO: 50499 - DNA, 201 bp, Homo sapiens
ttcaagtacaacaaaaaaatccgggtttcccatcacagaacctaagtcgccgcatttcctctggtgtataacatgttgttgatgcagttattgtcctttgttttttttttagctctgtttccttaaatgccaaaactacacacacgaagtatgtaatacgaacactgtgacaatgaggagatgcaagtaacattttattca

SEQ ID NO: 50500 - DNA, 201 bp, Homo sapiens
gaaagtgactgtctactggaagaatctgtgcaggctccatcacaggcagctgcagctctgtatgagggcctctgggggagctgggaacctgtgcttctatrtgggaacatgctccactgtttccagctttgtatagaaatttctaatcatataaatctcagtattcttggacatcaaggaagtcttatatttttaagcaac

SEQ ID NO: 50501 - DNA, 201 bp, Homo sapiens
tcccatcacagaacctaagtcgccgcatttcctctggtgtataacatgttgttgatgcagttattgtcctttgttttttttttagctctgtttccttaaatgccaaaactacacacacgaagtatgtaatacgaacactgtgacaatgaggagatgcaagtaacattttattcacctgaagaaactaaaccccaacatttt

SEQ ID NO: 50502 - DNA, 201 bp, Homo sapiens
cggtggctcacgccggtaatctcagcgctttgggaggccgaggcgggcggatcgcgaggtcaggggtttgagcatcctggccaacatggtgaaaccccgtytttactaaaaatacaaaaatcagctgggcgtggtggcgcttgtctgtagtcccagctacttgggaggctaaggcacgaggaatcgctcgaacccaggaag

SEQ ID NO: 50503 - DNA, 201 bp, Homo sapiens
cacgaggaatcgctcgaacccaggaagaggaggttgcagtgagccgagattgcaccactgcgctccagcctggcgacagagcgagactccgtctcaaacamacaaataaacaaaaaaaccctttgtgcccaccgtatgctagcgtaaaagtaatctgaatttgaaagtcaatcagcaagtatttactgagcgacgtgtaag

SEQ ID NO: 50504 - DNA, 201 bp, Homo sapiens
tggcctgaaatcctgtttatgtgattctgtttcttgaaaaaagcagctccctaaatcaaaatgtttatcaatcaccaagcctgactgtggccacgggataycagcttgcaatatctgctgtagaccaaaggtggccaggcttgtcggcattgctcccgacactatggtgtttcacttagaaagtttaacaaccacacagtc

SEQ ID NO: 50505 - DNA, 201 bp, Homo sapiens
acttcttaccctcaagtagattctctctcagtctaagccaccatcatctcttacctgaactactgcaatagcctcctaacttggctcactcttccactgtstgcaaggaataaccagagtgatcttttaaaaacatgtatgaaatcacatcactcaggcggcttaaaataaaatccagacttctcaccagggctcagagaa

SEQ ID NO: 50506 - DNA, 201 bp, Homo sapiens
cgatcttggctcactgcaacctctacctcccaggttcaagtgattcttgtgcctcaacctcccgagtagctaggattacaggtgtgcaccaccatacccgkctaatttttgcatttttagtagagatggggtttcaccatgttggtcaggctggtctcaaactcctgacctcaggtgatccacctgactcagcctcccaaa

SEQ ID NO: 50507 - DNA, 201 bp, Homo sapiens
atgggtgaatatccttctagagagatgagactagaagactgaggatctacagaaggggatgcccagttattctctctccccctactctcgaaactcactcattaattcatgtatttatcaaaatggcatgtcaataccctgagcagccactcaggacaggactcctgcattgctacaataccgatcccccagcctctcctc

SEQ ID NO: 50508 - DNA, 201 bp, Homo sapiens
ctatcatcctccacacgcctctcctttgtccctctccaccttccttccccctttattttcctttcctagaagggaaggagggtgtcagcatctcaatcaaragtcaaaactcacatgtcaacaggtaagtgacagatgatgtaaatgagggaagaacagagatagtgagataactcagatgagatggaatggtggggactc

SEQ ID NO: 50509 - DNA, 201 bp, Homo sapiens
cagaagatcgcttgaggcaaggaatttgagaccaggccagccaatatagtgaagtgttgtctctacaataaatttaaaaattagccaggtgtggtgatgcmcacctgtagtcccaggtactcaggaggctgagatgtaaggatcacttaaacccagcaggtctaggctgcagtgagctgtgtttgtctcactgcactccag

SEQ ID NO: 50510 - DNA, 201 bp, Homo sapiens
cctcaagtagattctctctcagtctaagccaccatcatctcttacctgaactactgcaatagcctcctaacttggctcactcttccactgtctgcaaggartaaccagagtgatcttttaaaaacatgtatgaaatcacatcactcaggcggcttaaaataaaatccagacttctcaccagggctcagagaacctgcttgc

SEQ ID NO: 50511 - DNA, 201 bp, Homo sapiens
ccacacagtcccacagtgcacagcacagttccgagccgcaaaggcttgcagtacccaaaatgccatttgccattttcacaaaaacccagttcattctcatytcaagatctttttttttttttttttgagacagagtctcgctctgtcgcctaggctgcagtgcagtggcacgatctcggttcactgcaacctccgcctccc

SEQ ID NO: 50512 - DNA, 201 bp, Homo sapiens
atttgagaccaggccagccaatatagtgaagtgttgtctctacaataaatttaaaaattagccaggtgtggtgatgcacacctgtagtcccaggtactcasgaggctgagatgtaaggatcacttaaacccagcaggtctaggctgcagtgagctgtgtttgtctcactgcactccagcctaggtgacagcgcaagagacc

SEQ ID NO: 50513 - DNA, 201 bp, Homo sapiens
tagattctctctcagtctaagccaccatcatctcttacctgaactactgcaatagcctcctaacttggctcactcttccactgtctgcaaggaataaccasagtgatcttttaaaaacatgtatgaaatcacatcactcaggcggcttaaaataaaatccagacttctcaccagggctcagagaacctgcttgctgactcc

SEQ ID NO: 50514 - DNA, 201 bp, Homo sapiens
tatagtgaagtgttgtctctacaataaatttaaaaattagccaggtgtggtgatgcacacctgtagtcccaggtactcaggaggctgagatgtaaggatcmcttaaacccagcaggtctaggctgcagtgagctgtgtttgtctcactgcactccagcctaggtgacagcgcaagagaccctgtctcaaaaaaaaaaaaaa

SEQ ID NO: 50515 - DNA, 201 bp, Homo sapiens
gttgtctctacaataaatttaaaaattagccaggtgtggtgatgcacacctgtagtcccaggtactcaggaggctgagatgtaaggatcacttaaacccascaggtctaggctgcagtgagctgtgtttgtctcactgcactccagcctaggtgacagcgcaagagaccctgtctcaaaaaaaaaaaaaaaaaaaaaaaaa

SEQ ID NO: 50516 - DNA, 201 bp, Homo sapiens
tattatgacaggaaaaaaactcaagtattttggcttgaaaatataaactataaacatataggaaaaattttggtttaaaactaagcacaaattacgctggttttttttaagaaaaggaacaattatatttttcataatactaaaaatgaaataatgtaaagtgataaaaagcaattaattcctacttaggtaatatttcat

SEQ ID NO: 50517 - DNA, 201 bp, Homo sapiens
gttcagcactagaggcaatatttcagatgcttaagtggaaatacgcatatgcttcctcaaaaatcacaaatagaactgttagattagaacttgtacctttytgaatactttatgaaaagcccttaaataatatttttttccaaagtgacttcttaagaattagctcaggccgggtgcggtggctcacgcctgtgatcccaa

SEQ ID NO: 50518 - DNA, 201 bp, Homo sapiens
ccatctctccaggctcacctcccctctcaccccattccatctacctccctactgcaacaacacagacactgacaagcagcactctctccagccttccctcytctacaggctgtttcatcctcctgaatgactttgcccctcttctctccccggaaaatccctacttattcttcaaagccccctcaaatgttgcctgatcag

SEQ ID NO: 50519 - DNA, 201 bp, Homo sapiens
tcccctctcaccccattccatctacctccctactgcaacaacacagacactgacaagcagcactctctccagccttccctcttctacaggctgtttcatcytcctgaatgactttgcccctcttctctccccggaaaatccctacttattcttcaaagccccctcaaatgttgcctgatcaggagattactctgattcaag

SEQ ID NO: 50520 - DNA, 201 bp, Homo sapiens
cccgctacctaggaggctgaggcaggagaatcactggagcctcggaggcagaggctgcagtgaactgagatcgcgccactgcactgcagcctggatgacasagcaagagtctgtctcaaaaaaaaaaaaaagaattagatcacagccccaataagatttctggtaacatctaattagacaattgagttcccttgctggagc

SEQ ID NO: 50521 - DNA, 201 bp, Homo sapiens
caccatcatctcttacctgaactactgcaatagcctcctaacttggctcactcttccactgtctgcaaggaataaccagagtgatcttttaaaaacatgtrtgaaatcacatcactcaggcggcttaaaataaaatccagacttctcaccagggctcagagaacctgcttgctgactccctctccactgcccctctcacat

SEQ ID NO: 50522 - DNA, 201 bp, Homo sapiens
cagtgtggcatttgcacaagaatagaccaacaaaccaatgtaacagaatagtccaaaaatagacccatgcatatataaaaacttgatttatcacaaaacasacattggaaattagtgcaggaaagatcaactgttcagtaacctgtggtattgagatcactggctaattttattggggggtggggtggaatcatgggaaaa

SEQ ID NO: 50523 - DNA, 201 bp, Homo sapiens
gtccaaaaatagacccatgcatatataaaaacttgatttatcacaaaacacacattggaaattagtgcaggaaagatcaactgttcagtaacctgtggtaytgagatcactggctaattttattggggggtggggtggaatcatgggaaaaaatttaaattagatttctacctcacaccaaacacaaaaatcaattccagg

SEQ ID NO: 50524 - DNA, 201 bp, Homo sapiens
gccaggtgtggtgatgcacacctgtagtcccaggtactcaggaggctgagatgtaaggatcacttaaacccagcaggtctaggctgcagtgagctgtgttygtctcactgcactccagcctaggtgacagcgcaagagaccctgtctcaaaaaaaaaaaaaaaaaaaaaaaaaaaaaagccacgcatggtggctcatgcct

SEQ ID NO: 50525 - DNA, 201 bp, Homo sapiens
aagagaccatttatgtatatagagaattagtacaggcatttatttttccagggactgagataagaggaaaataaccaagggaagaatttgttcagcactakaggcaatatttcagatgcttaagtggaaatacgcatatgcttcctcaaaaatcacaaatagaactgttagattagaacttgtacctttttgaatacttta

SEQ ID NO: 50526 - DNA, 201 bp, Homo sapiens
aacctgtggtattgagatcactggctaattttattggggggtggggtggaatcatgggaaaaaatttaaattagatttctacctcacaccaaacacaaaamtcaattccagggagaattaaagatttaaatataaaagtcaaaccagaagatattcagaagacaatataggtgcatgtttttatgacttcatggaaaggat

SEQ ID NO: 50527 - DNA, 201 bp, Homo sapiens
caaaccagaagatattcagaagacaatataggtgcatgtttttatgacttcatggaaaggatttcttaagaatagaaaaatacaacctagaaacacaaaasagtgataaatcaactaaattaaaattataaacttctcttcttcaaaggataccacagaaagagtaaaaagacaacccatggactaggaaaagatatttcc

SEQ ID NO: 50528 - DNA, 201 bp, Homo sapiens
ctctgacactaatttttctcttggttcacctaagacatctataatgtaactttattgttctacatttcagatcattttctggcaatgcttctttgacatakcatacaaattttgcaacatgaagcaatatacatttcttgacttcaaaaaaatatggtttccccataatgtatatgaaaacatatcaaaggtgggttacat

SEQ ID NO: 50529 - DNA, 201 bp, Homo sapiens
ctagcccgccatgatagcgagtgtcttcaaagagagctgcaggcatgaccaacctgcgttcactctcattctaatcttaagatttcatcctttctacacamactcggtgtgaacagtctgcaaaccgtggtgacagcccattggtggggtatgaagtctgagaagaggtatacaatttttcccaccacatccagttccccc

SEQ ID NO: 50530 - DNA, 201 bp, Homo sapiens
gtctcaaactcctgagctcaagtgatccacctgccttggcttcccaaagtgttgggattacaggctgagccactgcgcctagccaacacactgcttacttytaagagttcctgctttgattcagttttagcctctgagcatccttaccaagtagtcaactcattcattccatttaagggctagttttttattgcactcagc

SEQ ID NO: 50531 - DNA, 201 bp, Homo sapiens
caggatgtttttcagaaaggttatatagacatatgagactagatggtctggtaaaagaatgacaggtgatagacaaaaggcaaacaaaaaatataatcagraggtaataagtgctatgaagaaaagaaaagcaggataggggaataggttgagaagagagaactatttaacggcttgtagcaccaggatctccatagttaa

SEQ ID NO: 50532 - DNA, 201 bp, Homo sapiens
attacaggctgagccactgcgcctagccaacacactgcttacttctaagagttcctgctttgattcagttttagcctctgagcatccttaccaagtagtcractcattcattccatttaagggctagttttttattgcactcagcatttttaattgttgctagcaggaaggttagtcagatgtcttagaccacaggaccac

SEQ ID NO: 50533 - DNA, 201 bp, Homo sapiens
attcagttttagcctctgagcatccttaccaagtagtcaactcattcattccatttaagggctagttttttattgcactcagcatttttaattgttgctakcaggaaggttagtcagatgtcttagaccacaggaccactgtattgccagaatctaaagtcaaaaatccgctttaaaacataaagctaattatgtcactct

SEQ ID NO: 50534 - DNA, 201 bp, Homo sapiens
attaagaggtatgatagttgatacagtttggctgtgtccccacccaaatctcatcttgaattgtagctcccataattcccatgtgttgtaggagggacccrgtggaaggtaattgaatcatggggacaggtctttcccatgccattctcatgatagtgagtaagtctcatgagatctgatggttttataaaggggagttct

SEQ ID NO: 50535 - DNA, 201 bp, Homo sapiens
ctgaggcaggagaagggcatgaacccgagaggcggagcttgcagtgagccgagattgcccagtgcactccagcctgggcgacagagcgagactccatctcaaaaaaaaaaaaaaattttgtcactgtatattatcatatttaaaatttttgtaaattaatgggaaaaaaagtaaacttccttaatttacattcactgacta

SEQ ID NO: 50536 - DNA, 201 bp, Homo sapiens
caagaacatacagcaaaattaatgctatcattcatagtggaccccctctatcatcacagagaaaatcattgatgaccagcactgactccaatattacccargatctatatttagtatgtctttaggagcatcatggttccttattcagaggatgagattgtatggaaatggcctatcccatgcagttcagcacaaggagac

SEQ ID NO: 50537 - DNA, 201 bp, Homo sapiens
ttattagcagcatgagaacgaacgaatacgatagtattacaagtaggtgctctgccttcatgaatgggattagtgcccttacaaaaaaggcttgagggagsctgtttgttccctttcaccatgtgaggatgccataagaaggcaccatctgtgaagcagacagcaagctcccaccagacactgaatctgctgatgccttga

SEQ ID NO: 50538 - DNA, 201 bp, Homo sapiens
ctggttatagaagaatggaccagaagcaaacacctggtccctggtgggccaatcaatttctctctccctgacagctagaattgaaatttgaaaataccagyctcagccaggtgcattggctcacgcctgtaatcccaacactttgggaagctgaggcaggaggatcacttgaggccaggagttcaagactagcctcagcat

SEQ ID NO: 50539 - DNA, 201 bp, Homo sapiens
ccatagttccctttaactctttaacttcatctgctcaaaacacttttttaaaacatctcaaatctcttctcccatgatctctatctgagctcatgatatcrccatccacctgcttccccaagcccaagctttggaagccacagtgaatgtgaggcactattggctaacatgtaacagtgaccatgtgacagtaattgttaa

SEQ ID NO: 50540 - DNA, 201 bp, Homo sapiens
aaaataccagcctcagccaggtgcattggctcacgcctgtaatcccaacactttgggaagctgaggcaggaggatcacttgaggccaggagttcaagactrgcctcagcatcatggcaagaaaattagctgagcatggtggcatgcacctgtagccctaggtacttgggaggctaagacgggaggatcacttgagcccagg

SEQ ID NO: 50541 - DNA, 201 bp, Homo sapiens
ggtgaaagcccatctctactaaaaatataaaattagccaggcatggtggcatgcacctgtaatcccagctactcaggaggctgaggcaggagaatggcttraacctgggagatggaggttgcaatgaactgagaccacaccactgcactccagcctgggtgacacagtgagactccgtctcataaaaaaaaaaaataaagg

SEQ ID NO: 50542 - DNA, 201 bp, Homo sapiens
cccacagtgcacagcacagttccgagccgcaaaggcttgcagtacccaaaatgccatttgccattttcacaaaaacccagttcattctcatctcaagatctttttttttttttttttgagacagagtctcgctctgtcgcctaggctgcagtgcagtggcacgatctcggttcactgcaacctccgcctcccgggttcaag

SEQ ID NO: 50543 - DNA, 201 bp, Homo sapiens
gggagggagggagggagggaggaaaggaggaagggagaaagagaagcagaaggagaagaagaaataagaaagcttccacgctggtttccatgagccactckgtaatcctcctcatcactgctctctggccacacttcgtgggctctgtcactgcgtgcccttcctctgtctgctctgaggcctggcactccctaggtctcc

SEQ ID NO: 50544 - DNA, 201 bp, Homo sapiens
tcttgaccctgttcaagaggcataagggaaacttcccagaggagaaagaaaatggaggttaaacttgaaccagcaggaacagagagaaaagaggagagcasagaaacagccaatgaatcctaattaacaaatcaaatgggcaggagaatattcaagtctagtatggaaagagctcaacattcaagggtctgatcaaccatt

SEQ ID NO: 50545 - DNA, 201 bp, Homo sapiens
attttcacaaaaacccagttcattctcatctcaagatctttttttttttttttttgagacagagtctcgctctgtcgcctaggctgcagtgcagtggcacratctcggttcactgcaacctccgcctcccgggttcaagcaattctcctgcctcagcctcctgagtagctgggattacaagcgcctgccaccacacccagc

SEQ ID NO: 50546 - DNA, 201 bp, Homo sapiens
tataggcttacaactggactttaaaatatgattttatttaaatgtcacggagcagcctggcgtggtgactcacacctgtaatcccagcactttgggaggcygaggcgggcagatcacctgaggtcaggagttcgagaccagcctggccaacatgacgaaaccccgtctctactaaaaatacaaaaattagccgggaatggt

SEQ ID NO: 50547 - DNA, 201 bp, Homo sapiens
aactctgacactaatttttctcttggttcacctaagacatctataatgtaactttattgttctacatttcagatcattttctggcaatgcttctttgacawagcatacaaattttgcaacatgaagcaatatacatttcttgacttcaaaaaaatatggtttccccataatgtatatgaaaacatatcaaaggtgggttac

SEQ ID NO: 50548 - DNA, 201 bp, Homo sapiens
agagaataatcttaatgatgaaatttttttaaggcttagaaaactaatgaagccctcaaatatggtgtgagatctctttataagaatgctgcaagagtcakatgtgaagcgaaggctgttgtaatatgccttttttatagaaaaacaatcatgctataaataacaataaagcatttttaatttgaaaaattagttgactgc

SEQ ID NO: 50549 - DNA, 201 bp, Homo sapiens
aggatctccatagttaagcctcatggagtgccactgtgaacacagcaaaggcaatgcaaattgaatgcacaatgaagtttcaaattgtgctgcatgcaagrtttcataaagtccacaagagatggctccaacaacatcaaaagtccctgacagataaagatctggcagcattagactgtcaacaattgaagaaaagaaaat

SEQ ID NO: 50550 - DNA, 201 bp, Homo sapiens
aatgcaaattgaatgcacaatgaagtttcaaattgtgctgcatgcaaggtttcataaagtccacaagagatggctccaacaacatcaaaagtccctgacarataaagatctggcagcattagactgtcaacaattgaagaaaagaaaataagaaaagctgtctatattttgggtgcttcatgagagaataatcttaatgat

SEQ ID NO: 50551 - DNA, 201 bp, Homo sapiens
ctataatcccaggactgtgggaggctgaggtgggaagatcggttgagcccagagtttgagaccagcctgggaaacatagtgacaccttgtgtttacagaatttttttttttttttttttttttgagatggaatctcgctctgtcgcccaggctggagtatagttgcgccatctcagctcactgcaacctccacctcctggg

SEQ ID NO: 50552 - DNA, 201 bp, Homo sapiens
gggaagatcggttgagcccagagtttgagaccagcctgggaaacatagtgacaccttgtgtttacagaatttttttttttttttttttttttgagatggartctcgctctgtcgcccaggctggagtatagttgcgccatctcagctcactgcaacctccacctcctgggttcaagcaattgtcctgccacagcctccaca

SEQ ID NO: 50553 - DNA, 201 bp, Homo sapiens
taaaaagaaacattttacctggtgtcctttcagatcatcagtctctctgctcagtcaagcacaattcttttaatccctatcttcatccacttgtctctctmaaattgattgggcttctcctaggatcttcatgtttgtacaaagaaagcccaagctaaattttcaaggtcaaggaaaaaacatacgcttttccctgcctag

SEQ ID NO: 50554 - DNA, 201 bp, Homo sapiens
tgccattctcatgatagtgagtaagtctcatgagatctgatggttttataaaggggagttctcctgcacacaccctcttgcctgctgccatgtaagatgtrcctttggtcttccttcaccttctgccatgactgtgaggcctccgcagccacctggaactgcaagtccattaaataaattacccagtcgtgggtatgtctt

SEQ ID NO: 50555 - DNA, 201 bp, Homo sapiens
gactgcagggcatcaggggctctcaaagccaagagtgaagaatcagaggggtctgtaagagatcagggacattgggagcagcatctatccaaccacgcagaaggacagtgggtgcccaaaccaaagggccaattaggcaacctggtcacaataggagttagactgaggagctgccactccctaattcacaggagcccagaa

SEQ ID NO: 50556 - DNA, 201 bp, Homo sapiens
tggaatcatgggaaaaaatttaaattagatttctacctcacaccaaacacaaaaatcaattccagggagaattaaagatttaaatataaaagtcaaaccakaagatattcagaagacaatataggtgcatgtttttatgacttcatggaaaggatttcttaagaatagaaaaatacaacctagaaacacaaaagagtgata

SEQ ID NO: 50557 - DNA, 201 bp, Homo sapiens
tgatatattatgacaggaaaaaaactcaagtattttggcttgaaaatataaactataaacatataggaaaaattttggtttaaaactaagcacaaattacrctggttttttttaagaaaaggaacaattatatttttcataatactaaaaatgaaataatgtaaagtgataaaaagcaattaattcctacttaggtaatat

SEQ ID NO: 50558 - DNA, 201 bp, Homo sapiens
gcactccagcctgggcgacagagcgagactccgtatcaaaaaacaaacaaaacaacaacaacaacaacaaacaagatgttgtattcttgacatttaggcawtttctaaaatattacattttttataaaatttctctgccatggaaaaaaaatccacctttgccagagcaaaggaagccagtgaaagaagtaattcattggg

SEQ ID NO: 50559 - DNA, 201 bp, Homo sapiens
tcggctggtataagaccttatagaagactctgaaaactgaaacacgccaacaagttttctgttaccagtattttttttttaactctgtgcccaggccaggmgcggtggctcacgccggtaatctcagcgctttgggaggccgaggcgggcggatcgcgaggtcaggggtttgagcatcctggccaacatggtgaaaccccg

SEQ ID NO: 50560 - DNA, 201 bp, Homo sapiens
cttatagaagactctgaaaactgaaacacgccaacaagttttctgttaccagtattttttttttaactctgtgcccaggccaggcgcggtggctcacgcckgtaatctcagcgctttgggaggccgaggcgggcggatcgcgaggtcaggggtttgagcatcctggccaacatggtgaaaccccgtctttactaaaaatac

SEQ ID NO: 50561 - DNA, 201 bp, Homo sapiens
cggggaaggggaggggaggggaatggaggggaggagggggagaggagaggagaggaggactcattcacctctagccctctgatgccacacagaaatgtggrcccaaggctctgtgaaatcttccagttttttgagactggcctgaaatcctgtttatgtgattctgtttcttgaaaaaagcagctccctaaatcaaaatgt

SEQ ID NO: 50562 - DNA, 201 bp, Homo sapiens
tcattttctggcaatgcttctttgacatagcatacaaattttgcaacatgaagcaatatacatttcttgacttcaaaaaaatatggtttccccataatgtrtatgaaaacatatcaaaggtgggttacattattaaattctgtaacttgtatattaataacttatgaagtctatgaattattatgtaccaatgatgcaaga

SEQ ID NO: 50563 - DNA, 201 bp, Homo sapiens
cgcccaccttggcctcctaaagtgctgggattacaggcctgagccatcacgccaggctgtcaataaacttttatgttgacatacttcaatagagtttcagwcaatccctcttttccctccctaatttttcctatttgaaaagaatccgctctctcctgttttgttcagcaaaatgtaaaacattgataagatttatacctt

SEQ ID NO: 50564 - DNA, 201 bp, Homo sapiens
tttaggagcatcatggttccttattcagaggatgagattgtatggaaatggcctatcccatgcagttcagcacaaggagacccagtgcagtacaggaacamtgtatgaaatgcttaaaaatgactattcattgcacattagagaatgcctatgtcacatttttacaattacagaactcttttttttttttttggagacaga

SEQ ID NO: 50565 - DNA, 201 bp, Homo sapiens
gagatggaggttgcaatgaactgagaccacaccactgcactccagcctgggtgacacagtgagactccgtctcataaaaaaaaaaaataaaggaggggagmggggaaggggaggggaggggaatggaggggaggagggggagaggagaggagaggaggactcattcacctctagccctctgatgccacacagaaatgtggg

SEQ ID NO: 50566 - DNA, 201 bp, Homo sapiens
actaatttttctcttggttcacctaagacatctataatgtaactttattgttctacatttcagatcattttctggcaatgcttctttgacatagcatacamattttgcaacatgaagcaatatacatttcttgacttcaaaaaaatatggtttccccataatgtatatgaaaacatatcaaaggtgggttacattattaaa

SEQ ID NO: 50567 - DNA, 201 bp, Homo sapiens
cagccttttccattaaaactttaacttttatgtgattatgaggttatttatacctaaagagaccatttatgtatatagagaattagtacaggcatttattyttccagggactgagataagaggaaaataaccaagggaagaatttgttcagcactagaggcaatatttcagatgcttaagtggaaatacgcatatgcttcc

SEQ ID NO: 50568 - DNA, 201 bp, Homo sapiens
ctgctcagaattcaggactcacaccaagtaatggtgagtgctacatgccagactaaggagcttgactgtcaagaggaggttgctgacaaaagtgggagttkaagtggtgtttaaagaactgatctaacagtggtgggtaagaggcactgggaagaaaaccagagcagtgattcttaaccaagagcacgtatcagaatcatc

SEQ ID NO: 50569 - DNA, 201 bp, Homo sapiens
agccttttccattaaaactttaacttttatgtgattatgaggttatttatacctaaagagaccatttatgtatatagagaattagtacaggcatttatttytccagggactgagataagaggaaaataaccaagggaagaatttgttcagcactagaggcaatatttcagatgcttaagtggaaatacgcatatgcttcct

SEQ ID NO: 50570 - DNA, 201 bp, Homo sapiens
gaactgagatcgcgccactgcactgcagcctggatgacagagcaagagtctgtctcaaaaaaaaaaaaaagaattagatcacagccccaataagatttctrgtaacatctaattagacaattgagttcccttgctggagcttgtctgctttgcttataaaaacatgtgcaaagtctaagacaaccacaactagaccctcaa

SEQ ID NO: 50571 - DNA, 201 bp, Homo sapiens
ggaattaatatacatgcaaattttctgcatgcaaactctaccttcctggtcactttgaaggatataaattaatcaaaatcacaaaattcttcaatcttatrtaagaatgtacaataatgccactgaagcaatttagaacttacaatgcccatagcatagaatctattatatatagatatctaattatatctatctaaacac

SEQ ID NO: 50572 - DNA, 201 bp, Homo sapiens
agccgagattgcaccactgcgctccagcctggcgacagagcgagactccgtctcaaacaaacaaataaacaaaaaaaccctttgtgcccaccgtatgctakcgtaaaagtaatctgaatttgaaagtcaatcagcaagtatttactgagcgacgtgtaagggataaggaaaaggtctaaagcagcttatctagtttaggga

SEQ ID NO: 50573 - DNA, 201 bp, Homo sapiens; identical to SEQ ID NO: 26723

SEQ ID NO: 50574 - DNA, 201 bp, Homo sapiens; identical to SEQ ID NO: 26799

SEQ ID NO: 50575 - DNA, 201 bp, Homo sapiens; identical to SEQ ID NO: 26272

SEQ ID NO: 50576 - DNA, 201 bp, Homo sapiens; identical to SEQ ID NO: 26018

SEQ ID NO: 50577 - DNA, 201 bp, Homo sapiens; identical to SEQ ID NO: 26274

SEQ ID NO: 50578 - DNA, 201 bp, Homo sapiens; identical to SEQ ID NO: 23622

SEQ ID NO: 50579 - DNA, 201 bp, Homo sapiens; identical to SEQ ID NO: 23669

SEQ ID NO: 50580 - DNA, 201 bp, Homo sapiens; identical to SEQ ID NO: 23900

SEQ ID NO: 50581 - DNA, 201 bp, Homo sapiens; identical to SEQ ID NO: 23879

SEQ ID NO: 50582 - DNA, 201 bp, Homo sapiens
taatgtttgcctacagaccttggtatatctaaagaggactcctcaaagataagaccacaaaagtgaggaacaattcaacaaggcaaccacacatgaccctstgtaaagcattcctgaagctgaagggaaaacaaacttcaaaaatcatgacattgctgaatgaaagcagaaagtctttaaaatgcgagtttttcattaaaa

SEQ ID NO: 50583 - DNA, 201 bp, Homo sapiens
agattctgaggcatcactaactctctagatagtgggatactttcctttctgagcaaacaatgagaaaggctgcttcctctccaccctccctatccccgacyctgggcatcgcactcctctacctagacatcactataaaaagacagccaacaataaagatgggtctggacagtaggaatgcatgtgtggcggtatgatctc

SEQ ID NO: 50584 - DNA, 201 bp, Homo sapiens
cttattaaacttcatacagaaaagaggttacaaagataaagagattctgaggcatcactaactctctagatagtgggatactttcctttctgagcaaacartgagaaaggctgcttcctctccaccctccctatccccgactctgggcatcgcactcctctacctagacatcactataaaaagacagccaacaataaagat

SEQ ID NO: 50585 - DNA, 201 bp, Homo sapiens
ctctgccaagaggaagatggacacacctccaatgccctgtatcagagagaaaagggacagctggacagttccagccatcagtgccaacaggaggaacagaragggagggtggggacaagaggaaagtttaaccccttgtggaggaggctggaggatccagagaagaaaggcggaactggctggggcccaggggctggaggg

SEQ ID NO: 50586 - DNA, 201 bp, Homo sapiens
ctgagataaactggtaatgcagaggctgcactctgagattgataacttgtagaagcaggtagggctgagctcccaggtgtccttccatccatgctcctgcytccaggtggacttgtgcctgggcctcactcagcccctacagagagaagcctcccagatgagtggccttccaggaatataaatatgcattcacctagtgca

SEQ ID NO: 50587 - DNA, 201 bp, Homo sapiens
tcacgcctgtaatcccagcactttgggaggctgaagagggcggatcacctgaggtcaggagttcgagaccagcctgacgaacacggtgaaatcccgtctcyactaaaaatacaaaaattagccaggcatggtggtgcacgcctataatcccagctactcaggaggctgaggcaggagaatcgcttgaacctgggagatgga

SEQ ID NO: 50588 - DNA, 201 bp, Homo sapiens
gggctgggtgtggtgactcacgcctgtaatcccagcactttgggaggctgaagagggcggatcacctgaggtcaggagttcgagaccagcctgacgaacayggtgaaatcccgtctctactaaaaatacaaaaattagccaggcatggtggtgcacgcctataatcccagctactcaggaggctgaggcaggagaatcgct

SEQ ID NO: 50589 - DNA, 201 bp, Homo sapiens
ccctctgccaagaggaagatggacacacctccaatgccctgtatcagagagaaaagggacagctggacagttccagccatcagtgccaacaggaggaacaragagggagggtggggacaagaggaaagtttaaccccttgtggaggaggctggaggatccagagaagaaaggcggaactggctggggcccaggggctggag

SEQ ID NO: 50590 - DNA, 201 bp, Homo sapiens
tcatattttcaacttaaagttcatagaggatcttactgcatcctccatgaacaatgtcacacacattctcatcgccacctggcagtgtgccatgccccagrccaccatcgcctgctgatgccaagcagcatgggaagctggcactaagaacaagctggtggagctggagatagccctgcagaaggccaagcaggacatggc

SEQ ID NO: 50591 - DNA, 201 bp, Homo sapiens
gcttgaacctgggagatggaggttgcagtgagcagaaatcgtgccagtgcactccaacctgggcgacagagtgaaactccatctcaaaaaaaaaaaaaaaagaaagaaagaaaaggacctcagaacatcattttctccattctggctaagtctcaaactacccaaggtggacagaaatcaatcttagttttaaagatgatg

SEQ ID NO: 50592 - DNA, 201 bp, Homo sapiens
gacgaacacggtgaaatcccgtctctactaaaaatacaaaaattagccaggcatggtggtgcacgcctataatcccagctactcaggaggctgaggcaggrgaatcgcttgaacctgggagatggaggttgcagtgagcagaaatcgtgccagtgcactccaacctgggcgacagagtgaaactccatctcaaaaaaaaaa

SEQ ID NO: 50593 - DNA, 201 bp, Homo sapiens
caacttcctgagcactttctataaggcggtgagagtgcccggtgccccctccaacaggggggctgggggctgggtcttagagcctcagctgggcacagagyctgtgggctccttccctggtcttctctctgctccttatcccacctgcgtattgcagggcagatgccacttcccctaccacaggagaaaatgaggttccat

SEQ ID NO: 50594 - DNA, 201 bp, Homo sapiens
gggcggatcacctgaggtcaggagttcgagaccagcctgacgaacacggtgaaatcccgtctctactaaaaatacaaaaattagccaggcatggtggtgcrcgcctataatcccagctactcaggaggctgaggcaggagaatcgcttgaacctgggagatggaggttgcagtgagcagaaatcgtgccagtgcactccaa

SEQ ID NO: 50595 - DNA, 201 bp, Homo sapiens
actgagttagatgatcctgaaaatggaccattaacaaattaattgtgggttcactgtttccagaccatcttatctggatgtcatttaatctccacaaattmatttgaggccagtattatgatcagccttgctgagatctgggatgctatttaaatgtgattggcagatacaagactcgaatttgtcagttgggtgcccttt

SEQ ID NO: 50596 - DNA, 201 bp, Homo sapiens
atgtcatttaatctccacaaattcatttgaggccagtattatgatcagccttgctgagatctgggatgctatttaaatgtgattggcagatacaagactcraatttgtcagttgggtgccctttctgctatttccagctgatttccatttcccatcctatccccgaggagcagggaggagccaaattgggaaacgcaactg

SEQ ID NO: 50597 - DNA, 201 bp, Homo sapiens
ctaccgtgcaagaccctcaatgccagggtctgttccagggggcagatcacagcctcccaaaacatgcccccacacacacatgcatacacatgctcacacaygcacatgcatgcacacacatacatgcactcgcatgcacatacgaacgcacatgcacacttgcacacacacacacggacacacatgcacatgcacactctg

SEQ ID NO: 50598 - DNA, 201 bp, Homo sapiens
cctttcagcctacacaggccactccatccctaccgtgcaagaccctcaatgccagggtctgttccagggggcagatcacagcctcccaaaacatgcccccmcacacacatgcatacacatgctcacacacgcacatgcatgcacacacatacatgcactcgcatgcacatacgaacgcacatgcacacttgcacacacaca

SEQ ID NO: 50599 - DNA, 201 bp, Homo sapiens
gggctgaggctgagttctggtactaaaccaaagtgagacatcaaggtcaagttcattaaacaagcacaaaaaaccgagatttcaaaggcaaacaagataaragccatgtcctctcagatgtcccagtctgatagggtcaagggatctgagttcagcttggggctcaccctatgttacctgggggaagcatgtcaggacctg

SEQ ID NO: 50600 - DNA, 201 bp, Homo sapiens
tctcctccctcctagtacaaggagctacagcactctgctagcctgcacgggatgacctccacaccaccaagatggagatctctgagataaactggtaatgmagaggctgcactctgagattgataacttgtagaagcaggtagggctgagctcccaggtgtccttccatccatgctcctgcttccaggtggacttgtgcct

SEQ ID NO: 50601 - DNA, 201 bp, Homo sapiens
agggagggtggggacaagaggaaagtttaaccccttgtggaggaggctggaggatccagagaagaaaggcggaactggctggggcccaggggctggagggyaaagtcttaatctaagtcacagactgggattttccagatgagagcaaacattctgccctgggagtcgttgggatgataatttgcaatgccgaggaaaaca

SEQ ID NO: 50602 - DNA, 201 bp, Homo sapiens
gatgctatttaaatgtgattggcagatacaagactcgaatttgtcagttgggtgccctttctgctatttccagctgatttccatttcccatcctatccccraggagcagggaggagccaaattgggaaacgcaactggaaagtagccaagttttctggcttcttctgactcagttttctttcacaagatattttccttatt

SEQ ID NO: 50603 - DNA, 201 bp, Homo sapiens
gagagcaaacattctgccctgggagtcgttgggatgataatttgcaatgccgaggaaaacacgaacaaaggaaaagtgattggcacctacctgatgctgartttgggagggtgagatgcatggtgtcgagggaaagggaagaaagaccaggtataggaagaagggaaagagcacagccacagctgtccagctgtagggtga

SEQ ID NO: 50604 - DNA, 201 bp, Homo sapiens
atgctgtctacatgaacaaagtggggctggaggccaaagtggatgccctgatggaggagaccaacttcctgagcactttctataaggcggtgagagtgccyggtgccccctccaacaggggggctgggggctgggtcttagagcctcagctgggcacagagcctgtgggctccttccctggtcttctctctgctccttatc

SEQ ID NO: 50605 - DNA, 201 bp, Homo sapiens
cagctgatttccatttcccatcctatccccgaggagcagggaggagccaaattgggaaacgcaactggaaagtagccaagttttctggcttcttctgactyagttttctttcacaagatattttccttatttggtgtgaagggctgtattttctcagaacatgagacatctgtgatactgacaggtcacaacatggtgtgc

SEQ ID NO: 50606 - DNA, 201 bp, Homo sapiens
cagcccctacagagagaagcctcccagatgagtggccttccaggaatataaatatgcattcacctagtgcaatggttaatattgtcaacttgattggattraagaatgcgagaaaggcactttcttctggaagagtaaatggcaaaactttggcttgctttacttactcgcaatccagaaaagttcagcattgaaaaggac

SEQ ID NO: 50607 - DNA, 201 bp, Homo sapiens
acatgagacatctgtgatactgacaggtcacaacatggtgtgctcctgtgacaacagagtggcttctggagaatgctggctggagttacatgtgctgctgytccctccacgcagatgagctgatgacaaagaacagctataaactcaatgacctccctaatgttcttcccagccctttcagcctacacaggccactccatc

SEQ ID NO: 50608 - DNA, 201 bp, Homo sapiens
tgtgtatcaggccgcactcagttcccaaggttcaaccctggaggctgatctcctttctcacctccttagtccaggctgcaggagagatttctgccttgagygcagaacttaatcagtggctcactgtctatcctgagttatggctgtggtacagcccagctctaggcactgtggcaggccctgcactatgaggaactgtca

SEQ ID NO: 50609 - DNA, 201 bp, Homo sapiens
taagtctctttgtaggtctctaaggacttgctttatgaatctgggtgctcctgtattgggtgcatatatatttagaatagttagctcttcttgttgaattkatctgtttaccattgtgtagtggccttctttgtctcttttgatctttgttggtttaaagtctgttttatcagagactgggattgcaacccctgctttttt

SEQ ID NO: 50610 - DNA, 201 bp, Homo sapiens
accattgtgtagtggccttctttgtctcttttgatctttgttggtttaaagtctgttttatcagagactgggattgcaacccctgcttttttttgctttcyatttgcttggtagatcttcctccatccctttattttgagcctatatgcgtctttgcacatgagatgggtctcctgaatacagcaccgatgggtcttgact

SEQ ID NO: 50611 - DNA, 201 bp, Homo sapiens
tttcaaccttggtgaatctgacaattatgtgtcttggggttgctcttctggaggagtacctttgtggtgttctctgtatttcctgaatttgaatattggcytgccttgctaggttagggaagttctcctagatcctaccctgaagagtgttttctaacttggttccattctccccatcactttccagtacaccaatcaaat

SEQ ID NO: 50612 - DNA, 201 bp, Homo sapiens
aatcagctattgaagcttgtgcatgcatcacaaagttctcatgccatggttttcagctccatcaggtcatttaagctcctctctatgttgtttattctagytggccattcgtctaaccttttttcaaggtttttagcttccttgtgatgggttagaacatgctcttttagctctgagaagtttgttattaccaaccttctg

SEQ ID NO: 50613 - DNA, 201 bp, Homo sapiens
tattctttcagtcagtgaatatttattgattgcctactatgtgctagattattctgttctttctgttttactttaaaagactcaaaggactctggtaggtrtagcaaccactagttaattcagatgaaggagtttttttgtttgtttgttttgtttgcttgttttttcctgttttaacatagagatctttttcattgttgt

SEQ ID NO: 50614 - DNA, 201 bp, Homo sapiens
gatgcccctcccttcatccagctgcagcatcgcaggtcgatctcagactgctgtgctagcagtgagcaaggctccgtgggcgtgggacccaccaagccagkcatgggagggtgtctcctggtgtgccagttgctaggactgtgtatagctcagtatttggtcagaagtgcaccatttctccaggtacagtctgtcacggct

SEQ ID NO: 50615 - DNA, 201 bp, Homo sapiens
attgaaacaaattttaaacatgtcaacgtattcattttgggttttatatctagttatgccaacacataaaacctttggtgcagctcattctttatcttgtyatacagctgaatcttcctggttggtggattgtttccttgagggttttgcttgcaatgttagattgtgagctcattcttggctgcccttcacctgtgggaa

SEQ ID NO: 50616 - DNA, 201 bp, Homo sapiens
gataccatggactttggggacttgggggaaagggtgggagtgggtgagggataaaagactacacattgggtacagtgtacactgctcacgtgatgggtgcrcaaaatctcagacatcactactgaagaactcattcatgtaaccaaacaccacttgttccccaaaaacctattgaaataaacaaagatccctcataagtgg

SEQ ID NO: 50617 - DNA, 201 bp, Homo sapiens
tcaaaatttcatgactatgtcttctagttattgaaacaaattttaaacatgtcaacgtattcattttgggttttatatctagttatgccaacacataaaayctttggtgcagctcattctttatcttgttatacagctgaatcttcctggttggtggattgtttccttgagggttttgcttgcaatgttagattgtgagct

SEQ ID NO: 50618 - DNA, 201 bp, Homo sapiens
ggagtagggaaagccttcaccagacactgagtctgctggcacctcgatcgtagacttcccagcctccagaattgtgagtaataaagttctattatttatamattacccatgctaaggccttttgatatagcagcaggaacaggcgaaggcagcactcgacataggatgcacgagggagatagagcgtgattgcgtctgctg

SEQ ID NO: 50619 - DNA, 201 bp, Homo sapiens
aaatgtagagccttttctgtttgattagggaactggctgaggtgcccagcttggggggacatcggatgactggaggccacatgtaaaattggcaatccacyggtcccccaccaatgtacagtgggtactggcactggtagatactggagcagacagtagccttgtttacgggaacctgggtaagtttctggacaaaactgc

SEQ ID NO: 50620 - DNA, 201 bp, Homo sapiens
agcttcatccatgtccctgcgaaggacatgaattcatccttttttatggttgcatagtattccatggtgtatatgtgccaccttctcttaatccagtctaycgttgatggacatttgggttggttccaagtctttgctattgtgaatagtgccacaataaacatacgtgtgtgtgtatcattattgtagaatgatttataa

SEQ ID NO: 50621 - DNA, 201 bp, Homo sapiens
ctgttcttttcaattcatgaattgttgcttcagatgtgtctaatgtacgattacttcatactttgggttttaagattaggtaatacacgtaccaagatgcraaaatcaaagtgatggaaaatatatacagtgaataatccttctctggctctttccccatttgctccagtccaactgacctccataggtgccactgttgtt

SEQ ID NO: 50622 - DNA, 201 bp, Homo sapiens
attcttgcctcctccgaaagaaagaattcaactgacgggcataaggcagaaggagagaccaatgcaagtttcagagcaggagtggaagtttatttaaaagscttcagaaaaggaaagaaaggaaaacatgcttggaagaaacccaagcaggcatgtgaaggtcaagtgcagtgtttagccctgatcctaggactttctagg

SEQ ID NO: 50623 - DNA, 201 bp, Homo sapiens
tcccattctccccattgaggactgcccgaaaaactatctcacttaaacatacgtaatgcaaaaggattgcagaggagaaatccagtcccattcagtttttkttttgttttgttttgttttgtttttaaagaaaaagaagttgattagcatagtaacagatcatcaggcaatgatctctggaaagacatgccctacaaaata

SEQ ID NO: 50624 - DNA, 201 bp, Homo sapiens
ttcccacagtgctgggattataggcctgacctactgtgcctggctagaaaatcaatttaatcttttaaaaaacaaataaacacacacacacacacacacamacacacacacacacacaaacacaaacacattcctacaaagataactctaggcctaaaccgtgggtttcatccaaatatttaggggcaatataacattaat

SEQ ID NO: 50625 - DNA, 201 bp, Homo sapiens
ccaagatgcgaaaatcaaagtgatggaaaatatatacagtgaataatccttctctggctctttccccatttgctccagtccaactgacctccataggtgcyactgttgttttttttttttcctaatttatttggtggcctctcagagttttatcatgcaaataaaagcaagtgcagacataaatagttttttattctcctc

SEQ ID NO: 50626 - DNA, 201 bp, Homo sapiens
acagtcattagacacttgccaaaaaatgtgcagagggaatgctggggaaacaaaggagaagggtcatgtggagaaggccacgaggcccagcccctctcccrcacatctggaggcttctggagctctgccagactcctggagttcagatgcagcaccagcccaggctttggagacaggggataggagatgagagtggtggcc

SEQ ID NO: 50627 - DNA, 201 bp, Homo sapiens
agcttttctattctggtttctccccatctttgcggttttatctatgtttggtctttgatgttggtgacctatagatggggttttggtgtggatgtcctttytgttgatgttgatgctattcctttctgtttgttagttttccttctaacgtcagacccctcagttgcaggtctgttggagtttgctggaggtccactccag

SEQ ID NO: 50628 - DNA, 201 bp, Homo sapiens
gtctgtcagcccctactgggaggtgtttcccagtcaggctacacaggggtcagggacctgcttgaggaggcagtctgtctgttcttggagctcaaacgccrtgctgagagaaccactgctctcttcagagctgtcagacagggacgtttaagtctgcagaagctgtctgctgccttttgttctactatgccctgcccccag

SEQ ID NO: 50629 - DNA, 201 bp, Homo sapiens
ctcaagcctcagcaatggcagatgcccctcccttcatccagctgcagcatcgcaggtcgatctcagactgctgtgctagcagtgagcaaggctccgtgggygtgggacccaccaagccaggcatgggagggtgtctcctggtgtgccagttgctaggactgtgtatagctcagtatttggtcagaagtgcaccatttctcc

SEQ ID NO: 50630 - DNA, 201 bp, Homo sapiens
cctcagttgcaaatgcagaaatcacctgtcttctgtgttgatcttgctggaagctgcagactggaggtcttcctattcggccatcttcgaagtgacctccracccttttatgtttgaatgctttctgtcaataaatgagggaaatgccattttaaatttatgagcagctttttcttttccttttggtttggggtagagtta

SEQ ID NO: 50631 - DNA, 201 bp, Homo sapiens
tgagcagctttttcttttccttttggtttggggtagagttacaaggcaatttatctttggggtaaatatagagcttttgttaaaaaacaaaaacattagcytttggagatgcaggagtgcaggccagatctttgtgaccctgggctggagcctccgtttccacatctgaaaacaggggcattaatatccacctgcccagca

SEQ ID NO: 50632 - DNA, 201 bp, Homo sapiens
tttccttttggtttggggtagagttacaaggcaatttatctttggggtaaatatagagcttttgttaaaaaacaaaaacattagcctttggagatgcaggrgtgcaggccagatctttgtgaccctgggctggagcctccgtttccacatctgaaaacaggggcattaatatccacctgcccagcaaatcagagggttact

SEQ ID NO: 50633 - DNA, 201 bp, Homo sapiens
tcttaccagcaaagcataagtggcctcatttccctcagtcttacctatgacatttttttgtttagttaatttttgcttttaatgatttatgtgtaaactctgtttcattctttttcaaaatttcatgactatgtcttctagttattgaaacaaattttaaacatgtcaacgtattcattttgggttttatatctagttatg

SEQ ID NO: 50634 - DNA, 201 bp, Homo sapiens
gggtgtcttattttgtaatttgctcatttaaagcaataatatcaaatgcagtcagattaacagccatttgttgaatccttacaatgtaccaggtgctctgytaaacactttccatacatttcaccctaaccacagaccaagaaactaggtctatgatttccctattttccatatggagaaactgaggctcagagggtttaa

SEQ ID NO: 50635 - DNA, 201 bp, Homo sapiens
tgtcttattttgtaatttgctcatttaaagcaataatatcaaatgcagtcagattaacagccatttgttgaatccttacaatgtaccaggtgctctgctawacactttccatacatttcaccctaaccacagaccaagaaactaggtctatgatttccctattttccatatggagaaactgaggctcagagggtttaagaa

SEQ ID NO: 50636 - DNA, 201 bp, Homo sapiens
aaatcactggaaactcttatcagtggagaaggtatcaacttaaatctgcctaacaaaccttatcctattttcttttcttttctttttttttttttttttttgagatagggtctcactttgtttacctaagctggagtgcagtggcatgatctaggctcactgcaacttccacccactgggttcaagcaagtctcctgcctc

SEQ ID NO: 50637 - DNA, 201 bp, Homo sapiens
ctcttaccagcaaagcataagtggcctcatttccctcagtcttacctatgacatttttttgtttagttaatttttgcttttaatgatttatgtgtaaactctgtttcattctttttcaaaatttcatgactatgtcttctagttattgaaacaaattttaaacatgtcaacgtattcattttgggttttatatctagttat

SEQ ID NO: 50638 - DNA, 201 bp, Homo sapiens
ttttggcaagttacgtttttctaaatccttcacactgtctaaaatttcacacttgtgggcatgaagttgtttacaatgttctttctcttaaaaacaaaatmtttctgagttagtagtgatgccctattttgataaaagatttttttaaaaatggctttaggctgggcatggtggctcacgcctgtaatcccagcactttgg

SEQ ID NO: 50639 - DNA, 201 bp, Homo sapiens
gaagattggcactctgttggtgtaattgggtagattttattcaggtttattgggtagctttattcaggttttctgttttgtttgttttctggtatcagttktggcaagttacgtttttctaaatccttcacactgtctaaaatttcacacttgtgggcatgaagttgtttacaatgttctttctcttaaaaacaaaatctt

SEQ ID NO: 50640 - DNA, 201 bp, Homo sapiens
gctggtggggggtctggacagtaacacttgagggtgactctgccgctggggggtccctgaagcctcaccttattcttcaaaagggacacaggaatgtgggraattctgtaggacaaatgtcttggttttcttgacttaaaaaaaaaaagatgttggggaggggaagagagggagagagagaaactgtttagatgaggggtt

SEQ ID NO: 50641 - DNA, 201 bp, Homo sapiens
gcgcccattagaaaagtgctttcagtgagtctctctggtagcacatgctctcagtttctgtttgtctgagctgtctatttcatccctgttcttgaattatsatttgagctggttgaccctttgaagttattgcttgttgactcccctcggtgcttctaagttattatgtcacagtttctggcttccactgttgctactgtt

SEQ ID NO: 50642 - DNA, 201 bp, Homo sapiens
acatttcataaagtgatagctgccatagatagtgatccgtctgactgacctggacaaagtaagttgaaaaccttctgggaaggattcaccattagagatgycattaagaacattcatgactcatggaaggagataaaaatgtcaacattaacaggattttttttggctgcccagtgcatataaaagttatatttatgctat

SEQ ID NO: 50643 - DNA, 201 bp, Homo sapiens
aggccgaggcaggtggatcacttaagtccaggagttttgagatcagcctgggcaacatggagaaaacctgttgctacaaaaaaaaaaaaataaaaaaaaawtaactgggtgtggtggtgcatgcctgtggtctctgttacttgggaggctgaggtgggagaatctcttgagaccgggaggtggaggttgcagtgagccatg

SEQ ID NO: 50644 - DNA, 201 bp, Homo sapiens
gatggtactaggaggtggagcctttgggaagtaataggctatgagggtggtaatcaggtcataatcccttatgaatggtgtcagtgcccttattagagagrctccagaggactggaatgaaatgaggagacagccgtctgcagctcagaggagggcccttgccagagcccagcaagctggcaccctaatctcagacttctg

SEQ ID NO: 50645 - DNA, 201 bp, Homo sapiens
gagaaataaaaaagcaaaaaagtcagatagaaagtaggatgtatttctgtaaagttacactgagcgagccttcctctcctgcctccccttccacctcctcyatctcttctgcctctgtcacccgagacagcaagatcaaccccctccctttcttcagcgtactaaacgtgaacatcaagaggatgaagacatttatgatga

SEQ ID NO: 50646 - DNA, 201 bp, Homo sapiens
gtgggtctgttacttctctgtgagagcaatgcccttagattatacagtttaaaaatttggtgtgggttttgtgaatgttttgacagtctgcctaccatttsgtctggccagccagccatgctgagccatggctggggttttttgatggattgctagtggccaagggcttgtgaaaacataaatgtctcactgagcgcaaac

SEQ ID NO: 50647 - DNA, 201 bp, Homo sapiens
tccatttatttatttatttatttttgaggtagagtcttgttatgtcgcccaggctggggtgcagtggtgccatcatagctcactgcatgttccatggcgtmcctcttcaaactcctcgcctcaaaggattctcctatctcgacttcccacagtgctgggattataggcctgacctactgtgcctggctagaaaatcaattt

SEQ ID NO: 50648 - DNA, 201 bp, Homo sapiens
tcccccacaaaatgtataaaacaaaactgtcaggcctctgagcccaagcctgcacatatacatccagatggcctgaagcaagtgaagaatcacagaagaartgaaaatggccggttcctgccttaactgatgacactaccttgtgaaattccttttcctggctcagaagctcctccactgggcaccttatgtcccctgccc

SEQ ID NO: 50649 - DNA, 201 bp, Homo sapiens
atcggccgtttggctccccgtttatatactgtgtatgtctctcccatgctagaatacattctgggggtggacattttacatgacctggcattacaaaccayggctggggaattcagactctgagtgcatgtggtgaagccggtgccatgtggacatatgcatcaacagcctcaggtcctgccacaaccccgatgggttact

SEQ ID NO: 50650 - DNA, 201 bp, Homo sapiens
ttttgagctgattattattatttatttatttttgagacagagtctcactctgttgcccatgctggagtgcagtggtgcgatctccgctcactgcaagctcygcctcccaggttcacatcattctcctgcctcagcctcctgagtagctgggactacaggcacctgccaccatggctggctaattttttttttttttttgta

SEQ ID NO: 50651 - DNA, 201 bp, Homo sapiens
atcatgccactgcacttttttttgggggggggagggggaaaaggtctcactctgttgcccagactaagtgagaatctctatggttctcatgttttgttttktttttaattgcatttagtgcaataccataaatcttgaataacaccaggggacccatatgaagtgccactagagatgctggaggtgttaccaagtattaga

SEQ ID NO: 50652 - DNA, 201 bp, Homo sapiens
cctcccacatgagggatctccttttgggttctgcatccccaagctgctgttctcaccccatacatagggcaccacatacatgaagtgatcactgctgtggyggcccgtggggaagcagaaggctgtcagcaagactgaggggtccatgctgtaaagaaggggaaggtgcctttcccataaagggctcacccatgggacaaa

SEQ ID NO: 50653 - DNA, 201 bp, Homo sapiens
agtgaggagcacctcttcccggccgccatcccatctagggagtgaggagcatctctgcccggctgcccattgtctgagatgtggggagcgcctctgccccrctgccccatctgggatgtaaggagcgcctctgcccggccgtgaccccgtctgggaggtgaggagcgtctctgcccggcctccccgtctgagaagtgagga

SEQ ID NO: 50654 - DNA, 201 bp, Homo sapiens
tgggcatggtggctcatacctgtaatctcagcactttgggagaccgaggaggaaggatggcttgagcttaggaatttgagaccagccatggcaacatagtragatctcatctccactaaaaataaaataacattacatatgttagtaaggagaaaagtcagcatcaggatttactccaggaagggataaattaactctact

SEQ ID NO: 50655 - DNA, 201 bp, Homo sapiens
ggattacaccattaaagatgtcatcattgctacagaaaaagctgtgaaagccatcaagcctgaatcaataaattcctgctggagaaaactgtgtccagatrttgtgcatgacttcgtaggatttatgacagagccaatcaaagaactcaaaacagagattgtggttatggcaaaaaggtcgggggatggtggtgaagggtt

SEQ ID NO: 50656 - DNA, 201 bp, Homo sapiens
gttcagggaacaagagagataaccttaaactctgagcactggtgagccagatggaacagagccatatttctcttctttcaaaagcaaatgggagaaatatygctgaattctttttctcagcaaggaacatccctgagaaagagaatgcgtccctgggggtaggcctctaaaatggccgcttcggggggcagccgtctttta

SEQ ID NO: 50657 - DNA, 201 bp, Homo sapiens; identical to SEQ ID NO: 28631

SEQ ID NO: 50658 - DNA, 201 bp, Homo sapiens
cctgtctcctgataagatgttatcaatgacaacatgtgcccgaaacttcattagcgattttaattttgccccggtcctgtggtcctgtgatcttgccctgyctccatttgccttgtgatattctattaccttgtggagcacgtgatctctgtgactcacaccctattcatacactccctccctttttgaaaatcactaata

SEQ ID NO: 50659 - DNA, 201 bp, Homo sapiens
tgaaggtcaagtgcagtgtttagccctgatcctaggactttctaggctggcccctttcccatgattcttcccttagggtgggctgcccacatgcacagtgycctccttacacttggaggtgagcatgtacagtgtggttaggaagttgtatgcacacccatctgaagctttcttctgtcttctggtggagtgccccctgaa

SEQ ID NO: 50660 - DNA, 201 bp, Homo sapiens
ttttgctcttgttgcccaggctggagtgcaatggtgcaatctcagctcaccacaacctccacctcccaggttcaagtgattctcctgcctcagcctcctgrgtagctgagattacaggcgtgctccatgcctggctaattttgtatttttagtagagatagagtttctccatgttggtcaggctggtcttgaactcccgac

SEQ ID NO: 50661 - DNA, 201 bp, Homo sapiens
ggtgggctgcccacatgcacagtgtcctccttacacttggaggtgagcatgtacagtgtggttaggaagttgtatgcacacccatctgaagctttcttctstcttctggtggagtgccccctgaaggtaatactccaccattttgtctcttgatgcacatgcccaggctcattagtccaatacctgagattttgttggaag

SEQ ID NO: 50662 - DNA, 201 bp, Homo sapiens
ctgaagctgggtgatggaattgggggaaggggcctctatactcttttgtcttcctttgtttatgtttaaaaatctgtataataaagtcacagccagcctcrgtggcttactcctttaatcccagaactttgggaggccgaggtgggtggatcacctgaggtcaggagttcgagatcagcctggccaacatggtgaaacccc

SEQ ID NO: 50663 - DNA, 201 bp, Homo sapiens
ccacatggtctcagatgctgcttctggatgctctggtcccatgcaaggcccagggaagaaaagcctgttgctcactgcttgcccttgtacttaaggagacrggaggcctcttccctctcagctcacaggctcacattagccccccacagtatctgttgggagacaattcccttggatcttttgtgtcgtgtcacagctttt

SEQ ID NO: 50664 - DNA, 201 bp, Homo sapiens
gaaaaagaaaaagaaaaagaaaatctgtataataaagtctttaaaaaggagagacaagaaagaactccccgccagttgtggtggctcacacctataatccyagcactttgggaggcgaagacaggcagatcacctgaggtcaggagttcaagaccagcctgaccgacatggtgaaaccccgtctctactaaaaaaaaaaaa

SEQ ID NO: 50665 - DNA, 201 bp, Homo sapiens
ttgggagacaattcccttggatcttttgtgtcgtgtcacagcttttgttccagactatcttttcaaggatttttgtacagcaaacagattggacatggccytggaagataaagatcttgtctccagggtagaggtcagatttgtttgctgtcccccagggtggggatggggcagtgtaggggaaatggctgcactttagtc

SEQ ID NO: 50666 - DNA, 201 bp, Homo sapiens
atcttgtctccagggtagaggtcagatttgtttgctgtcccccagggtggggatggggcagtgtaggggaaatggctgcactttagtcaggagtaggctgyggtggccttccagtgcagcatgactcaatgggtttggagtgcaagcgcacaactccacacattatgtaaccatgctgcataaggtgcattaggtgaccac

SEQ ID NO: 50667 - DNA, 201 bp, Homo sapiens
caaggcagcagatagtatctcttgttctgtctctgagttggaagagctggcctccatcatgactcatccctccatcagtcagcagttgcaagtgagcaggwggtgagcaacagggcaaggtgaccacaccctgactgagtggctatgggcagccatatagactgtgtggaacaatgctggtgaaatacctaaaactgtgag

SEQ ID NO: 50668 - DNA, 201 bp, Homo sapiens
gggaactggctgaggtgcccagcttggggggacatcggatgactggaggccacatgtaaaattggcaatccactggtcccccaccaatgtacagtgggtaytggcactggtagatactggagcagacagtagccttgtttacgggaacctgggtaagtttctggacaaaactgcatacactgatgattatggaggctggtc

SEQ ID NO: 50669 - DNA, 201 bp, Homo sapiens
gatgaccagtgatgatgagcatttttacatgtctgttggctgcataaatgtcttattttgagaagtgtctgttcatatccttttcccactttttgatgggttttttttttcttgtaaatttgtttaagttctttgtagattctgggtattagccctttgtcagatgggtagactgtaaaaattttctcccattctgtaggt

SEQ ID NO: 50670 - DNA, 201 bp, Homo sapiens
aattgcagctgtgctctttgaggaggtctgggagcaggcaggatctgccctcctgggtgtggctgtgaccgccctcccaggtgcaggagctggtgtctctrcagcctgcaccctcagtggccttaggaaggacactcctccatccctccaagctcagaggtgtcttttcccactgcctggcttctcttcactcatggtgcc

SEQ ID NO: 50671 - DNA, 201 bp, Homo sapiens
gaggaggaactcctgttgtgggcttacccaatggtctgtcagaagatagatcatgaacagccgatggggccccaagggcgggctcagggacccccccaccrtaatgcaacacacttcatatattccctgtaccccaactgagttgcagaaattaggcaagcagtgccaccagcatccaggggaactcctgactgcctggat

SEQ ID NO: 50672 - DNA, 201 bp, Homo sapiens
ggccctaatagtcataagtagcatagctgggatcctagtagtgagctgttgctctctgtattgttgttgtgggttgtggattcagaaatctgccctatggscatgtatccccacctggaagatgcccttggtctaggaggtggagtgtaagggaaatggctgtgctttagtcaggagtaggccgaggtggccttctggcac

SEQ ID NO: 50673 - DNA, 201 bp, Homo sapiens
cttattagtttgatatggtcctggaaacgcccacccctgccctggctgccttccttctccgcaacccaaggtacctggctcccctactaaccctcacccasatggtctcagatgctgcttctggatgctctggtcccatgcaaggcccagggaagaaaagcctgttgctcactgcttgcccttgtacttaaggagacagga

SEQ ID NO: 50674 - DNA, 201 bp, Homo sapiens
aggggccatgaatggcagtgggaggcaaattgatttttgggtggaaggaggcaggtccccagtaaggccacaccttcaggccagggaaggtctgaaggctrgggaccgggctgccagtcctgcagattggcagactggtggggggacttgtggtgcctcttctgggcctcccatggccacccagggaccaactggcatgta

SEQ ID NO: 50675 - DNA, 201 bp, Homo sapiens
gccctaatagtcataagtagcatagctgggatcctagtagtgagctgttgctctctgtattgttgttgtgggttgtggattcagaaatctgccctatgggsatgtatccccacctggaagatgcccttggtctaggaggtggagtgtaagggaaatggctgtgctttagtcaggagtaggccgaggtggccttctggcaca

SEQ ID NO: 50676 - DNA, 201 bp, Homo sapiens
gaaggtcaagtgcagtgtttagccctgatcctaggactttctaggctggcccctttcccatgattcttcccttagggtgggctgcccacatgcacagtgtyctccttacacttggaggtgagcatgtacagtgtggttaggaagttgtatgcacacccatctgaagctttcttctgtcttctggtggagtgccccctgaag

SEQ ID NO: 50677 - DNA, 201 bp, Homo sapiens
ctggaaactcttatcagtggagaaggtatcaacttaaatctgcctaacaaaccttatcctattttcttttcttttctttttttttttttttttttgagatrgggtctcactttgtttacctaagctggagtgcagtggcatgatctaggctcactgcaacttccacccactgggttcaagcaagtctcctgcctcagctgg

SEQ ID NO: 50678 - DNA, 201 bp, Homo sapiens
tggagctcttagcagaagcccccgtttttttttttgagatggagtcttgccctatcacccaggctggagtgcagtggcatgatctcagctcactgcaactstcgccttttgggtccaagcgattcgcatgcctcagcctctcaagcaactgggattacaggcattcaccaccacacccagctaatttttgtatttctagta

SEQ ID NO: 50679 - DNA, 201 bp, Homo sapiens
ccatgcttttttggttactgtagccttgtagtatagtttgaagtcaggtagcgtgatgcctccagctttgttctttttgcttaggattgacttggtgatgygggctcttttttggttccatatgaactttaaagtagtttttttccagttctgtgaagaaaggcaatggtagcttgacggggatagcattgaatctataaa

SEQ ID NO: 50680 - DNA, 201 bp, Homo sapiens
ggcagggaatccatacaggtctgtagcaacctcaattcttgcctcctccgaaagaaagaattcaactgacgggcataaggcagaaggagagaccaatgcamgtttcagagcaggagtggaagtttatttaaaaggcttcagaaaaggaaagaaaggaaaacatgcttggaagaaacccaagcaggcatgtgaaggtcaagt

SEQ ID NO: 50681 - DNA, 201 bp, Homo sapiens
cagtgtacactgctcacgtgatgggtgcacaaaatctcagacatcactactgaagaactcattcatgtaaccaaacaccacttgttccccaaaaacctatygaaataaacaaagatccctcataagtggatatcattattcttttaattttacagagaaggaaactgaggcacttaaaggtaaagtaacttggatcaactc

SEQ ID NO: 50682 - DNA, 201 bp, Homo sapiens
attgagcagtgatttatagttctccttgaagaggtccttcacatcccttgtaagttggattcctaggtattttattctctttgaagcaattgtgaatgggrgttcactcatgatttggctctctgtttgtctgttattggtgtataggaatgcttgtgatttttgcatattgattttgtatcctgagactttgcagaagtt

SEQ ID NO: 50683 - DNA, 201 bp, Homo sapiens
gacagagcaagaatctgtcttgaaaaaaaaaaagagagagagagagaaggtacaaattagcaatatcagaaatgaaaaaggagacattactacagcacctrcaaacattaaaaaggtcataaggagatattatgaacaattttatgccaataaatttgacaatttagataaaacagtacatttccttaaaacaatagctta

SEQ ID NO: 50684 - DNA, 201 bp, Homo sapiens
aattttacagagaaggaaactgaggcacttaaaggtaaagtaacttggatcaactcacctggatggttagtgttggcaccagggcttgaacctgtgccacmtgatttcagagttttgtggaactgtggaattggtggagccctcaggttcccactgttatgggtcaaaggtatctgagtcacctggcagggaatccataca

SEQ ID NO: 50685 - DNA, 201 bp, Homo sapiens
gaatgtgaaatgacctagtgggctgtaggcatcatggccatcttcaccttttgctcttaccctggtggtgagggctcagtctgtggtcacctggccctcaycctgctgtaactctgcttagggctctgctttcaggcctttgtgatgggagcgtgtttgtgcaccctatagtcatgaacagcatctcctctgtcacctgca

SEQ ID NO: 50686 - DNA, 201 bp, Homo sapiens
tattttattctctttgaagcaattgtgaatgggggttcactcatgatttggctctctgtttgtctgttattggtgtataggaatgcttgtgatttttgcayattgattttgtatcctgagactttgcagaagttgcttatcagcttaaggagattttgggctgagacgatggggttttctaaatataaaatcatgtcatct

SEQ ID NO: 50687 - DNA, 201 bp, Homo sapiens
tcttgccccatgcgtgtctgtctacctgtaacaccaccagctggagttccctggggccttttctcctgctaggatcagggaagtaatgagggaccctgggrcagaggaggaagccctaagggtaggagtctctgtggatggtcaccagggtaggggtcctctgtcaccaatggccaagagaaatggaggaggggttgtcag

SEQ ID NO: 50688 - DNA, 201 bp, Homo sapiens
ttttcttttccttttggtttggggtagagttacaaggcaatttatctttggggtaaatatagagcttttgttaaaaaacaaaaacattagcctttggagaygcaggagtgcaggccagatctttgtgaccctgggctggagcctccgtttccacatctgaaaacaggggcattaatatccacctgcccagcaaatcagagg

SEQ ID NO: 50689 - DNA, 201 bp, Homo sapiens
ttgtcagctaagtcagaggctgcccctcaatggcctctcccttattagtttgatatggtcctggaaacgcccacccctgccctggctgccttccttctccrcaacccaaggtacctggctcccctactaaccctcacccacatggtctcagatgctgcttctggatgctctggtcccatgcaaggcccagggaagaaaagc

SEQ ID NO: 50690 - DNA, 201 bp, Homo sapiens
ctttctgtcaataaatgagggaaatgccattttaaatttatgagcagctttttcttttccttttggtttggggtagagttacaaggcaatttatctttggrgtaaatatagagcttttgttaaaaaacaaaaacattagcctttggagatgcaggagtgcaggccagatctttgtgaccctgggctggagcctccgtttcc

SEQ ID NO: 50691 - DNA, 201 bp, Homo sapiens
gtccttgccaaaaatcatatcctgcaggcctgtggagccttaaacgtggagcggctgtacagccccgctgggctcagctgctcggagttataaaaagaacygcagtgcatgtggtgggccggtgactaacgtggccacttggggagtcgtcatcagctgttgggtgaggtgatgtgtatcaggccgcactcagttcccaag

SEQ ID NO: 50692 - DNA, 201 bp, Homo sapiens
agaaaaaaggaaaaagtgaaaataattgtcccattataaaataagtacccttgggaggtagtgagcttcccatcactggggagatgcagacagctgctggygcctgagcactgggtagaggagtcggcaggggcggagtatgtgcactgggggagaagtggggcagatcagaccagtgcatgctgagattctactttttgg

SEQ ID NO: 50693 - DNA, 201 bp, Homo sapiens
acatgagggatctccttttgggttctgcatccccaagctgctgttctcaccccatacatagggcaccacatacatgaagtgatcactgctgtggcggcccrtggggaagcagaaggctgtcagcaagactgaggggtccatgctgtaaagaaggggaaggtgcctttcccataaagggctcacccatgggacaaaaggggg

SEQ ID NO: 50694 - DNA, 201 bp, Homo sapiens
agttagctcttcttgttgaattgatctgtttaccattgtgtagtggccttctttgtctcttttgatctttgttggtttaaagtctgttttatcagagactrggattgcaacccctgcttttttttgctttccatttgcttggtagatcttcctccatccctttattttgagcctatatgcgtctttgcacatgagatgggt

SEQ ID NO: 50695 - DNA, 201 bp, Homo sapiens
taaatcactggaaactcttatcagtggagaaggtatcaacttaaatctgcctaacaaaccttatcctattttcttttcttttctttttttttttttttttttgagatagggtctcactttgtttacctaagctggagtgcagtggcatgatctaggctcactgcaacttccacccactgggttcaagcaagtctcctgcct

SEQ ID NO: 50696 - DNA, 201 bp, Homo sapiens
cagcaagactgaggggtccatgctgtaaagaaggggaaggtgcctttcccataaagggctcacccatgggacaaaagggggcccaatgagtgacatgctcrtagatgtggatacatttgattttggccagggttgactgagagaaaattgataagcagctcaatgaagtacccttaactttgtggagacacttgtgtctac

SEQ ID NO: 50697 - DNA, 201 bp, Homo sapiens
ctccgcctcccaggttcacatcattctcctgcctcagcctcctgagtagctgggactacaggcacctgccaccatggctggctaattttttttttttttttgtatttttagtagagacggggtttcaccatattagccaggatggcctcgatctcctgacctcgtgatctgcttgtctcagcctcccaaagtgctgggatt

SEQ ID NO: 50698 - DNA, 201 bp, Homo sapiens
tctggcataagaatgattttgagctgattattattatttatttatttttgagacagagtctcactctgttgcccatgctggagtgcagtggtgcgatctcygctcactgcaagctccgcctcccaggttcacatcattctcctgcctcagcctcctgagtagctgggactacaggcacctgccaccatggctggctaattt

SEQ ID NO: 50699 - DNA, 201 bp, Homo sapiens
acccgaggagttcttcccttttactggtggaatgctcctggaaggtcaactccgccatttcgtgtcttaatgcacgtgcttgagcccactcgcccagctcytgagatcttataggaaactgatgatcaccagttttaggtgttttctatctacaggcagaatgccttttcctggtgctggttgagacctattactatttta

SEQ ID NO: 50700 - DNA, 201 bp, Homo sapiens
gtttggcctaaaggtttctcagtaagtaatgaactgtaacctaactggatgtgtaaacagactataacctactcttttattttattttatttttttgacasagagtctcactgtgtcacctaggctggagtgcaatggcacaatcttggctcactgcaacctccacctcccaggttcaagtgattcttgtgcctcggcctc

SEQ ID NO: 50701 - DNA, 201 bp, Homo sapiens
gcttccagtttttgtccattcagtatgatattggctgtgggtttgtcataaatagctcttattattttgagatatgttccatcaatacatagtttattgagagtttttagcatgaagagctgttgaattttgtcgaaggccttttctgcatctattgagataatcatgtggttttgtcgttggttctgtttatgtgatgga

SEQ ID NO: 50702 - DNA, 201 bp, Homo sapiens
gctcttattattttgagatatgttccatcaatacatagtttattgagagtttttagcatgaagagctgttgaattttgtcgaaggccttttctgcatctaktgagataatcatgtggttttgtcgttggttctgtttatgtgatggattatgtttattgatttgcatatgttgaaccagccttgcatcccagggatgaagc

SEQ ID NO: 50703 - DNA, 201 bp, Homo sapiens
ctgttgaattttgtcgaaggccttttctgcatctattgagataatcatgtggttttgtcgttggttctgtttatgtgatggattatgtttattgatttgcrtatgttgaaccagccttgcatcccagggatgaagccaacttgatcgtaatggataagctttttgatgtgctgctggattcggtttgccaggattttattg

SEQ ID NO: 50704 - DNA, 201 bp, Homo sapiens
cattttttattgcatctatttgattcttctctcttttcttctttattagtcttgctagtggtctatctattttgttggtcttttaaaaaaaccacctcctrgattcattgatttttttgaaggttttttttgtatgtctatctgcttcagttctgctctgatcttagttatttcttgccttccactagcatttgaatgtgt

SEQ ID NO: 50705 - DNA, 201 bp, Homo sapiens
gttgacttatgtccaaggtacagatgtggaacagaagagagagtactgaatgatgttctggtgggagagcaggatggttctgtgtctgggagtgcttcacrgaggaagtggctactgaaaaaggattcaaaggaagactcagcttgccaggcggatgcatggggaaaaggcatcctaggctgaggaaacagcctgtgcaaa

SEQ ID NO: 50706 - DNA, 201 bp, Homo sapiens
tgcatctatttgattcttctctcttttcttctttattagtcttgctagtggtctatctattttgttggtcttttaaaaaaaccacctcctggattcattgmtttttttgaaggttttttttgtatgtctatctgcttcagttctgctctgatcttagttatttcttgccttccactagcatttgaatgtgtttgctcttgt

SEQ ID NO: 50707 - DNA, 201 bp, Homo sapiens
aaatataaagacttgttataaacctacgataactaagtcagtgtggtattagcataaatatagaaaaataggccaatggggctgaataaggtccagaaacmaatacccacatatggtcaccagaatggtgacatgcaagtcactgaaatgcaatgaaagaatgttcttttcaataaatggtagatgaaatttggataccca

SEQ ID NO: 50708 - DNA, 201 bp, Homo sapiens
aaatggagagcagaattagaggggctggctgtgctttccatgggtccagatatatagtgggtgctcagtaagggtctgtgccctcctccatggccagatgyggtcggggggtgggggcgggaagtaaaggcaactccctgttctaaaggaacacatggatgacaacttccaacttaggatgacttgaagctgggcttgtga

SEQ ID NO: 50709 - DNA, 201 bp, Homo sapiens
ttcttctctcttttcttctttattagtcttgctagtggtctatctattttgttggtcttttaaaaaaaccacctcctggattcattgatttttttgaaggttttttttgtatgtctatctgcttcagttctgctctgatcttagttatttcttgccttccactagcatttgaatgtgtttgctcttgtttctctagttctt

SEQ ID NO: 50710 - DNA, 201 bp, Homo sapiens
aacaaactcccttggggcttcttttataagggcacccatcccattccttagggtagagctttcatgacctaattatctctaaatgccccatttcctaataycatattgggaattaggtttcaacatatagattcaggggctgggggacacaaacattcaagaccacagcattgtctttttggttgtagccatcttagtggg

SEQ ID NO: 50711 - DNA, 201 bp, Homo sapiens
gtttgctcttgtttctctagttcttttaattgtgatgtcagggtgtcgattttagaccttttctgctttctcttgtgggcatttagtgctataaatttccstctacacactgctttaaatgtgtcccagagattctggcacattgtgtctttgttctcattggtttcaaagaacatctttatttctgccttcatttcgtta

SEQ ID NO: 50712 - DNA, 201 bp, Homo sapiens
tcttgttgtgtccttacatgtgagaaggggcaaacaaactcccttggggcttcttttataagggcacccatcccattccttagggtagagctttcatgacytaattatctctaaatgccccatttcctaataccatattgggaattaggtttcaacatatagattcaggggctgggggacacaaacattcaagaccacagc

SEQ ID NO: 50713 - DNA, 201 bp, Homo sapiens
tttgctgcagaatgtcacccatggtatctaagaggatgttaggattggaagaaaagctgctaagtggtatccaagaggatgttaggattggaagaaaagcyggtaagaagcgtgccctggacgaatctctctgagtccttccattataccataggggcacggggaaatgggggagatcactgcttcctgccttactctctg

SEQ ID NO: 50714 - DNA, 201 bp, Homo sapiens
cagggtgtcgattttagaccttttctgctttctcttgtgggcatttagtgctataaatttccctctacacactgctttaaatgtgtcccagagattctggyacattgtgtctttgttctcattggtttcaaagaacatctttatttctgccttcatttcgttatttatgcagtagtcattcaggagcaggttgttcagttt

SEQ ID NO: 50715 - DNA, 201 bp, Homo sapiens
ttgtttgtttggcttcttttacttagcataatcctttcaaaattcatctacgttgcagaatttatcagtatttttcttgatatttctgaataatacttcaytgtatggttatacctcataagttgatgggttgtttctattttctgattattatgaacaatggggctatgaaccttcatatataagctttgtgtgaacata

SEQ ID NO: 50716 - DNA, 201 bp, Homo sapiens
gtgggcatttagtgctataaatttccctctacacactgctttaaatgtgtcccagagattctggcacattgtgtctttgttctcattggtttcaaagaacwtctttatttctgccttcatttcgttatttatgcagtagtcattcaggagcaggttgttcagtttccatgtagttgtgcggttttgagtgagtttcttaat

SEQ ID NO: 50717 - DNA, 201 bp, Homo sapiens
tgatatttttaaatgaagtagaagagtttttaaaatgacagaatttaggaaactaaagcataagtcaggattataaaaattaagagatgagataattggayacaaggaaaatttgaaaagagctcacacagaatttagttaggaaaaaaccatttttcttttctaaaaaaaacctctaaccattttagaaataaaaagaag

SEQ ID NO: 50718 - DNA, 201 bp, Homo sapiens
ttctaacaccaatatccttcaaaataagttccaaatcaaagaataagtcagaaaatacttttaactgaatgataaaaatatgatacactaaaatacatggratgcaactaatattatgtttagagggaagtttatggtcataaatgcacatttcagaaaaggagaaagatttaatattgtaaaaaaacaaaatatgttact

SEQ ID NO: 50719 - DNA, 201 bp, Homo sapiens
attgaccttttatgtttatcctttggcaataccacaaagtcttagttacgatagcagaaaatccatttatttatttatttatttttgaggtagagtcttgytatgtcgcccaggctggggtgcagtggtgccatcatagctcactgcatgttccatggcgtccctcttcaaactcctcgcctcaaaggattctcctatctc

SEQ ID NO: 50720 - DNA, 201 bp, Homo sapiens
tccctctacacactgctttaaatgtgtcccagagattctggcacattgtgtctttgttctcattggtttcaaagaacatctttatttctgccttcatttcsttatttatgcagtagtcattcaggagcaggttgttcagtttccatgtagttgtgcggttttgagtgagtttcttaattctgagttctaatttgattgcac

SEQ ID NO: 50721 - DNA, 201 bp, Homo sapiens
tctccccattgaggactgcccgaaaaactatctcacttaaacatacgtaatgcaaaaggattgcagaggagaaatccagtcccattcagttttttttttgktttgttttgttttgtttttaaagaaaaagaagttgattagcatagtaacagatcatcaggcaatgatctctggaaagacatgccctacaaaatacataaa

SEQ ID NO: 50722 - DNA, 201 bp, Homo sapiens
ttgtaacaagtaggtcttagccaatcacagcagtcatatttcaaccacttacaggcagccaatggttcaaaccatgctcagataaggcaaacgcttagttsccttttggattggctgccaagcaactaatctggctgttcctgcgtctcacttctgttttctgtatttcactttcccttttctgtccataaatcctttcca

SEQ ID NO: 50723 - DNA, 201 bp, Homo sapiens
gatctccttttgggttctgcatccccaagctgctgttctcaccccatacatagggcaccacatacatgaagtgatcactgctgtggcggcccgtggggaarcagaaggctgtcagcaagactgaggggtccatgctgtaaagaaggggaaggtgcctttcccataaagggctcacccatgggacaaaagggggcccaatga

SEQ ID NO: 50724 - DNA, 201 bp, Homo sapiens
actgagcgagccttcctctcctgcctccccttccacctcctccatctcttctgcctctgtcacccgagacagcaagatcaaccccctccctttcttcagcstactaaacgtgaacatcaagaggatgaagacatttatgatgatacacttctattaaatgaacagtaaatatatttgctttttcttgtgattatctttaca

SEQ ID NO: 50725 - DNA, 201 bp, Homo sapiens
gggtagaggagtcggcaggggcggagtatgtgcactgggggagaagtggggcagatcagaccagtgcatgctgagattctactttttggagactctgcttytcactataaagtggcgttctgatattttagacgcttttaagttttttttttaaattattatttcttttttattatactttaagttctagggtacatgtgc

SEQ ID NO: 50726 - DNA, 201 bp, Homo sapiens
ctttctttctcttcttcattcttcccttttaccagattgacttcttgcccctcatttgcttcaggagacccatggtagctgtttagaaatggcagccccartcgtctcatttggctccatgacccccactcttgattttgtctgacacagactttacagtttacaaagaattttgtgtgtgttatttcatctgcacctaac

SEQ ID NO: 50727 - DNA, 201 bp, Homo sapiens
cactgggggagaagtggggcagatcagaccagtgcatgctgagattctactttttggagactctgcttttcactataaagtggcgttctgatattttagaygcttttaagttttttttttaaattattatttcttttttattatactttaagttctagggtacatgtgcacaacgtgcagttttgttacataggtatacat

SEQ ID NO: 50728 - DNA, 201 bp, Homo sapiens
caagaacctagaatgcgaatgtgcatgttgtggaaatgagtagtagaagtagaatctcccgctgtaatgactgaatgtttatgtttctcccaaaattcatktgttcaaatcccaaccaccaatgtgatggtactaggaggtggagcctttgggaagtaataggctatgagggtggtaatcaggtcataatcccttatgaat

SEQ ID NO: 50729 - DNA, 201 bp, Homo sapiens
agttttttttttaaattattatttcttttttattatactttaagttctagggtacatgtgcacaacgtgcagttttgttacataggtatacatgtgccacrttggtttgctgcacccatcaacttgtcatttacattaagtatttctcctaatgctatccctcccccagcccctcaccccctggcaggccccggtatgtga

SEQ ID NO: 50730 - DNA, 201 bp, Homo sapiens; identical to SEQ ID NO: 29739

SEQ ID NO: 50731 - DNA, 201 bp, Homo sapiens
atactgaatattacctcactaataacatctgagatgagaggcaaagattatgactatcaggaataaccagaatttggggccaaattgtcttcattgtaggwctaacagagaccagatccatcttctggttatttattcattttccaaatgtgtaggtataattgacaagtctagcaatgatcagaattcccactgtggctc

SEQ ID NO: 50732 - DNA, 201 bp, Homo sapiens
tccttggaacacatctgacactctacgagtgttttaaaattttatttaatctgaaaagaatgaagaaggaatgagttctggtgttctattgcacagtaggmtgacaatagtttacagtaagatttagcaaattacaaaatagctagatgagaggtttttgaatgtcttcaccataaaaaaaaaagataaatggatgaagta

SEQ ID NO: 50733 - DNA, 201 bp, Homo sapiens
aattatattaaagggcttgtttctgtctcttctagagatatgtctgggaaccaaggtacggattggtagtggcttttgcagaatacttgttttccatcctyaggaataggagttgttttcatttagaccttttaggatccaggaaagaagtatattttcattaacatgcttaagaatagtttcactgaattggaagctgag

SEQ ID NO: 50734 - DNA, 201 bp, Homo sapiens
ttatattaaagggcttgtttctgtctcttctagagatatgtctgggaaccaaggtacggattggtagtggcttttgcagaatacttgttttccatcctcargaataggagttgttttcatttagaccttttaggatccaggaaagaagtatattttcattaacatgcttaagaatagtttcactgaattggaagctgagag

SEQ ID NO: 50735 - DNA, 201 bp, Homo sapiens
gaaattaagaccacacaactggtaaagaatcttaaggatctacaggcttcactgcaagaaaaaaaaagaaaaggaataaaaacatcctagtaactttttartaaattcctttactcctcaagttagcaggagagacgtaatacatttcatctctcaacgtagatggctttgataatttacttcaagcaggatcagacattt

SEQ ID NO: 50736 - DNA, 201 bp, Homo sapiens
caggaaagaagtatattttcattaacatgcttaagaatagtttcactgaattggaagctgagagtattatctggccatttggagattcccacatccagtcstctgggataacacagccaaactgtcaagaaacagtacatttactgatatactttggggacaggaggatgaatgcaactaaatggatctcatggagcccct

SEQ ID NO: 50737 - DNA, 201 bp, Homo sapiens
gagattactggattgttgtgaaaagaaactcaaggaagacagtgacacaccaatttgctgttaaaagatatggtaaccagttgctatttgtagctgtcctrtgtagatgaagagtttaaaggatggaccaacacaacatttgtgttagacttaggcaggagtaggtgaagctagaactggttttctttgtctcccttcctt

SEQ ID NO: 50738 - DNA, 201 bp, Homo sapiens
tccaggaaagaagtatattttcattaacatgcttaagaatagtttcactgaattggaagctgagagtattatctggccatttggagattcccacatccagkcctctgggataacacagccaaactgtcaagaaacagtacatttactgatatactttggggacaggaggatgaatgcaactaaatggatctcatggagccc

SEQ ID NO: 50739 - DNA, 201 bp, Homo sapiens
atccgaaactatccgaaatatggcagcaaagggtaatactctcatacaaattctgattgtttatatttttttcattattttctaggatcctcaaaacaatyggatttttcaatggcaaaatgtgacttctttccgaaatattacccaactctcgttccaactgatttcagaaccaatgtttggagattactggattgttgt

SEQ ID NO: 50740 - DNA, 201 bp, Homo sapiens
aatctcttaatgcttttaaactgattgggaaaagaggggaggtgattattttcttttgctttgtcttttaattcatttaatgtgcctgtcatgtcagatgytagaaatacagtgagaataatgcaggtaaatctttatattcgtgaagtttacattgaatttgggatgcagacaatatacaaatggctgcatattgtcatt

SEQ ID NO: 50741 - DNA, 201 bp, Homo sapiens
ttaatcattagtgagacaccaccatgtagaatggtgccacacaatttggggcaaatgatacatagctcatacagatggagggtacaaggaatcatagtaarctatatgactgcaataaggtttgcttgcctgtgattgtgcaggctaacgtatatttctcttcgtttccagtgctgcccaagtttgaagttacggtcaatg

SEQ ID NO: 50742 - DNA, 201 bp, Homo sapiens
ctttatattcgtgaagtttacattgaatttgggatgcagacaatatacaaatggctgcatattgtcatttgtatatttcttgtgttgctgtaaagaaatayttgaggctgggtaatttacaaagaaaataggggccaagtgcggtggctcacacctataatcccagcactttgggaggctgaggcaggcagatcacctgag

SEQ ID NO: 50743 - DNA, 201 bp, Homo sapiens
tgtttctactaaaaatacaaaaaattagccaggcgtggtggtgcatgcctctaatcccagctactcgggaggctgaggcagaagaatcacttgaacccagraggcagaggttgcagtgagccaagattgtgccattgcactccagcttgggcaacaagagtgaaactccttttcaaaaaaaaaaaaaaggaagaaaatagg

SEQ ID NO: 50744 - DNA, 201 bp, Homo sapiens
acacaccaagccctgtgagtcttcaaggcctagctagttcacaaaacatctttaatttgtttactatacaagtactttattgatgtaccagcactcttcamtatcaaaatattgacgcaaaaggtagccctgtcttcatataaaatataattcattatggatcttccagaataaaaatctatcctaaaacagttgctaaat

SEQ ID NO: 50745 - DNA, 201 bp, Homo sapiens
catttactgatatactttggggacaggaggatgaatgcaactaaatggatctcatggagcccctccatgtcccacaatgcagtctttacatttcatggaargagaatgttaccctcccaccacgttcaagtggaaccatctatggatcagattcctcaatttgtgaaattaagaccacacaactggtaaagaatcttaagg

SEQ ID NO: 50746 - DNA, 201 bp, Homo sapiens
gatgtaccagcactcttcactatcaaaatattgacgcaaaaggtagccctgtcttcatataaaatataattcattatggatcttccagaataaaaatctaycctaaaacagttgctaaatgaacttattatgacagcttgtgtgtgtttatttgtgtaaactcaatataacattttggcaaaatatatattgaactatcca

SEQ ID NO: 50747 - DNA, 201 bp, Homo sapiens
tattatgacagcttgtgtgtgtttatttgtgtaaactcaatataacattttggcaaaatatatattgaactatccatcctaaacataatctaatagggctrttttcttcttgagattacttctgcaacaagttagcaaaactatagcagagatggccagttttattagtacatcaaaaaatagacctatcagaataaactt

SEQ ID NO: 50748 - DNA, 201 bp, Homo sapiens
gcagtgagccaagattgcaccactgcactccagcctgggcaacagagtgaaactccgtctcaaacaaacaaacaaaaagaaacaaaatgtgaaattctgargatagggaaaagaaaagaaagaggaagaattaatcattagtgagacaccaccatgtagaatggtgccacacaatttggggcaaatgatacatagctcata

SEQ ID NO: 50749 - DNA, 201 bp, Homo sapiens
acaatttggggcaaatgatacatagctcatacagatggagggtacaaggaatcatagtaagctatatgactgcaataaggtttgcttgcctgtgattgtgsaggctaacgtatatttctcttcgtttccagtgctgcccaagtttgaagttacggtcaatgcaccacaaacagtaactatttcagatgatgaattccaagt

SEQ ID NO: 50750 - DNA, 201 bp, Homo sapiens
acagtaggctgacaatagtttacagtaagatttagcaaattacaaaatagctagatgagaggtttttgaatgtcttcaccataaaaaaaaaagataaatgratgaagtactggtaacactgccccaatatgatcattatactacatatatagatatgtgtgtgtgtctgtgtgtgtgtgtgtgtattgaaacatcaaattg

SEQ ID NO: 50751 - DNA, 201 bp, Homo sapiens
aaaatagctagatgagaggtttttgaatgtcttcaccataaaaaaaaaagataaatggatgaagtactggtaacactgccccaatatgatcattatactamatatatagatatgtgtgtgtgtctgtgtgtgtgtgtgtgtattgaaacatcaaattgtacccccccacttttttttttatttttgagacaaagtctcact

SEQ ID NO: 50752 - DNA, 201 bp, Homo sapiens
aaaatagacctatcagaataaacttttggcctgaattcctcatgttatgtatttaaatatttagactaggactggtcacttctagatgtaattgttccaarggttcatattttttttgacttggcctgggaagagatagaattaaatatacaaggaaaatttaagtaagttttgttaacgtgtaattcaatttgattagaa

SEQ ID NO: 50753 - DNA, 201 bp, Homo sapiens
cctcactaataacatctgagatgagaggcaaagattatgactatcaggaataaccagaatttggggccaaattgtcttcattgtaggtctaacagagaccrgatccatcttctggttatttattcattttccaaatgtgtaggtataattgacaagtctagcaatgatcagaattcccactgtggctcctcgtgtgtggaa

SEQ ID NO: 50754 - DNA, 201 bp, Homo sapiens
atctaaaattgattttatcttgaaaggcaacaggattaaagatttttaccaactctcacctccggaaaccagtattgtgcaaggattctaaccatcttgamtctactgattacatacccttaggtaagtcacagtataatgcgaagggcaggtgacaggttataatctcttaatgcttttaaactgattgggaaaagaggg

SEQ ID NO: 50755 - DNA, 201 bp, Homo sapiens
actgattacatacccttaggtaagtcacagtataatgcgaagggcaggtgacaggttataatctcttaatgcttttaaactgattgggaaaagaggggagrtgattattttcttttgctttgtcttttaattcatttaatgtgcctgtcatgtcagatgttagaaatacagtgagaataatgcaggtaaatctttatattc

SEQ ID NO: 50756 - DNA, 201 bp, Homo sapiens
aacagagaccagatccatcttctggttatttattcattttccaaatgtgtaggtataattgacaagtctagcaatgatcagaattcccactgtggctcctygtgtgtggaataaacacattggagtggatgtgaaaaggttctgcctatcttatcctaaatgaactagaagttgccattatactcacagttccctgaaaat

SEQ ID NO: 50757 - DNA, 201 bp, Homo sapiens
attgacaagtctagcaatgatcagaattcccactgtggctcctcgtgtgtggaataaacacattggagtggatgtgaaaaggttctgcctatcttatcctmaatgaactagaagttgccattatactcacagttccctgaaaataaactcttccatggcctccccatttcactcccttctgattcccagtctcagaacaga

SEQ ID NO: 50758 - DNA, 201 bp, Homo sapiens
gaatagtttcactgaattggaagctgagagtattatctggccatttggagattcccacatccagtcctctgggataacacagccaaactgtcaagaaacartacatttactgatatactttggggacaggaggatgaatgcaactaaatggatctcatggagcccctccatgtcccacaatgcagtctttacatttcatgg

SEQ ID NO: 50759 - DNA, 201 bp, Homo sapiens
acatcaaaaaatagacctatcagaataaacttttggcctgaattcctcatgttatgtatttaaatatttagactaggactggtcacttctagatgtaattsttccaaaggttcatattttttttgacttggcctgggaagagatagaattaaatatacaaggaaaatttaagtaagttttgttaacgtgtaattcaatttg

SEQ ID NO: 50760 - DNA, 201 bp, Homo sapiens
gaacaatatattctatgtaagtaacatggatttagatataaaaattctgcttggctcttctaagattatttctccgagcttctcacatacctaatctccarataagaaggatctaataaaaatgaatgtcaaaaatatgagggcccttcattgcatcacttttgtaacactcaataattcatccaatcaattttgattagg

SEQ ID NO: 50761 - DNA, 201 bp, Homo sapiens
aagaaaattatatgactataataacaaggagcacagtggcttaaaattttaagctaatatgggctgtgaacatgtcatatacatttttgtgccttgagcayttggatcagtccttggaacacatctgacactctacgagtgttttaaaattttatttaatctgaaaagaatgaagaaggaatgagttctggtgttctattg

SEQ ID NO: 50762 - DNA, 201 bp, Homo sapiens
ctgatttcactctgataagaatggatttgcaattcacaattccagcagaaagaacaacctggagctaattatctctaagaatgacagtattacacaccaarccctgtgagtcttcaaggcctagctagttcacaaaacatctttaatttgtttactatacaagtactttattgatgtaccagcactcttcactatcaaaat

SEQ ID NO: 50763 - DNA, 201 bp, Homo sapiens
agaagttgccattatactcacagttccctgaaaataaactcttccatggcctccccatttcactcccttctgattcccagtctcagaacagagcatctcaytggtcgagcctgtcatttacctgccccctggattcaaggtaatctgggaatggagtcttctaacttctttactggaagtgaaacgcatatgttgggaaat

SEQ ID NO: 50764 - DNA, 201 bp, Homo sapiens
ctgccttctttttcccctagaaaatatacattttttctagaatccccacagtcttctaggagagatctaagagattgcaatagaaagaaaatgtgaggccrggtgtggtggctcacgcctgtaatcccagcactttgagagactgaggcgagtggatcatgaggtcaggagttcgagaccagcctcaccaacatggtgaaa

SEQ ID NO: 50765 - DNA, 201 bp, Homo sapiens
cagtcttctaggagagatctaagagattgcaatagaaagaaaatgtgaggccaggtgtggtggctcacgcctgtaatcccagcactttgagagactgaggygagtggatcatgaggtcaggagttcgagaccagcctcaccaacatggtgaaacccagtctctactaaaaatacaaaaattagcccagcgtggtcgtgcat

SEQ ID NO: 50766 - DNA, 201 bp, Homo sapiens
attgcaatagaaagaaaatgtgaggccaggtgtggtggctcacgcctgtaatcccagcactttgagagactgaggcgagtggatcatgaggtcaggagttsgagaccagcctcaccaacatggtgaaacccagtctctactaaaaatacaaaaattagcccagcgtggtcgtgcatgcctgtaatcccagctactcgggag

SEQ ID NO: 50767 - DNA, 201 bp, Homo sapiens
cttctaagattatttctccgagcttctcacatacctaatctccagataagaaggatctaataaaaatgaatgtcaaaaatatgagggcccttcattgcatmacttttgtaacactcaataattcatccaatcaattttgattagggttgaagttctgatttcactctgataagaatggatttgcaattcacaattccagca

SEQ ID NO: 50768 - DNA, 201 bp, Homo sapiens
cccagtctctactaaaaatacaaaaattagcccagcgtggtcgtgcatgcctgtaatcccagctactcgggaggctgaggcaggagaatggcttgaacccygtaggcagaggttgcagtgagccaagattgcaccactgcactccagcctgggcaacagagtgaaactccgtctcaaacaaacaaacaaaaagaaacaaaa

SEQ ID NO: 50769 - DNA, 201 bp, Homo sapiens
ttacaggtgtgagccactgtgccccgccaattgtatcctttaagtatgtacaattacaatactttaaaaaaagaaaaaagaataaaggcagtacaagtttktatgaccaaagcatagtgtataatcctctaagatttatagacattagggttcttaagccctcacaggctctaccaaaagctacttgtttgtttcataaga

SEQ ID NO: 50770 - DNA, 201 bp, Homo sapiens
tggcttaaaattttaagctaatatgggctgtgaacatgtcatatacatttttgtgccttgagcatttggatcagtccttggaacacatctgacactctacragtgttttaaaattttatttaatctgaaaagaatgaagaaggaatgagttctggtgttctattgcacagtaggctgacaatagtttacagtaagatttag

SEQ ID NO: 50771 - DNA, 201 bp, Homo sapiens
aaatgtgacttctttccgaaatattacccaactctcgttccaactgatttcagaaccaatgtttggagattactggattgttgtgaaaagaaactcaaggragacagtgacacaccaatttgctgttaaaagatatggtaaccagttgctatttgtagctgtcctgtgtagatgaagagtttaaaggatggaccaacacaa

SEQ ID NO: 50772 - DNA, 201 bp, Homo sapiens
agcctcccaagtagctgggattacagaggcacacgccaccatacccaactaatttttgtatttttagtagagatggggtttcacaatattacccaagctgrtcttgaactccttggctctagtgatctgcccaccttggcatcccaaagtgctaggattacaggtgtgagccactgtgccccgccaattgtatcctttaag

SEQ ID NO: 50773 - DNA, 201 bp, Homo sapiens
ttaaaggatggaccaacacaacatttgtgttagacttaggcaggagtaggtgaagctagaactggttttctttgtctcccttccttgacctggttggcttygtcatcagcactttgctgctcctctctccttccccagtatccttattctgattcctgccttctttttcccctagaaaatatacattttttctagaatccc

SEQ ID NO: 50774 - DNA, 201 bp, Homo sapiens
gctgggattacagaggcacacgccaccatacccaactaatttttgtatttttagtagagatggggtttcacaatattacccaagctggtcttgaactcctkggctctagtgatctgcccaccttggcatcccaaagtgctaggattacaggtgtgagccactgtgccccgccaattgtatcctttaagtatgtacaattac

SEQ ID NO: 50775 - DNA, 201 bp, Homo sapiens
ccgaaatatggcagcaaagggtaatactctcatacaaattctgattgtttatatttttttcattattttctaggatcctcaaaacaatcggatttttcaawggcaaaatgtgacttctttccgaaatattacccaactctcgttccaactgatttcagaaccaatgtttggagattactggattgttgtgaaaagaaactc

SEQ ID NO: 50776 - DNA, 201 bp, Homo sapiens
gtgacacaccaatttgctgttaaaagatatggtaaccagttgctatttgtagctgtcctgtgtagatgaagagtttaaaggatggaccaacacaacatttrtgttagacttaggcaggagtaggtgaagctagaactggttttctttgtctcccttccttgacctggttggcttcgtcatcagcactttgctgctcctctc

SEQ ID NO: 50777 - DNA, 201 bp, Homo sapiens
catagtaagctatatgactgcaataaggtttgcttgcctgtgattgtgcaggctaacgtatatttctcttcgtttccagtgctgcccaagtttgaagttayggtcaatgcaccacaaacagtaactatttcagatgatgaattccaagtggatgtatgtgctaagtgagtatttattcagagatttaccttcacaagaaaa

SEQ ID NO: 50778 - DNA, 201 bp, Homo sapiens
tgattattttcttttgctttgtcttttaattcatttaatgtgcctgtcatgtcagatgttagaaatacagtgagaataatgcaggtaaatctttatattcrtgaagtttacattgaatttgggatgcagacaatatacaaatggctgcatattgtcatttgtatatttcttgtgttgctgtaaagaaatacttgaggctgg

SEQ ID NO: 50779 - DNA, 201 bp, Homo sapiens
gggctgtgaacatgtcatatacatttttgtgccttgagcatttggatcagtccttggaacacatctgacactctacgagtgttttaaaattttatttaatytgaaaagaatgaagaaggaatgagttctggtgttctattgcacagtaggctgacaatagtttacagtaagatttagcaaattacaaaatagctagatgag

SEQ ID NO: 50780 - DNA, 201 bp, Homo sapiens
ctgaattttcatgccttgatatttatataattttcactggagtccacttcagttaggcagacacccatccctaaggtctcacttctatctttctcaaagayattctgcctcattaccaaagcacatgagctcctggaaagataaatatctaaatattctataaaatactgaatattacctcactaataacatctgagatga

SEQ ID NO: 50781 - DNA, 201 bp, Homo sapiens; identical to SEQ ID NO: 50315

SEQ ID NO: 50782 - DNA, 201 bp, Homo sapiens; identical to SEQ ID NO: 50317

SEQ ID NO: 50783 - DNA, 201 bp, Homo sapiens
ataagcaaactaggcttatttgatagttaatataattcacatgatgccctatcctttagatacttaaataaattggttagttttgaccttgtgctgatgargccaaagtcagggcacaattcttttcagccagttggttctgtgtggtgatcatatttgtaatcaaatcagtaaatcaataaaatgtattcatgcagtact

SEQ ID NO: 50784 - DNA, 201 bp, Homo sapiens
tcatctcttcattatatactaaataagcaaggtatgtctccaccttgaaggtatagcacctccttataagaagtaagacaggtttctctagaaatgtccayctaaccaccaccattggaatagaggacagagtctgagggcagtggctcaggcctgtaatcccagcactttggaaggctgaggctggtggatcacctaagg

SEQ ID NO: 50785 - DNA, 201 bp, Homo sapiens
agcatcataaggcaaacattaccctctcgttttacagacatggggctaaagagataacatatttgcctaaagatatacaatgattaaggcacacagactakgctgggcatggtgggtcagacctgtaattccagcactttgggaggccgaggtgggcagatcacttgaggccaggagtttaaaaacagcttggccaacatg

SEQ ID NO: 50786 - DNA, 201 bp, Homo sapiens
gcacaagaatcccctgaacccaggaggcagaggttacaatgagctgaaatcgcaccactgcacgccagccagcctgggcaacagagtgagactctgtctcaaaaaaaaaaaaaaaaaaaaaaaagagaaaataaacctaaattgtacagttacttataagattgtcataagaaatcactaatataaataattcagtcttgc

SEQ ID NO: 50787 - DNA, 201 bp, Homo sapiens
accattggaatagaggacagagtctgagggcagtggctcaggcctgtaatcccagcactttggaaggctgaggctggtggatcacctaaggttaagagttygagaccagcctggccaacatggtgaaatcctgtctctactaaaaatataaaattagccagctgtggtggcatacgcctgtaatcccagctactggggagg

SEQ ID NO: 50788 - DNA, 201 bp, Homo sapiens
ttgagtagctctaaaccagagatcattttactttgcaatgggaagccagggacttggaagagaatttttctccacctcgtgaataagcctgcaggagtggsagcacatctgcctatggctctgcagcttagccttccagaaacctattctaaacgtgcaaccttggcctcataacagagatgacaaggggttattagggtt

SEQ ID NO: 50789 - DNA, 201 bp, Homo sapiens
caattaagcactatgctagataattccaaagatgtatcagtcccaaagaaagggatgagtgaagattagcatgagtgaagattagcaaagaggtgactttwggaaggaaatggaattgagctgagccttggaaaaaatggtaggatttccattgcaaggagaaaatgaagggtcaagggagaatctgaaagtggaactgaa

SEQ ID NO: 50790 - DNA, 201 bp, Homo sapiens
gactctgtctcaaaaaaaaaaaaaaaaaaaaaaaagagaaaataaacctaaattgtacagttacttataagattgtcataagaaatcactaatataaatamttcagtcttgctgcagacccatgcttttcaactcagtcttaacaaggaaataaattcctttcagaattgagcattttgggaaatatgtttaagggctaat

SEQ ID NO: 50791 - DNA, 201 bp, Homo sapiens
atcacttgaggccaggagtttaaaaacagcttggccaacatggcaaaacaatgactttactaaaaacacaaaaattagccaggtgtggtggcacatgcctrtagtcccagctacttgggaagctgaggcaagagaattgcatgaacctgggaggcgggaggtggagcttgcagtgagccgagccgagattgtgctgctgca

SEQ ID NO: 50792 - DNA, 201 bp, Homo sapiens
tcagtaaatcaataaaatgtattcatgcagtactcagtaaggcaaagtccctaatcccaaattacgtactatggagattgggagataaaattaagagacakgaaaatgtgaaaacaattaagcactatgctagataattccaaagatgtatcagtcccaaagaaagggatgagtgaagattagcatgagtgaagattagca

SEQ ID NO: 50793 - DNA, 201 bp, Homo sapiens
aataatagatttttgaaaatataaagctaggacttctaacttacaatcctattaaattttgtctgataggtgtcaggcagtgttttagcttgctgggaccrcttggaaccatgatctaaaacctgtggaatgttctgacctctccaactttatactttgaaagttaataaaaaaggcctttttccagctccttacatgttc

SEQ ID NO: 50794 - DNA, 201 bp, Homo sapiens
ttcactctggtcataggcccaaaaacttaataccaagtttagaacgtattttccgcaagagattgctggatgaatttatgagcaaacatcagcacagccamtatcagaacacccagcttgtcaactcctctcctatccagtggagtgggaaagtgtatttactgtagaagttcaagaaagcattattaaaaacaagcacca

SEQ ID NO: 50795 - DNA, 201 bp, Homo sapiens
tctcttctacaatgccttacaaaaatggtcttccagctctgctcttagctcttccagaacaatcagcacccacatctttgtaaggaagaatatcattttgtttaataagatcctttaataaaactttcttcttacattgtgccaaaacttccctccttataccattaaaccatagtcctaggtttctcctttacaaatgct

SEQ ID NO: 50796 - DNA, 201 bp, Homo sapiens
gaaatagtggttagccaccctgaatgctttccaaagagtggaatatttgcgatttacaatgtgagtgggaactttggtaatgctgttattttaagaactcrtcaatcaattgagattaagataacatttattgcaacataaactgggattgccatgagaacaggcagaaggtatctgcggatcatttaagacatttcacag

SEQ ID NO: 50797 - DNA, 201 bp, Homo sapiens
taattagaggtcaacattaatttacatctgaaactagcaaagtagttcatgactctttttcacatcacacatacccatactacttctcagagtcaactggyctctcatctcttcattatatactaaataagcaaggtatgtctccaccttgaaggtatagcacctccttataagaagtaagacaggtttctctagaaatgt

SEQ ID NO: 50798 - DNA, 201 bp, Homo sapiens
ataagattgtcataagaaatcactaatataaataattcagtcttgctgcagacccatgcttttcaactcagtcttaacaaggaaataaattcctttcagarttgagcattttgggaaatatgtttaagggctaatgtaccttacgtaactctttaaaccagctgactcacctgaaggataaggcccattaaagagattgta

SEQ ID NO: 50799 - DNA, 201 bp, Homo sapiens; identical to SEQ ID NO: 50367

SEQ ID NO: 50800 - DNA, 201 bp, Homo sapiens; identical to SEQ ID NO: 50368

SEQ ID NO: 50801 - DNA, 201 bp, Homo sapiens; identical to SEQ ID NO: 50369
  misc_feature (1)...(201): n = A,T,C or G, or insertion/deletion polymorphism (see Tables 1-2)

SEQ ID NO: 50802 - DNA, 201 bp, Homo sapiens; identical to SEQ ID NO: 50370

SEQ ID NO: 50803 - DNA, 201 bp, Homo sapiens; identical to SEQ ID NO: 50371

SEQ ID NO: 50804 - DNA, 201 bp, Homo sapiens; identical to SEQ ID NO: 50372

SEQ ID NO: 50805 - DNA, 201 bp, Homo sapiens; identical to SEQ ID NO: 50373

SEQ ID NO: 50806 - DNA, 201 bp, Homo sapiens; identical to SEQ ID NO: 50374

SEQ ID NO: 50807 - DNA, 201 bp, Homo sapiens; identical to SEQ ID NO: 50375

SEQ ID NO: 50808 - DNA, 201 bp, Homo sapiens; identical to SEQ ID NO: 50376

SEQ ID NO: 50809 - DNA, 201 bp, Homo sapiens; identical to SEQ ID NO: 50377

SEQ ID NO: 50810 - DNA, 201 bp, Homo sapiens; identical to SEQ ID NO: 50378

SEQ ID NO: 50811 - DNA, 201 bp, Homo sapiens; identical to SEQ ID NO: 50379

SEQ ID NO: 50812 - DNA, 201 bp, Homo sapiens; identical to SEQ ID NO: 50380

SEQ ID NO: 50813 - DNA, 201 bp, Homo sapiens; identical to SEQ ID NO: 50381
  misc_feature (1)...(201): n = A,T,C or G, or insertion/deletion polymorphism (see Tables 1-2)

SEQ ID NO: 50814 - DNA, 201 bp, Homo sapiens; identical to SEQ ID NO: 50382

SEQ ID NO: 50815 - DNA, 201 bp, Homo sapiens; identical to SEQ ID NO: 50383
  misc_feature (1)...(201): n = A,T,C or G, or insertion/deletion polymorphism (see Tables 1-2)

SEQ ID NO: 50816 - DNA, 201 bp, Homo sapiens; identical to SEQ ID NO: 50384

SEQ ID NO: 50817 - DNA, 201 bp, Homo sapiens; identical to SEQ ID NO: 50385
  misc_feature (1)...(201): n = A,T,C or G, or insertion/deletion polymorphism (see Tables 1-2)

SEQ ID NO: 50818 - DNA, 201 bp, Homo sapiens; identical to SEQ ID NO: 50386

SEQ ID NO: 50819 - DNA, 201 bp, Homo sapiens; identical to SEQ ID NO: 50387

SEQ ID NO: 50820 - DNA, 201 bp, Homo sapiens; identical to SEQ ID NO: 50388

SEQ ID NO: 50821 - DNA, 201 bp, Homo sapiens; identical to SEQ ID NO: 50389

SEQ ID NO: 50822 - DNA, 201 bp, Homo sapiens; identical to SEQ ID NO: 50390

SEQ ID NO: 50823 - DNA, 201 bp, Homo sapiens; identical to SEQ ID NO: 50391

SEQ ID NO: 50824 - DNA, 201 bp, Homo sapiens; identical to SEQ ID NO: 50392

SEQ ID NO: 50825 - DNA, 201 bp, Homo sapiens; identical to SEQ ID NO: 50393

SEQ ID NO: 50826 - DNA, 201 bp, Homo sapiens; identical to SEQ ID NO: 50394

SEQ ID NO: 50827 - DNA, 201 bp, Homo sapiens; identical to SEQ ID NO: 50395

SEQ ID NO: 50828 - DNA, 201 bp, Homo sapiens; identical to SEQ ID NO: 50396

SEQ ID NO: 50829 - DNA, 201 bp, Homo sapiens; identical to SEQ ID NO: 50397

SEQ ID NO: 50830 - DNA, 201 bp, Homo sapiens; identical to SEQ ID NO: 50398

SEQ ID NO: 50831 - DNA, 201 bp, Homo sapiens; identical to SEQ ID NO: 50399

SEQ ID NO: 50832 - DNA, 201 bp, Homo sapiens; identical to SEQ ID NO: 50400

SEQ ID NO: 50833 - DNA, 201 bp, Homo sapiens; identical to SEQ ID NO: 50401

SEQ ID NO: 50834 - DNA, 201 bp, Homo sapiens; identical to SEQ ID NO: 50402

SEQ ID NO: 50835 - DNA, 201 bp, Homo sapiens; identical to SEQ ID NO: 50403

SEQ ID NO: 50836 - DNA, 201 bp, Homo sapiens; identical to SEQ ID NO: 50404

SEQ ID NO: 50837 - DNA, 201 bp, Homo sapiens; identical to SEQ ID NO: 24570

SEQ ID NO: 50838 - DNA, 201 bp, Homo sapiens; identical to SEQ ID NO: 24443

SEQ ID NO: 50839 - DNA, 201 bp, Homo sapiens; identical to SEQ ID NO: 25087

SEQ ID NO: 50840 - DNA, 201 bp, Homo sapiens; identical to SEQ ID NO: 24956

SEQ ID NO: 50841 - DNA, 201 bp, Homo sapiens; identical to SEQ ID NO: 24033

SEQ ID NO: 50842 - DNA, 201 bp, Homo sapiens; identical to SEQ ID NO: 24018

SEQ ID NO: 50843 - DNA, 201 bp, Homo sapiens; identical to SEQ ID NO: 24413

SEQ ID NO: 50844 - DNA, 201 bp, Homo sapiens; identical to SEQ ID NO: 24034

SEQ ID NO: 50845 - DNA, 201 bp, Homo sapiens; identical to SEQ ID NO: 24974

SEQ ID NO: 50846 - DNA, 201 bp, Homo sapiens
ggtgttaagaatttggctagtgggagaatcaaatggaatgtcgtggaaagtaaactgcgctggaggaatgttaaaccagtataaggctgaaggaaggaagrcttccaaggacaatggattagatgcccaaaacacgtcaaggaagaagtggaataagaataattaaggggaacagctgaaagtagaatgtgatgtattaaa

SEQ ID NO: 50847 - DNA, 201 bp, Homo sapiens
aaaacagaaaaatgtgtgtggcaggtgttaagaatttggctagtgggagaatcaaatggaatgtcgtggaaagtaaactgcgctggaggaatgttaaaccrgtataaggctgaaggaaggaaggcttccaaggacaatggattagatgcccaaaacacgtcaaggaagaagtggaataagaataattaaggggaacagctg

SEQ ID NO: 50848 - DNA, 201 bp, Homo sapiens
agaacagttattaaggtcttttaagatatggtaagaattttggattgagaagtgactaatggttttaagaaagagagtaacatgatcaggttagctcaggmtgtatagaatggtttagacaagaatgaagcagcaaggaaatgcagaagattaaatagctactggaaaccagatgggaaaaaatgtgattttaactagaat

SEQ ID NO: 50849 - DNA, 201 bp, Homo sapiens
gaagagaggggagaagccaaaggttgataatgaataaatcaatgatgaacgaagaaactttatgtcattcttgggcttgggaaaagataagcaccaaaagratggtcagaacatttgttacatttatttttatggccagtaaaaaaattctcataaattgacagctgactttttaagtagcaaattggaagacctgagaat

SEQ ID NO: 50850 - DNA, 201 bp, Homo sapiens
atagatggaagacccatatactgaaagagagaacagtggaagtggagaaagtttgggaaggtagtgtgatgatcccacttttggatgttctcaatttgagkccccatgagatatccaaatagaactattcaagattttgagatgtattgcataacaggataattatagtcagtaataatatattgtacatttcaaaataat

SEQ ID NO: 50851 - DNA, 201 bp, Homo sapiens
ggggagaggagatagcacttgacaatgagtttgagataagcagtgaaagaaaatgactcattaaaaaaaacccaattcctcagtattcctgcgtcagttayctgatagatggaagacccatatactgaaagagagaacagtggaagtggagaaagtttgggaaggtagtgtgatgatcccacttttggatgttctcaattt

SEQ ID NO: 50852 - DNA, 201 bp, Homo sapiens
gtgtcgccacggcaatggtaaactgacatggcacactggtaggcacgtctaatggaaagcagccaccctgcatccctgttttagtaagttctcaatttggyccggtgtctgagacctgcttccaaagttgagtcccacctcttacctcaagggtatggaaaagaaagttatcaaagctgcagagagcaaatgaatgagagg

SEQ ID NO: 50853 - DNA, 201 bp, Homo sapiens
aggtgttagagacagcaacgtttattgaagcagcagcgtacagcagcagcagaggtactgttccttgcagagcagggctaccccataagcagtgtgcccayagtagcagctcaaagggagtactgcagtcatatttacacccattttagttacatggaaattaagaggcagattatgcagaaatttccaggaaaaagtggt

SEQ ID NO: 50854 - DNA, 201 bp, Homo sapiens
tggtctggtgacacttagtgtatgcagaagatattcactatgccgttccgactgccacaacacacattcacaaagtatctgtgaagaattcaatcaacagktatgtggaaaccactctcctcaggacactaataccaaggttttctcttctcatggattacaatagtgaatacaatacaacagagaatagtgtttgaaata

SEQ ID NO: 50855 - DNA, 201 bp, Homo sapiens
aaggcaaaaattactgattccagaggcagagtatgtaaaaagtccagggtgtggcagtatgagcagaccctgtaagggtgacgcagggcaggtaagctccsaaatggggttttagcccaagagggttcttttcttcacccaggaaagaattcaagggcaagccagaggtgttagagacagcaacgtttattgaagcagcag

SEQ ID NO: 50856 - DNA, 201 bp, Homo sapiens
tgtatgcagaagatattcactatgccgttccgactgccacaacacacattcacaaagtatctgtgaagaattcaatcaacaggtatgtggaaaccactctsctcaggacactaataccaaggttttctcttctcatggattacaatagtgaatacaatacaacagagaatagtgtttgaaatacccatcaagcaaaatggt

SEQ ID NO: 50857 - DNA, 201 bp, Homo sapiens
tcatgtgaatactagatactatttcagtgcaactactgatgagcatggtttggtgaacatttccatggacaccaccaactacatatcaccttttctcacartttcagtaagtggaaaggggcatctgggaccaaaaatagagaaattactgtggccagagataatttaaagatatttgagaggcatgtgaactctaggaat

SEQ ID NO: 50858 - DNA, 201 bp, Homo sapiens
tgcagccatagcgtgttaagagaaagtaattgaccttgtttgtgaatgaataacatctactaaatcagtacagcataagcttaaatgatctcgaggggaakcagtttacagattctgctatatttaagaaagcagccttcttatatggctttattatattgctttatgtatatatatacaaacatatataatatgcatatt

SEQ ID NO: 50859 - DNA, 201 bp, Homo sapiens
atatttacacccattttagttacatggaaattaagaggcagattatgcagaaatttccaggaaaaagtggtaacttctgggttgtcaggccattgccatgraaagaggcattaacttcgggtgtcgccacggcaatggtaaactgacatggcacactggtaggcacgtctaatggaaagcagccaccctgcatccctgttt

SEQ ID NO: 50860 - DNA, 201 bp, Homo sapiens
atgtacaatgaagtctgagatgagaattcgatatggagggcaagtagggaatcttttaagaatttgatagcactgtgtttttgataagaacaagatacagrgtacacatcattgaatggaaaagcaccaggtgttcactatcctttggatagctcacgcagggaaacgacaggtctttctggaaataaagtttgtattaga

SEQ ID NO: 50861 - DNA, 201 bp, Homo sapiens
atatttaagaaagcagccttcttatatggctttattatattgctttatgtatatatatacaaacatatataatatgcatatttttatatatttttgcaatyatatatatattatatataaaacagcttatttattcttccattaggtcaaatacaaagagagtaacaattgttctgataactggtggcttgatgaatttca

SEQ ID NO: 50862 - DNA, 201 bp, Homo sapiens
gagagcagggatgtgagagagggaaaaacaaagatggagcaagatcacagaggagttgagaaaataaagaacataggtggaaaaccagaggaatgagggaygatggataccaataatgtttcatgtgaaggtgaagctaatgtccagttgctggtcaaatagcttgtaaatgtgggaaactggcaagaataaagaaaagag

SEQ ID NO: 50863 - DNA, 201 bp, Homo sapiens
ttaagaggcagattatgcagaaatttccaggaaaaagtggtaacttctgggttgtcaggccattgccatggaaagaggcattaacttcgggtgtcgccacrgcaatggtaaactgacatggcacactggtaggcacgtctaatggaaagcagccaccctgcatccctgttttagtaagttctcaatttggtccggtgtctg

SEQ ID NO: 50864 - DNA, 201 bp, Homo sapiens; identical to SEQ ID NO: 26369

SEQ ID NO: 50865 - DNA, 201 bp, Homo sapiens; identical to SEQ ID NO: 26366

SEQ ID NO: 50866 - DNA, 201 bp, Homo sapiens; identical to SEQ ID NO: 26368

SEQ ID NO: 50867 - DNA, 201 bp, Homo sapiens
gaaaatctgaactgaacatgaaatggcattgctgagaagtatgttccatgagcacctgagggcgctctggaaaaaaaaaatagagccagttcaaaataacscaccagttctcaatatgcatcagacaacgccacagagattctgtcctcaaaactgaggggctaaaaatatgcagatactttactccagcctagggaggcc

SEQ ID NO: 50868 - DNA, 201 bp, Homo sapiens
caagtctgtgatattgcacaaataaataacacttcccattatctctagcgcgatcgtatttattaaacagtgacagagggcatcagtaaccatttttattrtcccatatagctcctattttctaattaaacaaaaggttatttctactgttaacagccatttgtctacttgggtcttacataatactttttgccaagcatg

SEQ ID NO: 50869 - DNA, 201 bp, Homo sapiens
tcaggtaggtagctctgctccacttcctccctccagcaaggctactaaatttagttgtgctggaaaatctgaactgaacatgaaatggcattgctgagaastatgttccatgagcacctgagggcgctctggaaaaaaaaaatagagccagttcaaaataacccaccagttctcaatatgcatcagacaacgccacagaga

SEQ ID NO: 50870 - DNA, 201 bp, Homo sapiens; identical to SEQ ID NO: 23755

SEQ ID NO: 50871 - DNA, 201 bp, Homo sapiens; identical to SEQ ID NO: 23731

SEQ ID NO: 50872 - DNA, 201 bp, Homo sapiens; identical to SEQ ID NO: 23732

SEQ ID NO: 50873 - DNA, 201 bp, Homo sapiens; identical to SEQ ID NO: 23687

SEQ ID NO: 50874 - DNA, 201 bp, Homo sapiens; identical to SEQ ID NO: 23712

SEQ ID NO: 50875 - DNA, 201 bp, Homo sapiens; identical to SEQ ID NO: 23713

SEQ ID NO: 50876 - DNA, 201 bp, Homo sapiens; identical to SEQ ID NO: 23736

SEQ ID NO: 50877 - DNA, 201 bp, Homo sapiens; identical to SEQ ID NO: 23737

SEQ ID NO: 50878 - DNA, 201 bp, Homo sapiens; identical to SEQ ID NO: 23738

SEQ ID NO: 50879 - DNA, 201 bp, Homo sapiens; identical to SEQ ID NO: 23766

SEQ ID NO: 50880 - DNA, 201 bp, Homo sapiens; identical to SEQ ID NO: 23773

SEQ ID NO: 50881 - DNA, 201 bp, Homo sapiens; identical to SEQ ID NO: 23693

SEQ ID NO: 50882 - DNA, 201 bp, Homo sapiens; identical to SEQ ID NO: 23774

SEQ ID NO: 50883 - DNA, 201 bp, Homo sapiens; identical to SEQ ID NO: 23722

SEQ ID NO: 50884 - DNA, 201 bp, Homo sapiens; identical to SEQ ID NO: 23775

SEQ ID NO: 50885 - DNA, 201 bp, Homo sapiens; identical to SEQ ID NO: 23724

SEQ ID NO: 50886 - DNA, 201 bp, Homo sapiens; identical to SEQ ID NO: 23727

SEQ ID NO: 50887 - DNA, 201 bp, Homo sapiens; identical to SEQ ID NO: 23778

SEQ ID NO: 50888 - DNA, 201 bp, Homo sapiens; identical to SEQ ID NO: 23780

SEQ ID NO: 50889 - DNA, 201 bp, Homo sapiens; identical to SEQ ID NO: 23781

SEQ ID NO: 50890 - DNA, 201 bp, Homo sapiens; identical to SEQ ID NO: 23753

SEQ ID NO: 50891 - DNA, 201 bp, Homo sapiens; identical to SEQ ID NO: 23754

SEQ ID NO: 50892 - DNA, 201 bp, Homo sapiens; identical to SEQ ID NO: 23707

SEQ ID NO: 50893 - DNA, 201 bp, Homo sapiens; identical to SEQ ID NO: 23710

SEQ ID NO: 50894 - DNA, 201 bp, Homo sapiens; identical to SEQ ID NO: 23685

SEQ ID NO: 50895 - DNA, 201 bp, Homo sapiens; identical to SEQ ID NO: 23686

SEQ ID NO: 50896 - DNA, 201 bp, Homo sapiens; identical to SEQ ID NO: 23756

SEQ ID NO: 50897 - DNA, 201 bp, Homo sapiens; identical to SEQ ID NO: 23733

SEQ ID NO: 50898 - DNA, 201 bp, Homo sapiens; identical to SEQ ID NO: 23734

SEQ ID NO: 50899 - DNA, 201 bp, Homo sapiens; identical to SEQ ID NO: 23735

SEQ ID NO: 50900 - DNA, 201 bp, Homo sapiens; identical to SEQ ID NO: 23758

SEQ ID NO: 50901 - DNA, 201 bp, Homo sapiens; identical to SEQ ID NO: 23760

SEQ ID NO: 50902 - DNA, 201 bp, Homo sapiens; identical to SEQ ID NO: 23761

SEQ ID NO: 50903 - DNA, 201 bp, Homo sapiens; identical to SEQ ID NO: 23740

SEQ ID NO: 50904 - DNA, 201 bp, Homo sapiens; identical to SEQ ID NO: 23716

SEQ ID NO: 50905 - DNA, 201 bp, Homo sapiens; identical to SEQ ID NO: 23769

SEQ ID NO: 50906 - DNA, 201 bp, Homo sapiens; identical to SEQ ID NO: 23771

SEQ ID NO: 50907 - DNA, 201 bp, Homo sapiens; identical to SEQ ID NO: 23745

SEQ ID NO: 50908 - DNA, 201 bp, Homo sapiens; identical to SEQ ID NO: 23746

SEQ ID NO: 50909 - DNA, 201 bp, Homo sapiens; identical to SEQ ID NO: 23721

SEQ ID NO: 50910 - DNA, 201 bp, Homo sapiens; identical to SEQ ID NO: 23750

SEQ ID NO: 50911 - DNA, 201 bp, Homo sapiens; identical to SEQ ID NO: 23751

SEQ ID NO: 50912 - DNA, 201 bp, Homo sapiens; identical to SEQ ID NO: 23777

SEQ ID NO: 50913 - DNA, 201 bp, Homo sapiens; identical to SEQ ID NO: 23728

SEQ ID NO: 50914 - DNA, 201 bp, Homo sapiens; identical to SEQ ID NO: 23705

SEQ ID NO: 50915 - DNA, 201 bp, Homo sapiens
ccctcccctgcagtcctgccccatgagtcagcttgaagccatggtctagagccagactggctgggtggcaggggagtgaatatagagcgtcttgttgacakggtgggaactgagagggctctggggttaataagcagatgccaggtatgctggggtcaagtagggcatcatgtcatcccctggcttccccagggcaagggg

SEQ ID NO: 50916 - DNA, 201 bp, Homo sapiens
cgaggcatcagttgggaagaggggacgcacagctaggcttgaggcctcttcatcggggtaagtaccagggagaagagggggaagtgtgtccagtaagaagyctgagctaaacctgtcaccctctcaggagttctgagagtggtctctatattccattagtccatccagggatttgtacacattcatccttgggaacccatc

SEQ ID NO: 50917 - DNA, 201 bp, Homo sapiens; identical to SEQ ID NO: 23688

SEQ ID NO: 50918 - DNA, 201 bp, Homo sapiens
tgcggtgggggcaggaggagaactgctttccctcagctgagggaagaggggctattccagagggactgagtcagtagccaaagactcagcttcccctgtcsttccccagtcccttcacttcccctaccctctgacctatctctgaaagccaagttatgcgtatgtgtgtgtgcacaagcttgtctttgtgtggtatgtgtg

SEQ ID NO: 50919 - DNA, 201 bp, Homo sapiens
tttaatactgaagggaaggggagaatgagccttgaagctgatacctataccaatacccacctcacccacctcccaggcctcaaaagtgtctaaaggtacaracgtattctgggacttgttgtttttgctggccttgctccctcagcatgttgggagctgtagtccttgccagccacagcctggcacagctgtttgatgcca

SEQ ID NO: 50920 - DNA, 201 bp, Homo sapiens
ggcaaaagaacatcaatttaagagtaacagagggaaaagtaccacttcttaacatggaaggagatagggtcccacctcaggcctttttcttctctggcatkgaggaagcttcctgggcttcactagttctccagctctgaagctttggtttggaaggtggggaaagacaaatgggagtgaggtatttggggtctggggtct

SEQ ID NO: 50921 - DNA, 201 bp, Homo sapiens
tttatttatttatttatttatttatttatttatttttgagacggagtctcactcactctgtcacccaggctggagtgcagtggtgcgatcttggctcactrcaacctccgcctcctgggttcaagtgattctcctgcctcagcctcctgagtagctgggattacaggtgcgcgccaccacactcagctaatttttgtattt

SEQ ID NO: 50922 - DNA, 201 bp, Homo sapiens
ctcctcccaggctcaagggatcctccaacctcagcctcccaagtatctgggaccacaggcacatgacattgcacccagctaatttttggtatttttggtaraaatggggtttcgccatgttgcccaagctggtctcgaactcctgagctcaaatcatcgacccaccttggccttctaaagtgttgtgattacaggcgctca

SEQ ID NO: 50923 - DNA, 201 bp, Homo sapiens; identical to SEQ ID NO: 23691

SEQ ID NO: 50924 - DNA, 201 bp, Homo sapiens
cctgaagagcctctcacatgggagaaggatgtcctggagtgtactattagcctataattggtgacaggccttaccgctggctccagtgatcctggcttacrtctgttcttctctcctcagggtcctgctgagctcaggagctgcacggaatggtggcagtcaccttgccagtgcagcaggcatggatcagactgcaagcta

SEQ ID NO: 50925 - DNA, 201 bp, Homo sapiens; identical to SEQ ID NO: 23749

SEQ ID NO: 50926 - DNA, 201 bp, Homo sapiens
cctcagcctcctgagtagctgggattacaggtgcgcgccaccacactcagctaatttttgtatttttagtagagacggggtttcaccatgttagtcaggcyggtctcgaactcctgagcttgtgatccgcccactttggcctcccaaagtgctgggattacaggcgtgagccaccgtacctggtggtaagtcctcttggtt

SEQ ID NO: 50927 - DNA, 201 bp, Homo sapiens
tcaagggatcctccaacctcagcctcccaagtatctgggaccacaggcacatgacattgcacccagctaatttttggtatttttggtagaaatggggtttygccatgttgcccaagctggtctcgaactcctgagctcaaatcatcgacccaccttggccttctaaagtgttgtgattacaggcgctcaagccactgcgcc

SEQ ID NO: 50928 - DNA, 201 bp, Homo sapiens
cctactctgccctgcccccctcccctgcagtcctgccccatgagtcagcttgaagccatggtctagagccagactggctgggtggcaggggagtgaatatagagcgtcttgttgacagggtgggaactgagagggctctggggttaataagcagatgccaggtatgctggggtcaagtagggcatcatgtcatcccctggc

SEQ ID NO: 50929 - DNA, 201 bp, Homo sapiens; identical to SEQ ID NO: 23704

SEQ ID NO: 50930 - DNA, 201 bp, Homo sapiens
aaccgctatataaaaaaaaataaagcaggataaatttagggcaggaaggtaaggcctctttatttatttatttatttatttatttatttatttatttatttttgagacggagtctcactcactctgtcacccaggctggagtgcagtggtgcgatcttggctcactacaacctccgcctcctgggttcaagtgattctcct

SEQ ID NO: 50931 - DNA, 201 bp, Homo sapiens; identical to SEQ ID NO: 23752

SEQ ID NO: 50932 - DNA, 201 bp, Homo sapiens
taaccgctatataaaaaaaaataaagcaggataaatttagggcaggaaggtaaggcctctttatttatttatttatttatttatttatttatttatttatttttgagacggagtctcactcactctgtcacccaggctggagtgcagtggtgcgatcttggctcactacaacctccgcctcctgggttcaagtgattctcc

SEQ ID NO: 50933 - DNA, 201 bp, Homo sapiens; identical to SEQ ID NO: 23706

SEQ ID NO: 50934 - DNA, 201 bp, Homo sapiens
ataaccgctatataaaaaaaaataaagcaggataaatttagggcaggaaggtaaggcctctttatttatttatttatttatttatttatttatttatttatttttgagacggagtctcactcactctgtcacccaggctggagtgcagtggtgcgatcttggctcactacaacctccgcctcctgggttcaagtgattctc

SEQ ID NO: 50935 - DNA, 201 bp, Homo sapiens; identical to SEQ ID NO: 23708

SEQ ID NO: 50936 - DNA, 201 bp, Homo sapiens
gataaccgctatataaaaaaaaataaagcaggataaatttagggcaggaaggtaaggcctctttatttatttatttatttatttatttatttatttatttatttttgagacggagtctcactcactctgtcacccaggctggagtgcagtggtgcgatcttggctcactacaacctccgcctcctgggttcaagtgattct

SEQ ID NO: 50937 - DNA, 201 bp, Homo sapiens; identical to SEQ ID NO: 23709

SEQ ID NO: 50938 - DNA, 201 bp, Homo sapiens
caaaagagaaggctgaccctgggggcagttggctttcaacttgacattcccctcaccctagtatgggctggaatagttagtgaagaccatcttatgcaccvgtggtttggggttttggtgttgggtgtgtgagcactgggggaggggcgtggagaggtactccctagttgcttccagctgactgactgctgcggccttatc

SEQ ID NO: 50939 - DNA, 201 bp, Homo sapiens
tggatcagactgcaagctaggggcacgaggcatcagttgggaagaggggacgcacagctaggcttgaggcctcttcatcggggtaagtaccagggagaagrgggggaagtgtgtccagtaagaagcctgagctaaacctgtcaccctctcaggagttctgagagtggtctctatattccattagtccatccagggatttgt

SEQ ID NO: 50940 - DNA, 201 bp, Homo sapiens
tgagaggtgggccacgactgtaagctgaacccagtaagggttgtgaggttccagccacagctaggggaggaagagggagtggctccccacactccaggctyggaagcactatcagaacaggctaggacctagttctcttgagggctcctctgcttccctgaggggatttgatggagtgctagagttctttttgcccctggg

SEQ ID NO: 50941 - DNA, 201 bp, Homo sapiens
aaaggcttgagttccacacagtggctaaatgagtgtgacagtgttgctaaaaggggccccaagccagcctcctcacacaaccacccaggagctgagagacyggctggggaggggggtgggtctgctgaggacagacaaagccctggggtagggtggggtaaaaaagggcaggctgaagccttttgaggaggagctgattgc

SEQ ID NO: 50942 - DNA, 201 bp, Homo sapiens
tttgactgggtctgaactgggctggggcccagtgactcagtgggagggtggatagttttgagggagctgtgagtcatggggttgagctccatcacaagagytgggctcatttcccccattctgggcagaagctctcctatcccacttccctgtatgctctgtctccttgaacatgggcctgtgagtagaaagagtgctggc

SEQ ID NO: 50943 - DNA, 201 bp, Homo sapiens; identical to SEQ ID NO: 23776

SEQ ID NO: 50944 - DNA, 201 bp, Homo sapiens; identical to SEQ ID NO: 23779

SEQ ID NO: 50945 - DNA, 201 bp, Homo sapiens
gctccccacccccacctctgttcctgattttcccttgtacaattaatctctctgcttctctcatctgggaaatttttctctccactctcaggactgctgcycagatgtctgggacttgcattctactttttttgagccctgctgtgtgcttacccctgtacttggggttggatggaggggtgggacacagatctgtcctca

SEQ ID NO: 50946 - DNA, 201 bp, Homo sapiens
atccttgcaaaggtttccatcctggtcatttaaagaataggaggacaagggttagggatgccggttctgctgccatttgatttgactgggtctgaactggrctggggcccagtgactcagtgggagggtggatagttttgagggagctgtgagtcatggggttgagctccatcacaagagttgggctcatttcccccattc

SEQ ID NO: 50947 - DNA, 201 bp, Homo sapiens; identical to SEQ ID NO: 23729

SEQ ID NO: 50948 - DNA, 201 bp, Homo sapiens; identical to SEQ ID NO: 23730

SEQ ID NO: 50949 - DNA, 201 bp, Homo sapiens
aatattcttagtgctggctgctcaactgcacagtaagtcacttgattttctttctgaggtctgagagacctagtgttattttttttttctctctctctctygagacagggtctggctctgttgcccaggttggagggcagtggtacagtcatggctcactgtaaccttgaaacctgggcttaagcaattctcctacttcag

SEQ ID NO: 50950 - DNA, 201 bp, Homo sapiens
acagggaattgggccttgggcctatgccatttctgttgtagtttggggcagtgcaggggacctgtgtggggtgtgaaccaaggcactactgccacctgccmcagtaaagcatctgcacttgactcaatgctgcccgagccctcccttccccctatccaacctgggtaggtgggtaggggccacagttgctggatgtttata

SEQ ID NO: 50951 - DNA, 201 bp, Homo sapiens
tcgttgtccccaggcttgcttggtagaacttaaggcctccctgagcctcaagggaggttgtctggcttacttaattccctggaaagttagcttatgctttrctctatactgttaatcatggtgaccattaataccatgtgccaggtattatgttaagcattttacattcattatctcccttaagacaataagcctctgaga

SEQ ID NO: 50952 - DNA, 201 bp, Homo sapiens
tgggtctgactatagagttcctgctcttaaccactcttctgtaagtctaagactatttttatttctctaacaactattcagcctccatttctattatgtcwtcttcttaggccattattttctgaccctggggcaggatcactcacttggggccttatagctgggacactgacgctcaaaataccaggagctgctggaatg

SEQ ID NO: 50953 - DNA, 201 bp, Homo sapiens
cgtcccaatcggttaattgttgatgaagccatcaatgaggacaacagtgtggtgtccttgtcccaggtaagctgtggccacagactagtctttccttactrcacttacttgagggattttcccaggtttcttttctcatttttcttgcagtgactgcagatagagtggggtttactgggaatcccaatctccagggctgct

SEQ ID NO: 50954 - DNA, 201 bp, Homo sapiens
aagctggcagatgatgtggacctggaacaggtgaagtgatgatgatggctgaccaggcgttacagtgtctctaggcagttgctgggaactggctagagacrtaaggttaagatgtgaggagatgggttttgatttctggacaggggaaaggaagtaatctgagattgaatccaggaaatgggagttggcatttttcatagt

SEQ ID NO: 50955 - DNA, 201 bp, Homo sapiens
atggcctaaagcagagggcacatgtgattgttatggcagcaaccaacagacccaacagcattgacccagctctacggcgatttggtaaggactccagatayttttgaccccgtccttgcttaggtcctacttctctccttcatctaagtcacctaatcctcttgaagcccttcacagtgattgggtccaggggtctttttc

SEQ ID NO: 50956 - DNA, 201 bp, Homo sapiens
gggtgggggcgcttgcccaggagagggaccaggggtgcgcccacagcctgctccattctccagtctgaacagttcagctacagtctgactctggacagggkgtttctgttgcaaaaatacaaaacaaaagcgataaaataaaagcgattttcatttggtaggcggagagtgaattaccaacagggaattgggccttgggcc

SEQ ID NO: 50957 - DNA, 201 bp, Homo sapiens
gctttatgacaagtgtgtgtaagttctataactactaccacagttgagacttaaaatttctactatctcaaaaagtttccttagccacttcagtcaacatytcccctccttaagccccatcactgatgtgatttctgtccctacagttttcccttttccagagtgcattgacaagtttttaagcagagcagtgactcaatt

SEQ ID NO: 50958 - DNA, 201 bp, Homo sapiens
gagctggtccaggtagggcaacttggtccagggtgagtcactgtctcagtacattgtaattgatctgggtgatctcagggtgtcaacacatttgctgcaakagttgtgagagcacgacttaggaacctactgttcttaggtttgaggcactaaggagtcttcttctagagaacctggatctgataccattgggtacaccat

SEQ ID NO: 50959 - DNA, 201 bp, Homo sapiens
cttggtccagggtgagtcactgtctcagtacattgtaattgatctgggtgatctcagggtgtcaacacatttgctgcaagagttgtgagagcacgacttargaacctactgttcttaggtttgaggcactaaggagtcttcttctagagaacctggatctgataccattgggtacaccatgaaataatggaggggatgctt

SEQ ID NO: 50960 - DNA, 201 bp, Homo sapiens
ccgaggtcatgaactctctagcagttactatggatgacttccgggtaaggaccacacccgtgcctcaggtacacacatacgtgctttgacccctcccttgrtaagtctcatccccagttttccctccttttctagtgggccttgagccagagtaacccatcagcactgcgggaaaccgtggtagaggtgccacaggtaacc

SEQ ID NO: 50961 - DNA, 201 bp, Homo sapiens; identical to SEQ ID NO: 23743

SEQ ID NO: 50962 - DNA, 201 bp, Homo sapiens; identical to SEQ ID NO: 23692

SEQ ID NO: 50963 - DNA, 201 bp, Homo sapiens
ttgccagcctgtctagagcaatgtcacccagtagaagtaaggaagttaaggaaattttcagagtgttaaagggttctgagtctaaaacatttgagaactaytggtctagagtgtagcttctcaatcttttcctagtgggaaagtgtttccatggaacacactgaagatgaagttactcattttcctagtgggtggcacaca

SEQ ID NO: 50964 - DNA, 201 bp, Homo sapiens
gcaaattggctggtgagtctgagagcaaccttcgtaaagcctttgaggaggctgagaagaatgctcctgccatcatcttcattgatgagctagatgccatygctcccaaaagagagaaagtaggagcttacctgaggggatagaggggggttgaaaggccctgacttcacttctgaccagacatcctgttctggcagactc

SEQ ID NO: 50965 - DNA, 201 bp, Homo sapiens
cactgcaacttctgcctcccaggttcaagcgattctcctgcctcagcctcccgagtagctgggactacaggcacatgccaccatgtccggctagttttttstattttttttttagtagaaacgtggtttcaccacgttagccaggatggtctcgatctcctgaccttgtgatgtgcccacctcggcctcccaaagtgctgg

SEQ ID NO: 50966 - DNA, 201 bp, Homo sapiens
aaggccgagaagagatggtcaggctccattctcagtctgaaccaagctccatgagggaaatcaaagtatgagagtgcagcaaacacagcaaggttttttttgttttttgttttttgttttttttttgagacgaagtctcactctgttgcccagactggagtgcagtggcacgatcttggctcactgcaacttctgcctccc

SEQ ID NO: 50967 - DNA, 201 bp, Homo sapiens
gggaggccgaggtgggcagatcacctgaggtcaggagttcgagaccagcctgaccaccatggtgaaaccccatctctagtaaaaatgcaaaattagccagktgtggtggcgcatgcctgtaatcccagctactcgggaggctgaggcaggagaatcacttgaacccgggaggtggaggttgcagttagctgagatcgcagc

SEQ ID NO: 50968 - DNA, 201 bp, Homo sapiens
ggcataccactcatctccagagccagagtccgggatggtaggcagaatggaggttttcctaggatacagctttgagattaaaatacaaactattgaccggrcacagtggctcaggcctgtaatcccagcattttgggaggccgaggcaggcagatcacttgaggtcaggagtttgagaccagcccgggcaacatggagaaa

SEQ ID NO: 50969 - DNA, 201 bp, Homo sapiens
ggcactactgccacctgccacagtaaagcatctgcacttgactcaatgctgcccgagccctcccttccccctatccaacctgggtaggtgggtaggggccmcagttgctggatgtttatatagagagtaggttgatttattttacatgcttttgagttaatgttggaaaactaatcacaagcagtttctaaaccaaaaaat

SEQ ID NO: 50970 - DNA, 201 bp, Homo sapiens
ttaattgttgatgaagccatcaatgaggacaacagtgtggtgtccttgtcccaggtaagctgtggccacagactagtctttccttactgcacttacttgarggattttcccaggtttcttttctcatttttcttgcagtgactgcagatagagtggggtttactgggaatcccaatctccagggctgctgcttactccccg

SEQ ID NO: 50971 - DNA, 201 bp, Homo sapiens
gtaaagcatctgcacttgactcaatgctgcccgagccctcccttccccctatccaacctgggtaggtgggtaggggccacagttgctggatgtttatataragagtaggttgatttattttacatgcttttgagttaatgttggaaaactaatcacaagcagtttctaaaccaaaaaatgacatgttgtaaaaggacaata

SEQ ID NO: 50972 - DNA, 201 bp, Homo sapiens
tgcagtgagctggcctgcctggaccttgttccctgggggtgggggcgcttgcccaggagagggaccaggggtgcgcccacagcctgctccattctccagtytgaacagttcagctacagtctgactctggacagggggtttctgttgcaaaaatacaaaacaaaagcgataaaataaaagcgattttcatttggtaggcgg

SEQ ID NO: 50973 - DNA, 201 bp, Homo sapiens
gtgggtaggggccacagttgctggatgtttatatagagagtaggttgatttattttacatgcttttgagttaatgttggaaaactaatcacaagcagtttytaaaccaaaaaatgacatgttgtaaaaggacaataaacgttgggtcaaaatggagcctgagtcctgggccctgtgcctgcttcttttcctgggaacagcc

SEQ ID NO: 50974 - DNA, 201 bp, Homo sapiens
tgccaggccaacttcatctccatcaagggtcctgagctgctcaccatgtggtttggggagtctgaggccaatgtcagagaaatctttgacaaggtgagctrcaataggctgaactatgtattgatttgcctgagggcaaggaatagaggctgtttttctttaagagggttgaaatattcttagtgctggctgctcaactgc

SEQ ID NO: 50975 - DNA, 201 bp, Homo sapiens
catcgggggcctagaggatgtcaaacgtgagctacaggagctggtccaggtagggcaacttggtccagggtgagtcactgtctcagtacattgtaattgayctgggtgatctcagggtgtcaacacatttgctgcaagagttgtgagagcacgacttaggaacctactgttcttaggtttgaggcactaaggagtcttctt

SEQ ID NO: 50976 - DNA, 201 bp, Homo sapiens
gggtctggctctgttgcccaggttggagggcagtggtacagtcatggctcactgtaaccttgaaacctgggcttaagcaattctcctacttcagcctcctkagtagctgggactataggcatgcgtcaccacatctggctaattttttattttttgtagagacaaagtctcagtatgttgcccatgctggtttcggatttc

SEQ ID NO: 50977 - DNA, 201 bp, Homo sapiens
cacagtaagtcacttgattttctttctgaggtctgagagacctagtgttattttttttttctctctctctctcgagacagggtctggctctgttgcccagrttggagggcagtggtacagtcatggctcactgtaaccttgaaacctgggcttaagcaattctcctacttcagcctcctgagtagctgggactataggcat

SEQ ID NO: 50978 - DNA, 201 bp, Homo sapiens; identical to SEQ ID NO: 23718

SEQ ID NO: 50979 - DNA, 201 bp, Homo sapiens
gacgaagtctcactctgttgcccagactggagtgcagtggcacgatcttggctcactgcaacttctgcctcccaggttcaagcgattctcctgcctcagcytcccgagtagctgggactacaggcacatgccaccatgtccggctagttttttgtattttttttttagtagaaacgtggtttcaccacgttagccaggatg

SEQ ID NO: 50980 - DNA, 201 bp, Homo sapiens
gaatggttagtgatttgagagggtttggggcaaatgaactttgatcactggctcttggagaatgctgtttagtggtgtgccatctggtgtgccatctctcytgctctagccagaggtcctagagcatttgctgtcacctttacagttcaactgtgagaagagtatagtgagtccctgggcttctctccagccttgcctggt

SEQ ID NO: 50981 - DNA, 201 bp, Homo sapiens
tagaggaatcctgctttacggacctcctggaacaggaaagaccctgattgctcgagctgtagcaaatgagactggagccttcttcttcttgatcaatggtragatatttggttcatcttatgtctagctagacccaattttgaactgggcttatgagctggagcacttatgaacacatcctttttgcacccatgccctcct

SEQ ID NO: 50982 - DNA, 201 bp, Homo sapiens
aactcttagaatataaaagccattcttgtatcaatggaccctgtaaaaacaaatctcaccatagtttgccagcctgtctagagcaatgtcacccagtagamgtaaggaagttaaggaaattttcagagtgttaaagggttctgagtctaaaacatttgagaactattggtctagagtgtagcttctcaatcttttcctagt

SEQ ID NO: 50983 - DNA, 201 bp, Homo sapiens
ggttcaagcgattctcctgcctcagcctcccgagtagctgggactacaggcacatgccaccatgtccggctagttttttgtattttttttttagtagaaaygtggtttcaccacgttagccaggatggtctcgatctcctgaccttgtgatgtgcccacctcggcctcccaaagtgctgggattacaggcgtgaaccacag

SEQ ID NO: 50984 - DNA, 201 bp, Homo sapiens
tgtctcaaaaaagaaaaagactgggtgttctttggagaactaaccatctttcagggatgagaaacctgccagctattcatttctgggcctaattgtttctyggatttacctaatgccaggaatttcaaaaaactagactgaacccaaaatatataagtgattgaaatcatttttgaagtaaagctgatggtggcttcaggc

SEQ ID NO: 50985 - DNA, 201 bp, Homo sapiens; identical to SEQ ID NO: 23783

SEQ ID NO: 50986 - DNA, 201 bp, Homo sapiens
gctctcaactgtcacattgagcatgcttggcctctagtgtgttgataagcattggaagagtctgcctactcagcagcattgtgcctggagtggcagacttktggaatgggggaagcaaatttgagcagaggaaactgtcgttagaaactagtttagaggcagtggttaaaaatgcagcctatgtgtgagggttagcagaag

SEQ ID NO: 50987 - DNA, 201 bp, Homo sapiens
gccttgggcctatgccatttctgttgtagtttggggcagtgcaggggacctgtgtggggtgtgaaccaaggcactactgccacctgccacagtaaagcatytgcacttgactcaatgctgcccgagccctcccttccccctatccaacctgggtaggtgggtaggggccacagttgctggatgtttatatagagagtaggt

SEQ ID NO: 50988 - DNA, 201 bp, Homo sapiens
agtaatttcacctcagaaattcttcttcacatcagaaatgtagtttgtgcattgaggctatctgattgatgtttatgcctctctgcttgggatatattcakgagaataaataatagaaacctctcccaatgaatgcagtctgtctgaattcattgatctttatgcagtggagatattctgcacaagccgctattttatggg

SEQ ID NO: 50989 - DNA, 201 bp, Homo sapiens
ctgaagagcatcccaccctgctcacggaggcacccctgaaccccaaggccaaccgggagaaaatgactcaagtaagtatgctaccccagcacacaacactstggggtctggggaaacttctgttagaaggaggctatgcagcacagcagagagaaggccggagctaggagtccaccaacagactaacagccttcagtgaac

SEQ ID NO: 50990 - DNA, 201 bp, Homo sapiens
acagacccagtggcaatgccgccagcagtgtcagccctataaccacagataagaactcttcagagactgtattttggtgacatgcaattgtgggttttagsggtaggtaatggacacaaatctcatattttacaggatgtaagtcaatctagttcataagaaaaattgagttactttatataaaatttgatctctatttat

SEQ ID NO: 50991 - DNA, 201 bp, Homo sapiens
tcctcccttccccccgaggaccgaggaaacccgtcgggtacaccaggaaccttggtcatcctgtagatccaaagtcttttgtgaaggagagcttcaatcastaggaagctggggcagttgggtctagtcagcttgagagaaaagagctaatactgggttcacttgagctagctggtgccaatattgtcctgtgtgcccagg

SEQ ID NO: 50992 - DNA, 201 bp, Homo sapiens
ataacacttaaacaagaatcttgactatgtaaaaaaacaggaagagttaagattaaaaaaaaaaaaaaaaaaaaaaacttctacatctttttaccactaaracttttgttcttttcccctttggtcctaatgtttaaaaaatgttgtcaaccaaattgtttttactaaattgcaataagttgattttaataactcccagct

SEQ ID NO: 50993 - DNA, 201 bp, Homo sapiens
tggcttgtttgtggtcttctccaaaggcttctgaaaggaagagtccctatgagtaatatacaggacaggctgctctaatcattggtgatgattcaaataaycaactcatcctagatttcctgggacttttaaggcactgaaagtctcatatcctcccttccccccgaggaccgaggaaacccgtcgggtacaccaggaacc

SEQ ID NO: 50994 - DNA, 201 bp, Homo sapiens
atttgaagtgcaaaatctttagacatctattttggggaaaatgtcaagaacatttttctatttggcattggttcaccaaattgagtccttgagagcctgatttttttttttttcaccaaagagtcaagccaaatgaaattccacccacgttagtcagggtatatttctgggtcctctcaatgtctggtttagttctagttt

SEQ ID NO: 50995 - DNA, 201 bp, Homo sapiens
gctactcgggaggctgaggcatgagaatcgcttgaacctgggaggtggaggttgcagtgagctgagactgtgccactgcactccagcctgggcgacagagygagactctgtctcataacaaaaacacacaagacatagaggtaaatatttatgtatgcaaatatatatacctgttaatatttggcctggcaaaaacagttt

SEQ ID NO: 50996 - DNA, 201 bp, Homo sapiens
tagatttggataggtaatctgtgaatctaatcatatagacattgtcacctcctggagaacatattatttcctacaggattaaagaaatgacatatgcaaakcacctagtacacacaataaatactaatttttacttttacattgcttttcctaaatgaagtgacttcacaagacaaattgataatttgggggtcacagttc

SEQ ID NO: 50997 - DNA, 201 bp, Homo sapiens
tgattttaataactcccagctatagtgtatatccatgactgtttatcctgcctttctccttcttcttccttctggtaatagtacttccaagttgtctttaraaaaactgtccctctcccctcttcttaactatttgatgtgagtggttcttttagtcagggttctctagagaaatagaaccaagagaatgaataaatggaa

SEQ ID NO: 50998 - DNA, 201 bp, Homo sapiens
gagccttggctaattgctggagtcactcagagaaagacttgcggggcatttgactgggctgtccatgttgtggctgcaacatgagaggctcacagacgttyctggaatggacagttaaccatatgaaaaagtacagatgttgcgccatagggctctgaaaagggagggccccttagtttttatttctcaagaggaaaacaa

SEQ ID NO: 50999 - DNA, 201 bp, Homo sapiens
ttttatttaaaccacacaaatatgttgaaaggaatggtttaaagggacagacatttaaaaataaacaaaaataagatatcagtaatatctaatgcttatawaatgtccagaacatttgtgtgtgtgtgtgtgtgtgtgttttttttttttttttttttttttttttgcataacctgttaacttatctaaaccttacaactc

SEQ ID NO: 51000 - DNA, 201 bp, Homo sapiens
tttgggcggaggaatctgaatgtcagacatgagttcagacattatttttgtcagtttttggatgtataaatattaagtggggaattctttatatatatatacacacacacacacacacacacttttttattatactttaagttctagggtacatgtgcacaacgtgcaggtttgttacatatgtatacacgtgccatgttg

SEQ ID NO: 51001 - DNA, 201 bp, Homo sapiens
ttgggcggaggaatctgaatgtcagacatgagttcagacattatttttgtcagtttttggatgtataaatattaagtggggaattctttatatatatatacacacacacacacacacacacttttttattatactttaagttctagggtacatgtgcacaacgtgcaggtttgttacatatgtatacacgtgccatgttgg

SEQ ID NO: 51002 - DNA, 201 bp, Homo sapiens
tccttcaggtcagcagagtgcccgtgttaccaacattcacagctggttttgggataaagttattgttgtcatggattcaggaaaacaaacatgttaattgctttatgagttttaaacccaagatgatcaaaaaccctgcatatagatttgtccagctcccatcgctgaaaggaatcacctgtattacatatgctggctaca

SEQ ID NO: 51003 - DNA, 201 bp, Homo sapiens
ttctttagtaaggggctctttgctcagcaatccctgggaaaatctgtgctttgcagaaacgcaggggaaagcatgatggtcacccttggatgctttgcttwatggcttgaccttgcaactatggttcaacctgtttgcccgaggacctctgttctgtgcattggcttttggtggtcgatatgttggtatacctaatgtgtt

SEQ ID NO: 51004 - DNA, 201 bp, Homo sapiens
actgggtaatttataaagaaaagaggtttaatttactcacagttctgcatggctggggaggcctcaagaaacttaaactcatggcaaaaggggaagaggcrtgtcttacatggcagcaggcgagagagagcaagcaagagcagggaaaactgccttataaaaccatcagatatcgtgagaactcactcactttcatgagaa

SEQ ID NO: 51005 - DNA, 201 bp, Homo sapiens
tgggtgcagcacaccaacatggcacatgtatacatatgtaacaaacctgcacgttgtgcacatgtaccctaaaacttaaagtataataataataaaatttaaaaaaaaaagaaaaaaaaatcctaaaatgtttctttaaaaaaaaatcccttgccaggcatggttgctcacacgtgtaatcccaacactttgggaggccaa

SEQ ID NO: 51006 - DNA, 201 bp, Homo sapiens
gtgacctgctgaatttttctctggaaagaaagagggagggagcagagcctgcatctgacagctgtgtgtgcctcccggccggatatctggtttgcatctcyctcagcttaaagctcccttcagcctggtgaggcaagtgtgactgtgcagccagccctgccaacccaggctgagtttcactgcaaatcaaggtttggcagc

SEQ ID NO: 51007 - DNA, 201 bp, Homo sapiens
atatgtgctttgtggggagacatatgtttcatggtcaaataatcttagaaaattctgggttactttaatttgaaaactttcttaatccaaaacttctcagrgcccttagtatgctaatgtcaaagggttgggtaattatatatactgttccccaaacttctttgcctttggaatcctttgaagaatctattgaatgaacac

SEQ ID NO: 51008 - DNA, 201 bp, Homo sapiens
gaaggaatatctttcttctttgcatgctaccgtggtagaagggttttaaaagtccgtgctaggcagaggcagccctttctgcccctttctgttctcagttyattaggaaatggcctgaaattccagcatgatagcaagctggcatcctctgtggaatgtgcaaaccatgcctgcatctgcccattaccctagctcagtgtc

SEQ ID NO: 51009 - DNA, 201 bp, Homo sapiens
gaagagctgtttcttgagatggaaacgtccaaagacctccttaaacagggtagtgactttgcctatgagtagagaaaaagttggtaggtgccttgatccargtacagtaaaacctttctttaggtatcatatcctgaattttaacattaagtataagggatttatggactgcttgaatattagaaacattgttctatctct

SEQ ID NO: 51010 - DNA, 201 bp, Homo sapiens
atggtaattttacacattatgtgtaaacaaagtattggtggcatcacatggtaaaaactcagtaatttcacctcagaaattcttcttcacatcagaaatgkagtttgtgcattgaggctatctgattgatgtttatgcctctctgcttgggatatattcatgagaataaataatagaaacctctcccaatgaatgcagtct

SEQ ID NO: 51011 - DNA, 201 bp, Homo sapiens
agaaaatatggaaattttgcttcacatgattcctgtgatgaaaattaatgaattaaccccaaatgcccaactttatgttgtactgtgtagattttatattktaacattctaatggccgtgttttctggttggtaaaagctagacaaatcccgagcagtatagagaaatcctgttatgatttagtcttaagctatttaaaat

SEQ ID NO: 51012 - DNA, 201 bp, Homo sapiens
tgccctcctaggacaagcagtgcatgagcagcagctcagagaatgaaaaccctcctttcattttcatcaggggctgcatggttatccctctcagtgcaatrtagctaaaggggcttgaaatgctgggagtagtcttaaacagcccattcttgaaaggttttcattaactcactctaaacatctaaattaaaaatgtttttg

SEQ ID NO: 51013 - DNA, 201 bp, Homo sapiens
tccccacccaagtctcatcttgaattgtagctcccataatccccatgtcatggaagtgacctggtgggaggtaattgaatcatgggggtgggtcttttctrtgctgttctcgtgacagtgaataagtctcatgagatctgatggtttcataaaggggcgttccagcttcatccatgtgcctttttgcaaaaaaaaaaatat

SEQ ID NO: 51014 - DNA, 201 bp, Homo sapiens
gatggttagttaataaatagcagagtcaggaattaaacttagatattcttgctcccaaggtcctgctctttctatgccatacccccttcccctaccctctrcccacgtacgtctaattatcctcaagttcaaggagataggaatatgtgctttgtggggagacatatgtttcatggtcaaataatcttagaaaattctggg

SEQ ID NO: 51015 - DNA, 201 bp, Homo sapiens
gtggcaatgccgccagcagtgtcagccctataaccacagataagaactcttcagagactgtattttggtgacatgcaattgtgggttttaggggtaggtartggacacaaatctcatattttacaggatgtaagtcaatctagttcataagaaaaattgagttactttatataaaatttgatctctatttatccttgtctg

SEQ ID NO: 51016 - DNA, 201 bp, Homo sapiens
ttgactacataaatgaagaaattgaggctcagatacattaagtaattctcccagggtcacacagctagaactggcaaagcctgggattgatccatgatctkccagcattgaagaatcataaatgtaaataactgcaaggccttttcctcagaagagctcctggtgcttgcaccaacccactagcacttgttctctacaggg

SEQ ID NO: 51017 - DNA, 201 bp, Homo sapiens
tggaaagaaactaaaataaaagtccaggtcacttaaccatacagggctgatgttagatgaaagcaagcatcgataccaaatgcaattttacataatattasctgtcaacaaaatatatttggacagccgcatggtaattttacacattatgtgtaaacaaagtattggtggcatcacatggtaaaaactcagtaatttcac

SEQ ID NO: 51018 - DNA, 201 bp, Homo sapiens
gcttgatgatttaacctcacgctccctactacctgggtggagcctgacatacaggccactacccacacctctgtgcatgtgcttgaactcaatttctggtrtcagatgggtctgggtttgaatccctgctctaccacttaccagctctggggccatgcaagttatttggcttatctgatcctccatttcctcatctgtaaa

SEQ ID NO: 51019 - DNA, 201 bp, Homo sapiens
ttctattttatatgttcatcttctgtctttgaaagttcaagaaacaagggctctgatacctgatttggttagtgtttgaaggttgccaagctgcgttgcakgtaataatttgggcttaggtaacgtggattgtcataaaatgcatgtaagcatgggttagtgctgaggaatagaatattgaaagtcaccagaattcagtat

SEQ ID NO: 51020 - DNA, 201 bp, Homo sapiens
gtgccacacactttgaaataaccagatttcatgtgaactcggaagaagagctcacttatcaccaaggagatgtcctaagccattcatgagagatccacccmcgtgatccaaacacctcctaccaggccccacctccaacacgggggattacatctcaacatgagatttggaggagatatccaaactatactaaattcttta

SEQ ID NO: 51021 - DNA, 201 bp, Homo sapiens
ctagtgtgctactatcatttaaggcccttcatgactgtggggtgtaatccattcctactcactcttaatagattctgacctatacaggcagaaaggtagtrtgggagagacctctgggaccataagatcaacacctcccactttagactcttctctacaacagccctaggagactacaccagccttagcttgactccttcc

SEQ ID NO: 51022 - DNA, 201 bp, Homo sapiens
ccttcctgcactacttccttcctgcactacttccttcctgtattacttcctttctgtactacttcctttctgtactacttccatgctcacattcctgaagsctaagaaaagtgtcctaaagcctaactgaccagggctggaaaacttggccaccaagatatgcagcaaattattaagtctcctaatttttcccactatgaa

SEQ ID NO: 51023 - DNA, 201 bp, Homo sapiens
taccattcaggacataggcatgggcaaggacttcatgtctaaaacaccaaaagcaatggcaacaaaagccaaaattgacaaatgggatctaattaaactamagagcttctgcacagcaaaagaaactaccatcagagtgaacaggcaacctacaaaatgggagaaaattatcttaaattttttaacaattcagtccacaca

SEQ ID NO: 51024 - DNA, 201 bp, Homo sapiens
gatgagggcttatatctttgagaaatgagagggtcacctggtatcttagtccattttcacattgctataaagacatacccaagactgggtaatttataaaraaaagaggtttaatttactcacagttctgcatggctggggaggcctcaagaaacttaaactcatggcaaaaggggaagaggcgtgtcttacatggcagca

SEQ ID NO: 51025 - DNA, 201 bp, Homo sapiens
cttctactcaaaagatatcctggtttctgaacattctgaataacacttaaacaagaatcttgactatgtaaaaaaacaggaagagttaagattaaaaaaamaaaaaaaaaaaaaaacttctacatctttttaccactaagacttttgttcttttcccctttggtcctaatgtttaaaaaatgttgtcaaccaaattgtttt

SEQ ID NO: 51026 - DNA, 201 bp, Homo sapiens
gcatctgtcactgcacttaccaccagtcttgtaggtgttgataggcttgtctctgttccacctttcagtagactgttagtgccatgaggaagaccctgggygtgccagccttgtgcacacactctgagcatctaatagacacaaaaagaagtgggataaggaggatggtatatgggcattctctgtattatctctgcaaat

SEQ ID NO: 51027 - DNA, 201 bp, Homo sapiens
cgaatgtgcttactgaagaatttctaaatccatggctccctctggcggtcctgccaagaacatgacacaattaggacacaattggcatctaacagacaagyctgtgtccctgctgaacaagaaactaggccatggtagaacatccaggctctgtcctaccgcactaacgactgcactaatgatgacattaatgaccattct

SEQ ID NO: 51028 - DNA, 201 bp, Homo sapiens
agtcactcagagaaagacttgcggggcatttgactgggctgtccatgttgtggctgcaacatgagaggctcacagacgtttctggaatggacagttaaccrtatgaaaaagtacagatgttgcgccatagggctctgaaaagggagggccccttagtttttatttctcaagaggaaaacaaagctaacaacttaagccaaa

SEQ ID NO: 51029 - DNA, 201 bp, Homo sapiens
gtgacggactggagttgagttagaatggacacggctgaacccagccctaaaagatcttcttctagtgttcaaaataagcccttgatctcatatttctagcagaacttttttctactgttttcctcttcctgttctttactttttttcatcttccccgagccctgtcccacctcacctctcctatcacatgccctgttttct

SEQ ID NO: 51030 - DNA, 201 bp, Homo sapiens
cttcttctagtgttcaaaataagcccttgatctcatatttctagcagaacttttttctactgttttcctcttcctgttctttactttttttcatcttcccygagccctgtcccacctcacctctcctatcacatgccctgttttctctttttaaataagaggctcggaaattccctctcccccaaggcttccctctacttg

SEQ ID NO: 51031 - DNA, 201 bp, Homo sapiens
acggggtaagcctccacccgggcaggagagggctcaccagaggtaggagggtccagatgcccagcatggttgttgagcaatcctccgaagtgaaagagctyccccaactccgtactgagcgggtccaccaacccgcgggagaagaggcagctccgcctgggcagccagggctggcctcagggtgtgttccgtgccagtgcc

SEQ ID NO: 51032 - DNA, 201 bp, Homo sapiens
attatattgactacataaatgaagaaattgaggctcagatacattaagtaattctcccagggtcacacagctagaactggcaaagcctgggattgatccaygatcttccagcattgaagaatcataaatgtaaataactgcaaggccttttcctcagaagagctcctggtgcttgcaccaacccactagcacttgttctct

SEQ ID NO: 51033 - DNA, 201 bp, Homo sapiens
ttcctagttggccattacaggatcatgggcatgtagctttacagttttctgatccctttcctaagataagacttgtgtaccgtgtcttaagtgtctgctaygatcttaatatgtctcccaaaattcatgtgttgggaacttaaaccctagggcaacagtgttgagagatgaggcctaatgggaggtgtttaattgataagg

SEQ ID NO: 51034 - DNA, 201 bp, Homo sapiens
gcatctgcccattaccctagctcagtgtctctgggcatttctgcagttgttctgaaggcttggcgtgtttatctcccacaggcggctgaaccgcctcccgyttcatgagcagaccagtggaatgcagtggaagagacccaggcctccggccacccagattagagagttttgtgctgaggtccctatatggttgtgttagac

SEQ ID NO: 51035 - DNA, 201 bp, Homo sapiens
ccgaactgctcattcaggttagagaggagctgtaaaccactgagctgactctttccggggacacagtgacttcttcaatgacagtgctccttttggacatyataacattcttcctagattttctttttctttttcttttttttttggccaagtaaaaaacatttttctgcattcttgctgatgctgagggccagtctcctt

SEQ ID NO: 51036 - DNA, 201 bp, Homo sapiens
ccagggctgttttcccatccattgtgggacgtcccagacatcaggtgaggaaaattatgattggaacataacaggacacagattaggttcctctgtgttcmtgtttatccccagattgtctatctctttctgcccagaagttatgtaaccttgttacaaatagacctctaatgattaaggtccaggagtaaatgccaattt

SEQ ID NO: 51037 - DNA, 201 bp, Homo sapiens
taaagcctagtaccttttcattgaaacctagcaaacaccatcagagaataaggacaaagggaagactgcatagaatgtcagaactagaagaaaactgagasgtgaattagcacaaagtcttcattttaggaaagattattgagattcagagatgtaaagatcttgtcctctttcataatagcatcttgatggcaaagtcag

SEQ ID NO: 51038 - DNA, 201 bp, Homo sapiens
attaatgaccattctttttcatcttgactgacagatcattgcccctccggagcgcaaatactctgtctggatcggtggctccatcctggcctctctgtccmccttccagcagatgtggatcagcaaacaggaatacgatgaagccgggccttccattgtccaccgcaaatgcttctaaaacactttcctgctcctctctgt

SEQ ID NO: 51039 - DNA, 201 bp, Homo sapiens
tcttaactatttgatgtgagtggttcttttagtcagggttctctagagaaatagaaccaagagaatgaataaatggaaagatagataggagttggctcacrtgattgtagaggctggcaagtccaaaactttagcattggccaacaggctggagacccatgaaaaagttatagttcaagtccaaaggccgtctgctggcat

SEQ ID NO: 51040 - DNA, 201 bp, Homo sapiens
cacaatgtccccatctatgagggctatgccttgccccatgccatcatgcgtctggatctggctggccgagatctcactgactacctcatgaagatcctgastgagcgtggctattccttcgttactactggtgaggcctgtgggagataagggggagaggggagcagtgtgttgctcagtaacttccaggaccatcctcac

SEQ ID NO: 51041 - DNA, 201 bp, Homo sapiens
acaacagcatcatgaagtgtgatattgacatcaggaaggacctctatgctaacaatgtcctatcagggggcaccactatgtaccctggcattgccgaccgratgcagaaggagatcacggccctagcacccagcaccatgaagatcaaggtactgttcagtgacagacccagtggcaatgccgccagcagtgtcagcccta

SEQ ID NO: 51042 - DNA, 201 bp, Homo sapiens
aggcttattttatgctccaaatttgaggcttgagacttgaaccctgccaatgttaaagtctccacttgcaatatgaagttgaataattgcattcctcctckgctccctacaaagaatcccaagatgcctctaaaaggttcctagagcctcagatataattaatagcctagaacttcagagagcagaagtctgaaaggtctc

SEQ ID NO: 51043 - DNA, 201 bp, Homo sapiens
agttaaagcttctactcaaaagatatcctggtttctgaacattctgaataacacttaaacaagaatcttgactatgtaaaaaaacaggaagagttaagatwaaaaaaaaaaaaaaaaaaaaaaacttctacatctttttaccactaagacttttgttcttttcccctttggtcctaatgtttaaaaaatgttgtcaaccaa

SEQ ID NO: 51044 - DNA, 201 bp, Homo sapiens
aagttcaaggagataggaatatgtgctttgtggggagacatatgtttcatggtcaaataatcttagaaaattctgggttactttaatttgaaaactttctkaatccaaaacttctcagggcccttagtatgctaatgtcaaagggttgggtaattatatatactgttccccaaacttctttgcctttggaatcctttgaag

SEQ ID NO: 51045 - DNA, 201 bp, Homo sapiens
attatcttcacaacttttctattctaatatgaaaagtttattttggaaaattgactctaaggtcttctccagggattgtaatttaggaggtgtttttaagrggaaagagagtcagctttgcatattattaatacactcctctgttgattctgatgcagtcaattcgtaggccatattttgggatccctggtctattctgaa

SEQ ID NO: 51046 - DNA, 201 bp, Homo sapiens
gtctaattatcctcaagttcaaggagataggaatatgtgctttgtggggagacatatgtttcatggtcaaataatcttagaaaattctgggttactttaayttgaaaactttcttaatccaaaacttctcagggcccttagtatgctaatgtcaaagggttgggtaattatatatactgttccccaaacttctttgccttt

SEQ ID NO: 51047 - DNA, 201 bp, Homo sapiens
gagatgttaatattaggggaaactaggtgtagggtacatgagaactctctgtattatcttcacaacttttctattctaatatgaaaagtttattttggaarattgactctaaggtcttctccagggattgtaatttaggaggtgtttttaaggggaaagagagtcagctttgcatattattaatacactcctctgttgatt

SEQ ID NO: 51048 - DNA, 201 bp, Homo sapiens
aaaaatgtcttgactaaataaaataaggtgagtgtaaaaaatttaaaattctcatgagattctagtcatccctttcctagtaagtcagacttactcctgasgagtaagaaataaactactttattcatcttattatctatgtaataagtactatacttggggacatggtaggcattaaataaatgtaagttccattcccct

SEQ ID NO: 51049 - DNA, 201 bp, Homo sapiens
ttattttaccagcatattcctgagagtcctcaggccttcaagggcaaagaaataaaattttaataatagaatttcaggcactccaacagatgttggagatrttttggacaaccatccttattcaaaccataccatataagttaaagcttctactcaaaagatatcctggtttctgaacattctgaataacacttaaacaag

SEQ ID NO: 51050 - DNA, 201 bp, Homo sapiens
gttaaagcttctactcaaaagatatcctggtttctgaacattctgaataacacttaaacaagaatcttgactatgtaaaaaaacaggaagagttaagattaaaaaaaaaaaaaaaaaaaaaaacttctacatctttttaccactaagacttttgttcttttcccctttggtcctaatgtttaaaaaatgttgtcaaccaaa

SEQ ID NO: 51051 - DNA, 201 bp, Homo sapiens
ggttgaatgtccttcttcctacctcctagcattcactacctctctgagttgtgagtagctagaaccagacctattcaggtagtctcagcactaactgaacrccctcctcaacaagcaggggcctaagctcctatgaagctggataaaagtgaaatggaagtcagaaaagggcacagcaatttgctgcattcaaaaggaact

SEQ ID NO: 51052 - DNA, 201 bp, Homo sapiens
tatctaccgtttcccccatccagcctctctctccctccctacagtgttcccttcccaggatatgatgcgtctcccactctgcccaccccactgcttgtggyactgttaacaaagcagctgttggattgaattgggaaatgtccctgttttgaccttggttcttcctctgtcctaggatcatacctcttcaatttgccttcc

SEQ ID NO: 51053 - DNA, 201 bp, Homo sapiens
aagagaggcctggctcagagagcatggaccacatcagccttttgaagttcccttagtgtattaaagcaaaacaaaaatcaacacaatattgaaccagtttkcaaacactgggatatcttatgttttcatatagcaaatagatgcatttaatacttagaacttaaatgcagaatcacatttggtgctagtgtcatttgccac

SEQ ID NO: 51054 - DNA, 201 bp, Homo sapiens
gaagagttacaggtgagaaaaacgaatgtgcttactgaagaatttctaaatccatggctccctctggcggtcctgccaagaacatgacacaattaggacamaattggcatctaacagacaagcctgtgtccctgctgaacaagaaactaggccatggtagaacatccaggctctgtcctaccgcactaacgactgcactaa

SEQ ID NO: 51055 - DNA, 201 bp, Homo sapiens
gtggctccatcctggcctctctgtccaccttccagcagatgtggatcagcaaacaggaatacgatgaagccgggccttccattgtccaccgcaaatgcttytaaaacactttcctgctcctctctgtctctagcacacaactgtgaatgtcctgtggaattatgccttcagttcttttccaaatcattcctagccaaagct

SEQ ID NO: 51056 - DNA, 201 bp, Homo sapiens
cagcatggttgttgagcaatcctccgaagtgaaagagcttccccaactccgtactgagcgggtccaccaacccgcgggagaagaggcagctccgcctgggyagccagggctggcctcagggtgtgttccgtgccagtgcccgcccctgaggctccagccaagtcactcgtaaaccgcttccctcactccccagaagcgtct

SEQ ID NO: 51057 - DNA, 201 bp, Homo sapiens
tctgtctggatcggtggctccatcctggcctctctgtccaccttccagcagatgtggatcagcaaacaggaatacgatgaagccgggccttccattgtccmccgcaaatgcttctaaaacactttcctgctcctctctgtctctagcacacaactgtgaatgtcctgtggaattatgccttcagttcttttccaaatcatt

SEQ ID NO: 51058 - DNA, 201 bp, Homo sapiens
ctagactgaaacatgcacactttctctctccatgataggctctggctagtcctgccctaaaagacttcagcatgagagaagagagactgttttccaacagsgtttgtgtttcttggatgccattctgatcagctcttaccccccttacttccacacaagagggaggtgaatgaagccagtagctgggctcactactgagtt

SEQ ID NO: 51059 - DNA, 201 bp, Homo sapiens
gtgtgatattgacatcaggaaggacctctatgctaacaatgtcctatcagggggcaccactatgtaccctggcattgccgaccgaatgcagaaggagatcrcggccctagcacccagcaccatgaagatcaaggtactgttcagtgacagacccagtggcaatgccgccagcagtgtcagccctataaccacagataagaa

SEQ ID NO: 51060 - DNA, 201 bp, Homo sapiens
ccacccaccccaaaaaatgttatggtacaaaaggatccgctactgtgtgcctttctctagctagctcattttattcttgttatgcatttcccagacaatgyatgctgagggcctactatgcatgagacactgtcctaggaacagaggtggttccctggtggccctactacgtcattatcattgtggattttggattgcaga

SEQ ID NO: 51061 - DNA, 201 bp, Homo sapiens
ctctttttaaataagaggctcggaaattccctctcccccaaggcttccctctacttgtccagcaagtaaccacatgccagctgccatggtgacttatcacrcccaattgtctcccaggcatcgtgctggactctggagatggtgtcacccacaatgtccccatctatgagggctatgccttgccccatgccatcatgcgtc

SEQ ID NO: 51062 - DNA, 201 bp, Homo sapiens
ggcctcctctgcccagaacaggtcaggcccctctgcatccatcaaccaggtgtgctctcctgaccattctttgtcagatgggcaccttcactaactcagcyctttggattgctttgcagattatgtttgagactttcaatgtcccagccatgtatgtggctatccaggcggtgctgtctctctatgcctctggacgcacaa

SEQ ID NO: 51063 - DNA, 201 bp, Homo sapiens
tagctcattttattcttgttatgcatttcccagacaatgcatgctgagggcctactatgcatgagacactgtcctaggaacagaggtggttccctggtggycctactacgtcattatcattgtggattttggattgcagaatattgaactgacacattttttgatggcacatgtcttgagggagagactgcagtagggcag

SEQ ID NO: 51064 - DNA, 201 bp, Homo sapiens
attttatgtgtggcccaagacaattcttagtcttccaatgtggcccagggaagctaaaagattggacacccctgtattacacattatattatcactataaytaattgataatagtaatgtatggttgggtcctaatcgggatgggacataagattcagtggctgggtcatttgaccttgcctcaaacttgaaagagacatc

SEQ ID NO: 51065 - DNA, 201 bp, Homo sapiens
ataaatttagcaatcttttcctcacaaaccttaaaatagccaagcattcaaagatttggaaaatgtagaggcagtatcattgtttgctcttgcttgagagtttttttttttttaatcgttgacagcattctggtttcactttcacttcagtgggtaatttaatgtgatactaatacaacctgtaataacagttaaatgcat

SEQ ID NO: 51066 - DNA, 201 bp, Homo sapiens
ttattttcttaaattccgggtcatattgactaagatcataatacagtgagataagggaactctttcttgcactgggtaagtctgctaagtaagaatttttrctgtttatgttcactcctctaagaatcatagctcacatagccatgcaaattggattgaaataaagataatctaattaagacagtgtggccataactccac

SEQ ID NO: 51067 - DNA, 201 bp, Homo sapiens
ttcctcacaaaccttaaaatagccaagcattcaaagatttggaaaatgtagaggcagtatcattgtttgctcttgcttgagagtttttttttttttaatcrttgacagcattctggtttcactttcacttcagtgggtaatttaatgtgatactaatacaacctgtaataacagttaaatgcatggagcacgaactacatg

SEQ ID NO: 51068 - DNA, 201 bp, Homo sapiens
gctttggttcagtagcagaaatgaatatgggtgttattcaaatgtctgtaaattaatgagggccctttgaggttagttcagcttaagcattttgaatctgmagaatgaatggtctatgttaaagatgcttttggggaatgggaagtggtgacaaacacaacattgcatcccaaacagagccaaggtgacagggtacctggc

SEQ ID NO: 51069 - DNA, 201 bp, Homo sapiens
tctataaatctgctctccattctgttctctgaggacataagcctgggatcctataatctaacaagaaaaagctatgataatattgatgaagatcattcctyactattcttctgtatttttgagacttcagtatcacattcccttcttaccctctgtccaagtgcttctgtgtggctcttgtttaaatgcagatctctaggc

SEQ ID NO: 51070 - DNA, 201 bp, Homo sapiens
accaaagagtcaagccaaatgaaattccacccacgttagtcagggtatatttctgggtcctctcaatgtctggtttagttctagttttaaaatttaagaaraatttaaagctctggagacatgtatttatgtaaatacacaaaacagaggcagggcacagtggctcatgtctgtaatcccagcactttgagaggtccaggc

SEQ ID NO: 51071 - DNA, 201 bp, Homo sapiens
ttcaccaaagagtcaagccaaatgaaattccacccacgttagtcagggtatatttctgggtcctctcaatgtctggtttagttctagttttaaaatttaaraagaatttaaagctctggagacatgtatttatgtaaatacacaaaacagaggcagggcacagtggctcatgtctgtaatcccagcactttgagaggtcca

SEQ ID NO: 51072 - DNA, 201 bp, Homo sapiens
tcattcgttcattcattcattcaacataaaggccttggcagagtttacaatttaacaacatccttgcaagagatatttactgagcccctcctatcccttargcactgtgctagatactgggatatgatggtgaacaatcagtgtcccttccctaggctggtgaggaagatgtatacgaatgaaataattgtatcaaatgta

SEQ ID NO: 51073 - DNA, 201 bp, Homo sapiens
ctgaaccccaaggccaaccgggagaaaatgactcaagtaagtatgctaccccagcacacaacactgtggggtctggggaaacttctgttagaaggaggctrtgcagcacagcagagagaaggccggagctaggagtccaccaacagactaacagccttcagtgaactcagggatcccaaaggacaggaacagcttgaaagt

SEQ ID NO: 51074 - DNA, 201 bp, Homo sapiens
aaaatgactcaagtaagtatgctaccccagcacacaacactgtggggtctggggaaacttctgttagaaggaggctatgcagcacagcagagagaaggccrgagctaggagtccaccaacagactaacagccttcagtgaactcagggatcccaaaggacaggaacagcttgaaagtacttgcatccttcctgcagggacc

SEQ ID NO: 51075 - DNA, 201 bp, Homo sapiens
ccagggctggaaaacttggccaccaagatatgcagcaaattattaagtctcctaatttttcccactatgaaaactggtatactaacctacctcttgagcartgactgaaaaagacaatgcattaaagaatgtttagactgtggcaactaaaaagcagacagcaattgggttagtagggtgaaaacatctgttctgtgggcc

SEQ ID NO: 51076 - DNA, 201 bp, Homo sapiens
tgacttcacaagacaaattgataatttgggggtcacagttcagatgaaaaaaagtaagttaaatggcttacaaccacttttcctgtactacttccttcctycactacttccttcctatacttcttccttcctgcactacttccttcctgtaccacttccttcctgtaccacttccttcctgcactacttccttcctgcact

SEQ ID NO: 51077 - DNA, 201 bp, Homo sapiens
tagattttgtcctgatttttgataggaggatcaaaaccatggcatttatgctgttctcgccccatctctcaggttatgtagacttgttaaaaaaaaaaagkcatcattaacaattaaaagagagggagagtgagagagaacagccctagtgtgagactctcacattctctttccccatacttcattagggttattgctgcc

SEQ ID NO: 51078 - DNA, 201 bp, Homo sapiens
tatagacattgtcacctcctggagaacatattatttcctacaggattaaagaaatgacatatgcaaagcacctagtacacacaataaatactaatttttamttttacattgcttttcctaaatgaagtgacttcacaagacaaattgataatttgggggtcacagttcagatgaaaaaaagtaagttaaatggcttacaac

SEQ ID NO: 51079 - DNA, 201 bp, Homo sapiens
catataagttaaagcttctactcaaaagatatcctggtttctgaacattctgaataacacttaaacaagaatcttgactatgtaaaaaaacaggaagagtwaagattaaaaaaaaaaaaaaaaaaaaaaacttctacatctttttaccactaagacttttgttcttttcccctttggtcctaatgtttaaaaaatgttgtc

SEQ ID NO: 51080 - DNA, 201 bp, Homo sapiens
atgctgaaagatcaaggttggtagagctatccaagttctggatgcatttggttcttaaattgaaccctggaccacccaaagttacccaactctacaaattyttagtttctgcttaagctagattcttacaactgaaaaaatcttaactgataaattatcagaactttgatcagtataataattcttttgttacaaaagtta

SEQ ID NO: 51081 - DNA, 201 bp, Homo sapiens
ttaaagcttctactcaaaagatatcctggtttctgaacattctgaataacacttaaacaagaatcttgactatgtaaaaaaacaggaagagttaagattaaaaaaaaaaaaaaaaaaaaaaacttctacatctttttaccactaagacttttgttcttttcccctttggtcctaatgtttaaaaaatgttgtcaaccaaat

SEQ ID NO: 51082 - DNA, 201 bp, Homo sapiens
taaagcttctactcaaaagatatcctggtttctgaacattctgaataacacttaaacaagaatcttgactatgtaaaaaaacaggaagagttaagattaaaaaaaaaaaaaaaaaaaaaaacttctacatctttttaccactaagacttttgttcttttcccctttggtcctaatgtttaaaaaatgttgtcaaccaaatt

SEQ ID NO: 51083 - DNA, 201 bp, Homo sapiens
agcttctactcaaaagatatcctggtttctgaacattctgaataacacttaaacaagaatcttgactatgtaaaaaaacaggaagagttaagattaaaaamaaaaaaaaaaaaaaaaacttctacatctttttaccactaagacttttgttcttttcccctttggtcctaatgtttaaaaaatgttgtcaaccaaattgtt

SEQ ID NO: 51084 - DNA, 201 bp, Homo sapiens
agctggcatcctctgtggaatgtgcaaaccatgcctgcatctgcccattaccctagctcagtgtctctgggcatttctgcagttgttctgaaggcttggcstgtttatctcccacaggcggctgaaccgcctcccgtttcatgagcagaccagtggaatgcagtggaagagacccaggcctccggccacccagattagaga

SEQ ID NO: 51085 - DNA, 201 bp, Homo sapiens
aaacagtcaactcatgctgagaggaaaccacactgagaggaaaccatgctgaaagatcaaggttggtagagctatccaagttctggatgcatttggttctkaaattgaaccctggaccacccaaagttacccaactctacaaattcttagtttctgcttaagctagattcttacaactgaaaaaatcttaactgataaatt

SEQ ID NO: 51086 - DNA, 201 bp, Homo sapiens
tcacggccctagcacccagcaccatgaagatcaaggtactgttcagtgacagacccagtggcaatgccgccagcagtgtcagccctataaccacagataaraactcttcagagactgtattttggtgacatgcaattgtgggttttaggggtaggtaatggacacaaatctcatattttacaggatgtaagtcaatctagt

SEQ ID NO: 51087 - DNA, 201 bp, Homo sapiens
aatggtcttaattcactttaatatattttacaaatggatcttagctttgctctaagctttctgttcatggtcttagaaattagccaggatctttcttattytaatagttaaatgcttttgaattacgtgaaaatcattagcaaaggaaaataaactgtaagaccatagttaactgaacatggtcttaacataatcaaatcc

SEQ ID NO: 51088 - DNA, 201 bp, Homo sapiens
ggccgggagcgcgacgaaggcccccactccgccggcggcgcgtccttgtccgtgaggtgcggtgttcacggccccgcgaccgatctgggtctcgcggaacmtcctgccccacgtcccctcctccctcctctccctccggttccttagggcggctttccccgcagcttcgacctcttcccctctgcccccagtgccttccct

SEQ ID NO: 51089 - DNA, 201 bp, Homo sapiens
atcagttaggacttaggttcatttgtggtcacagaaacccaaatcaccaacatgtgtttccttctgtcacatgcagttgtctgggcacgagcagctgtggwtggtgtggtggctcctcggggtcagcgtccagtctcccgctgtcatgctgctcggctgttcctagggtgtttctctcatctctggtctataatgggttaa

SEQ ID NO: 51090 - DNA, 201 bp, Homo sapiens
aataaagagcagtagtaataggtggagaatgacacattgtagaagatgtacagtaaatgaacactgcatacaacagcaaaaaaaaaaaatgtgaaagtagktttaaaaataatattgaactaaaatcccaaataacaataatataagttggggggggcagagcagggtatatagaataaagtgttccaaggatctcatata

SEQ ID NO: 51091 - DNA, 201 bp, Homo sapiens
ttggatttatttgcatttatagtagcctttgaaaagcatcaagcactgcgcagatataggtggcattttttcccctacattctagagtgttcctcccagcmcccacctccactctatacagcatcccctgctagtcctggacactctaatgtctcgaggtttctcaccaaaccagtgtccttcacttgccttttccaccat

SEQ ID NO: 51092 - DNA, 201 bp, Homo sapiens
gctactcaggaggctgaggcaggagaatctcttgaacccaggaggcagacgttgcagtgagccaagattccgccattgcactccagcctgggcgacagagrgagactcagtcacacacacacaaaataatgaaattttaaaaaattaaaaataaaaaacgaatgtctggaattgaagaagaaagtcttatggttatttatg

SEQ ID NO: 51093 - DNA, 201 bp, Homo sapiens
cttttgtatgtttatcagggatctgtttatatctacacttttggtaaggagccaaccttaaataaagtcctagatgcttgtgatgggaaatttcaggcaaytgactttatcacacctggaacccaatacttcatggtaaagaatattttactgtgtcacagtaggactaaagatacgatgatgttgcaagatttaaatccc

SEQ ID NO: 51094 - DNA, 201 bp, Homo sapiens
tgactttatcacacctggaacccaatacttcatggtaaagaatattttactgtgtcacagtaggactaaagatacgatgatgttgcaagatttaaatcccyatttatatgttattgggtaactttgaaagttcatgggcaaagcaatgcgaataggaggcagaggctgtccttgaagactgtggtggagatgccagacact

SEQ ID NO: 51095 - DNA, 201 bp, Homo sapiens
tgtcacagtaggactaaagatacgatgatgttgcaagatttaaatccctatttatatgttattgggtaactttgaaagttcatgggcaaagcaatgcgaayaggaggcagaggctgtccttgaagactgtggtggagatgccagacacttccatcttcaaatctaccccccggttagaatgataccctcatattgtgactt

SEQ ID NO: 51096 - DNA, 201 bp, Homo sapiens
taatagttaatatttgctcagaaacaaagcattggcgttgaaatgataaaataagtatttataatccacgtaagtaaaatgaaattttatactaaatcatyggcacactggaaagggaggtagaacatgcttccataggaaagtcttattttccatgtagagtttttgtttttctttttttacagacacttacatattcag

SEQ ID NO: 51097 - DNA, 201 bp, Homo sapiens
gggaaggtctatgatgcaacaaaaataaagagcagtagtaataggtggagaatgacacattgtagaagatgtacagtaaatgaacactgcatacaacagcaaaaaaaaaaaatgtgaaagtaggtttaaaaataatattgaactaaaatcccaaataacaataatataagttggggggggcagagcagggtatatagaata

SEQ ID NO: 51098 - DNA, 201 bp, Homo sapiens
gaacaaagatgcttcttctttccagaaggttcagtaaatgtcttgcaatgtcttaataacatctgtgaactaatcatatgcacaggggatgagaaatgcawttaagtgcataattaatgcacaaactcagccctggaaatgggagttagattcattccactcatccctgaagataggggagggatagtttctcagtgaata

SEQ ID NO: 51099 - DNA, 201 bp, Homo sapiens
acatacacatatacacacacttcccacagaggttttcaattttacaaaaagcccactcaattgggagactgtgtgcattctaataaggcaggacacctggstgcttcatctgaagtttgtcaccacatatgggatccttgggcaagctgctggacttccttggcctgtgttttctattttgcaaaatgatctcttatgttc

SEQ ID NO: 51100 - DNA, 201 bp, Homo sapiens; identical to SEQ ID NO: 27694

SEQ ID NO: 51101 - DNA, 201 bp, Homo sapiens
aagtgggacagaggcaataattaaagagatattgactggggatttcccagaattgcttaaagacatgaatttacagatttaagaggtccagtgaatcccamacagaatacataaaatgatatccacacttagacttaccagagtgaaactgttgaaaaccaaagacagagaaaattttaaaagcagtcggagaaaagacag

SEQ ID NO: 51102 - DNA, 201 bp, Homo sapiens
cgacgaaggcccccactccgccggcggcgcgtccttgtccgtgaggtgcggtgttcacggccccgcgaccgatctgggtctcgcggaacctcctgccccamgtcccctcctccctcctctccctccggttccttagggcggctttccccgcagcttcgacctcttcccctctgcccccagtgccttccctcagcctccctc

SEQ ID NO: 51103 - DNA, 201 bp, Homo sapiens
ttacttgagagtatgttctttttgtgtgctagcctttcattcacgtcgacttcattccttttattttctacgtttatctgtatttttaaatctaaaatatrgccacatactcttcatctgtgtaaataagcaattttcctactctgctaacaaccacaaagcaggctgtcctatgcaaagttgttttttaaagtttatttt

SEQ ID NO: 51104 - DNA, 201 bp, Homo sapiens
atctaaagttggtcatcttcaattgtggggggaaacgtctgtttagcaagcatttaaaaatcattaagatctctgcctacagaaaaactagtttttgtagygaatgctcaataaatacattttttctttgttgattagactatgctaaatatattcaataaatgacaaaagcaaaattttaggattatattatggtcaatt

SEQ ID NO: 51105 - DNA, 201 bp, Homo sapiens
acaaatggatcttagctttgctctaagctttctgttcatggtcttagaaattagccaggatctttcttattctaatagttaaatgcttttgaattacgtgraaatcattagcaaaggaaaataaactgtaagaccatagttaactgaacatggtcttaacataatcaaatcctgataatggattttatattttaggcaaca

SEQ ID NO: 51106 - DNA, 201 bp, Homo sapiens
tcttttttttttttttttttttttttgagacggagtctcgctctgtctcccaggctggagtacagtggcgcgatctcggctcactgcaagctccaactccygggttcacgccattctcctgcctcagcctcccgagtagctgggactacaggtgcacaccaccacgccctgctaattattgtatttttagtagagacgggg

SEQ ID NO: 51107 - DNA, 201 bp, Homo sapiens
ttctggtagttcatatacagggagtgacacagtgtatattcttttgtcgggcttctttcatgcaacataattattttgaaattatcttatgttgctgcatrtatgtgtcagtagtcattcctttctattccatggtatggatataccatactttattcacctgttgatggatgtactgtattagcttgctagggcttctgt

SEQ ID NO: 51108 - DNA, 201 bp, Homo sapiens
ttccatggtatggatataccatactttattcacctgttgatggatgtactgtattagcttgctagggcttctgtaacaaagtatcacaaactgagtgtctygaataacagaaatgtattatctcacagctctggatacacaggataggaagcagctgggagagatgacaagtgcataaattctgatagttccaaaagcaga

SEQ ID NO: 51109 - DNA, 201 bp, Homo sapiens
cagctctggatacacaggataggaagcagctgggagagatgacaagtgcataaattctgatagttccaaaagcagaaggctccaattgtccttactaagarcaatctgtaaatattaaaaaagcagtgaagtggaatgagcacaaatgtgttagtgtaacagacttagacctgaatcctggctccacaaattactagctgt

SEQ ID NO: 51110 - DNA, 201 bp, Homo sapiens
ggttggtaaacgatggcccataggccaaatctggcccaccacctgtttttgtaaagttttgttggaacatgtttatttgcttatatattatctatggctgsttttgctctatgatggcagacttgagttgtaatagagcccatatatggtctgcaaagctaaaaagattaactgtctggtcctttatagaaagagcttgcc

SEQ ID NO: 51111 - DNA, 201 bp, Homo sapiens
tcagaatctgcattttaacaaaattcccaggtgattcatatgcacattaaactttgagaagcactgggctagaagactattgcctttttcagagcaatgayttttttttctttcctaatatttgttgaaaatccaggtgaattgatgtttgtatagcttctaaagtcaagtctctgagcctcaatttcctcattcatgaaa

SEQ ID NO: 51112 - DNA, 201 bp, Homo sapiens
acaatgtgctatacaccagcaataccaccaccagcagtttcatcagagaggcattcactgagatttccaatgggttagtgcatttaatccctgcctccccmctgcagcaacccccatgagacatctatgatggtcctcattttaaagaaagagactgaaacttcagagagatgggatgttaaaggagaattttcaaacaga

SEQ ID NO: 51113 - DNA, 201 bp, Homo sapiens
atgaaattgatactactattatctctccacatgaggcaattgaggcgaagcgaggctaagtacttgttcaaggccatgcatctagttagtggcagagcccrgttaaggaagtccagtttcagggcgtgtgctcttatccacaatgcacaaactcatgctgcagttacagaaagagaaaagagggcacaaccacgagtgatg

SEQ ID NO: 51114 - DNA, 201 bp, Homo sapiens
taaattttattttgcttttcataattgttcataattttaaaaaaacaaaattaatttatggtacaagtgatttctcttctttttccaaatctaatagtttycacaacctttgctgatgaaagaggaaggctgaaagatgaaatcattcataagtacctgtatgagttggagcacgctctgtcctctgcagtcttgggcttt

SEQ ID NO: 51115 - DNA, 201 bp, Homo sapiens
agagcccagttaaggaagtccagtttcagggcgtgtgctcttatccacaatgcacaaactcatgctgcagttacagaaagagaaaagagggcacaaccacragtgatggaattggtaggacttggtatttgatgcgaaaggaagggataagtgatgactccaaaatttctagcctgaatggtggaagtttgcaatgccatt

SEQ ID NO: 51116 - DNA, 201 bp, Homo sapiens
ggccacatactcttcatctgtgtaaataagcaattttcctactctgctaacaaccacaaagcaggctgtcctatgcaaagttgttttttaaagtttatttwaaaaaatcaaactaattataaaagaatggcccaggatgccactgtgttgagatcaagctcttttctctgttattttcactttttgtcttccaagtataga

SEQ ID NO: 51117 - DNA, 201 bp, Homo sapiens
cctgtatgagttggagcacgctctgtcctctgcagtcttgggctttcaaagtaaccaaatatatggcttctgtagtcaagtgccatacatctgtagctacyttcttcctgaagaagtatgtcaacacttaagtgtgctctcatttatcttagcaatcaagattgatacattatactgattagatgtgatcctcttgaccac

SEQ ID NO: 51118 - DNA, 201 bp, Homo sapiens
gataaaatggtcaatataacgtaaataaaaaaccaataggaggcaacactatgatccaattccatttaaaaatggattatcatatattatatatatatgaygagacagagtcttgctctgtcccccaggctggagtgcagtggcgcagtcttggctcactgcaacctccacctcccaggttcaagcgattcgcctgcctca

SEQ ID NO: 51119 - DNA, 201 bp, Homo sapiens
tatcacctactagcttccgcaatattagttgagcatttaaattttattttgcttttcataattgttcataattttaaaaaaacaaaattaatttatggtayaagtgatttctcttctttttccaaatctaatagtttccacaacctttgctgatgaaagaggaaggctgaaagatgaaatcattcataagtacctgtatga

SEQ ID NO: 51120 - DNA, 201 bp, Homo sapiens
tttacagatatccacagtgtctcttttagaaacagacatagtggaagtgatggtgctttcctcgcttccagaagcagggagaagcaggttggagatgttcrcactgcctacattactgccacaaggtaaggaaaacataagcagccagttctgctcctgagcccagatacattgttgttattgttttttgggtttgttttg

SEQ ID NO: 51121 - DNA, 201 bp, Homo sapiens
gtttcaccattttggccaggctggtcttgaactcctgacctcaggtgatccacccaccttagcctcccaaagtgctgggattacaggcatgagccaccgcyctaaaatttttttaaaacagctttattgaggtataactaacagataatgaactgttcatatataaggtaaatactttgataagttttgatttatgtataa

SEQ ID NO: 51122 - DNA, 201 bp, Homo sapiens
gcctgccatagcaaagtaccacagactgggtggcttaaacagcatgcgtatattgcctcccagttctggagactagaattctgagatcaaggtctcagcarggttggttcctactgagggctgtgagagagaatctgcccccgcgcctctcaccaacttctgctcacttgtttgctggcagtccttggcttacagacacat

SEQ ID NO: 51123 - DNA, 201 bp, Homo sapiens
ggaggctgaggtgggcaaatcacgaggtcaggagatcgagaccatcctggctaacacggtgaaatcccatctctactaaaaatacaaaaaattagctgggyatggtggcaggtacctgtagtctcagctactcgggaggctgaggcaggagaatggcgtgaacccgggaggcggagcttgcagtgagctgagattgcgcca

SEQ ID NO: 51124 - DNA, 201 bp, Homo sapiens
ttgctagggcttctgtaacaaagtatcacaaactgagtgtctcgaataacagaaatgtattatctcacagctctggatacacaggataggaagcagctggragagatgacaagtgcataaattctgatagttccaaaagcagaaggctccaattgtccttactaagaacaatctgtaaatattaaaaaagcagtgaagtgg

SEQ ID NO: 51125 - DNA, 201 bp, Homo sapiens
acacattattaccttggaagaattgcataaggcttatgacttgaaaaaaaattctttttggaaacacaagcatttctttcctttttttttttttgagacasagtctcactctgtcacccaagctggagtgcagtggtgcgatctcggctcactgcaacctctgcctcccgggttcacgccattctcctgcctcagcctccc

SEQ ID NO: 51126 - DNA, 201 bp, Homo sapiens
cctcccgagtagctgggactacaggcacccgccaccacgcccagctaattttttgtatttttagtagagacggggtttcaccgtgttagccaggatggtcycaatctcctgacctcatgagccgcccgcctcagcctcccaaagtgctgggattacaggcgtgagccactgtgcccggccttggaaacacaagcatttctt

SEQ ID NO: 51127 - DNA, 201 bp, Homo sapiens
agtccaagtacagtgagcgtgtggaccattgaaagaagtaaccaggagcattgtttcagagcaaggtaggagcctttgttacaacagtagcaacatggtgstctttgtttgcattcgtgtaatgtgattgggtcaatttgatgaattaagtggctttatacatacatatatatgcatacacacacatacacacacatacgt

SEQ ID NO: 51128 - DNA, 201 bp, Homo sapiens
ggggtttcaccgtgttagccaggatggtctcaatctcctgacctcatgagccgcccgcctcagcctcccaaagtgctgggattacaggcgtgagccactgygcccggccttggaaacacaagcatttctttaagaatgaccaggtgttgccatatgtatttacggcgcaagcaagtgttgtctaagcagtttctctgtttg

SEQ ID NO: 51129 - DNA, 201 bp, Homo sapiens
gggaggagggggccttgccaagacaagctcctcaaacctgtccaaagcactctctatttcaattgctcttactatttcacaccttgatttctgtaacaacyttaggatggacttcactgaccttaatctacatctgacccaatctatgcagtttatctctgtcaaattgcctctttgaaggccacttttaacacccagctc

SEQ ID NO: 51130 - DNA, 201 bp, Homo sapiens
ataaatgatcaattggcatcgatgagaacagtacccccagatccatatggagtactcacatgtagtacttacagattcaggcacttacacttgttttgtarcaaatgtgatgatatatttcattttctaggtttggctgagttaaattgcaaaattattaaagaagataaaatagccttggtatagcatatgacagtatag

SEQ ID NO: 51131 - DNA, 201 bp, Homo sapiens
gctcaatgttgcctaccatttgaattattagtgtttattttatttattttattttaacagagtctggctctatcacccaggctggagtgcagtggcatgaycttggctcactgcagcctccacctcctgggttcaagtgattctcctgccttggcctcccaggtagctgggattacaggtgtgcgccaccatgctcggctt

SEQ ID NO: 51132 - DNA, 201 bp, Homo sapiens
cagatatggcctaagataatagaaataaggaagtaagctagaattattacaacttcccaagatatttaaagatgtctgaataactattctaattacaatgkctcatatatttatgagattattcttgggtcatttcagaccatgctgggacatacatggtgcggtatgctcagttctgcattgaagtctagagacagtaac

SEQ ID NO: 51133 - DNA, 201 bp, Homo sapiens
tgctagggcttctgtaacaaagtatcacaaactgagtgtctcgaataacagaaatgtattatctcacagctctggatacacaggataggaagcagctgggrgagatgacaagtgcataaattctgatagttccaaaagcagaaggctccaattgtccttactaagaacaatctgtaaatattaaaaaagcagtgaagtgga

SEQ ID NO: 51134 - DNA, 201 bp, Homo sapiens
tgaggtgctgggggttaggatattaacacgggaatttgggggaggcacagttcaacccatagcaatacctaaaggatgaacaggaatcagccttgtgacgrgaagaaagaacatcctaggcagaggaatggcatgtgcaaaggccatgaagtagaaaaagcacagcaggtttcaatgaaaaggtcatgataacgggaacaa

SEQ ID NO: 51135 - DNA, 201 bp, Homo sapiens
ccaaagtgctgggattacaggcgtgagccactgtgcccggccttggaaacacaagcatttctttaagaatgaccaggtgttgccatatgtatttacggcgsaagcaagtgttgtctaagcagtttctctgtttgcttgtcatagcgacatttagaaactcgaacatgctttcatttatgtaaatagtttatgaagctttga

SEQ ID NO: 51136 - DNA, 201 bp, Homo sapiens
taaagaagataaaatagccttggtatagcatatgacagtatagtgtttttaaaacatagtttttttgctttcttaggatacaatacaatgataagcataaktatttataaatttgacattaaggtcattgattatataaattgtatcataaattatatcccaatttatgtaaattaaaaaatagataaatgttctaaatac

SEQ ID NO: 51137 - DNA, 201 bp, Homo sapiens
tgaatcattacaaaatgtggtaattattacaacagaataaatggagacagggcagcaaggatgggatgggctggttaaggaaggcctctggggagatgacrcttaagctaagatttgaaggacaaggaggcattactcatgttacaagcaggataaagagtgtttcctttgggaggccgagacgggtggatcacgaggtca

SEQ ID NO: 51138 - DNA, 201 bp, Homo sapiens
taggacttgtgcactcagtgtattttaaatttttctgaaagcagaaatgtaatattatagtttgacaaccctaaatcattcatggattattaataaagccrtatattttgtatttaagttagacattttcccagtagtttactttttcattttgtagcaaaataaagtgaggaaaatgtttaaaacattaattaatgtctg

SEQ ID NO: 51139 - DNA, 201 bp, Homo sapiens
atgtgtgttcttttatcttagaaattgggggcagaaaggacatgaaaatagaaatgtttcaaagattttgatgaccctttgctttgttaaaaaaaaaaaaktatttgaaatgtattatattgatgttgacatatcttttcccaaagatgggtgcaaggattccctaagcagaatgttcattttgtcaacgacaacaccatt

SEQ ID NO: 51140 - DNA, 201 bp, Homo sapiens
tttaaataactaaagttacttaggagaattctcacattatattttgatgtatttggaatattagagttatctgcttggtacatagttggtgctaaataaaytttcttgaatcaattattaaatacattaatgaaatggctgaacatttctaatattaacatacagagaagttgggttgatttctcttgaaaatatttttta

SEQ ID NO: 51141 - DNA, 201 bp, Homo sapiens
attaattaaaatggtttcctctttgggtactattaaaaaggatttattatgaatagcttcaaatctatacaaaatagaggggacgatataatgaactaccrtatattactgcaaacaaacacaaatagaatttaaaaatccattgcccttccgcaatgaaaaaatacctaatatctgtaacccaattccatgctcatttct

SEQ ID NO: 51142 - DNA, 201 bp, Homo sapiens
atcttggctcactgcagcctccacctcctgggttcaagtgattctcctgccttggcctcccaggtagctgggattacaggtgtgcgccaccatgctcggcttttttttttttttttttatgtttttggcagaggatggggttttaccatgttggccaggctggtctcgaactcctggcctcaagtgatccacccacctccg

SEQ ID NO: 51143 - DNA, 201 bp, Homo sapiens
acaaaatattccagaaatgattaaaggataacatactaacatttcttatacaaaaatgtaagtacctagattcagggagccacatttagtttatgtaaatttttttttttttttttttttttgagatggagtctcactctgtcccccaggctggagtgcagtggcacgatctcagctcactgcaacctccatctcccaggt

SEQ ID NO: 51144 - DNA, 201 bp, Homo sapiens
cttgctagggcttctgtaacaaagtatcacaaactgagtgtctcgaataacagaaatgtattatctcacagctctggatacacaggataggaagcagctgggagagatgacaagtgcataaattctgatagttccaaaagcagaaggctccaattgtccttactaagaacaatctgtaaatattaaaaaagcagtgaagtg

SEQ ID NO: 51145 - DNA, 201 bp, Homo sapiens
aacatgtttatttgcttatatattatctatggctgcttttgctctatgatggcagacttgagttgtaatagagcccatatatggtctgcaaagctaaaaasattaactgtctggtcctttatagaaagagcttgccaacccctatcctagaggtgtttatactcagtacatttcattcatttacattaacttcctggcccc

SEQ ID NO: 51146 - DNA, 201 bp, Homo sapiens
agctgggcatggtggctcacgcctgtaatcccaacactttgggaggccaaggtgggcggatcacctgaggtcaggagttcgagaccagcctggccaacatrgtgaaaccccatctctactaaaaatacaaaaattagccagagtggtggtgggtgcctgtaatcccagctactcaggaggctgaggcaggagaatcacttg

SEQ ID NO: 51147 - DNA, 201 bp, Homo sapiens
gcttgagaaggaaggacaaacacattattaccttggaagaattgcataaggcttatgacttgaaaaaaaattctttttggaaacacaagcatttctttcctttttttttttttgagacagagtctcactctgtcacccaagctggagtgcagtggtgcgatctcggctcactgcaacctctgcctcccgggttcacgccat

SEQ ID NO: 51148 - DNA, 201 bp, Homo sapiens
cagtggcgggcacctgtaatcccagctactcaggaggctgaggcaggagaatctcttgaacccaggaggcagacgttgcagtgagccaagattccgccatygcactccagcctgggcgacagagggagactcagtcacacacacacaaaataatgaaattttaaaaaattaaaaataaaaaacgaatgtctggaattgaag

SEQ ID NO: 51149 - DNA, 201 bp, Homo sapiens
tgaaataaggaaattgtatgaatatttaaaatgcctggaacactaaagtaatgatatttcaaaaagaaagaaaaagaaagaaagaaagaaaagaaaagaaaaagaaagaaagaaaaaaatgcaaggcttggaaggtgcacacatgactgccactaacattcattgactggctcggccataagccacagccagcttcaaggg

SEQ ID NO: 51150 - DNA, 201 bp, Homo sapiens
cagtcggagaaaagacagattacttctaaggaatttcagttagactaatagctgacttctctgtggcaataatgtaagaaatagtggaataatatcttcartgtagtgcagggttcagcaaattgtggctccatggggcaaaactagcctgctgcatgtttttcaaataagattttattggaacatagccacacccactaa

SEQ ID NO: 51151 - DNA, 201 bp, Homo sapiens; identical to SEQ ID NO: 27699

SEQ ID NO: 51152 - DNA, 201 bp, Homo sapiens
cgcgccaggctaattttttgtatttgttagtagaaacggggtttcaccatgttagccaggatggtctcgatctcctgacctcatgatccgcccgccttggmctcccaaagtgctgggattacaggcgtgagccaccacgcctggcctttttttgtttgtttgtttgtttgttttgttttgttttgttttttagtagagaaa

SEQ ID NO: 51153 - DNA, 201 bp, Homo sapiens
tctatgtttaaacccaaatataaaaagatggaaaaagatatgtaaacattaaccaaaagaaaaccagtggaaatatattaacattagacaaattaggcttyaaggtaaaaatcattactaaagataaatgggcttatttcagaataataaaatattaaatttaccaggaatatatgaatacttaaaatatgtatgtaccta

SEQ ID NO: 51154 - DNA, 201 bp, Homo sapiens
gaaataaggaaattgtatgaatatttaaaatgcctggaacactaaagtaatgatatttcaaaaagaaagaaaaagaaagaaagaaagaaaagaaaagaaaaagaaagaaagaaaaaaatgcaaggcttggaaggtgcacacatgactgccactaacattcattgactggctcggccataagccacagccagcttcaagggt

SEQ ID NO: 51155 - DNA, 201 bp, Homo sapiens
ttaagcccttcagggtcaaggtcttactgagttgatctgtgatttcccatattctgtttccacatagagccttggttacagtaggcatttaataaatattygttgaactatatacacaacaattacaatgtgtttcttttcttttgtatgtttatcagggatctgtttatatctacacttttggtaaggagccaaccttaa

SEQ ID NO: 51156 - DNA, 201 bp, Homo sapiens
tatttagcttaagtttggaaatcgggatatgtagttcaaggcttaatgatagaattctgatcttgaaatcatggtagctgatgagatggctcaacagagtrgaagtaaacctggatgcttaataaggcaaaagaggtaactaaatatgcaaattagatggcactgagtgtggtacagcctgtggctgacctcagagtggat

SEQ ID NO: 51157 - DNA, 201 bp, Homo sapiens
aagtaatcaataagccttagcttgtctgatgaggcaagtatactatgcattgactaagactgattttctatgtttatctcactcatctctaggatggcttygtgtattcttttattattaaagatagaagttacatgatcgaggattttcttgagattgaaagacctgtagaacatatgacattttctcccaattatacag

SEQ ID NO: 51158 - DNA, 201 bp, Homo sapiens
tggtcttgatctcctggagtcaagcaatcctcccacctcagcctcccaaagtattgggattacagacatgagccactgttccctgccccatttttaatgtrtctgtttggccagagggtgggatggaagaagctgggaatagaaccctggtccacattttatattgaagctgtggacagaggaagatgaggcagtgaagaa

SEQ ID NO: 51159 - DNA, 201 bp, Homo sapiens
aagggcctgagaaagtgggcacctgcagcacagtcccatgaagaatgggagagtgaatctggaacaaatccaaggtgggctccaggcctggcacaccttgyagaggttagatcagctggctttctagtggagcaagctcataaagtcacgtttccaccacacccacagtccttgaccacagatgcaaagaaggccgatgcc

SEQ ID NO: 51160 - DNA, 201 bp, Homo sapiens
cagctcatgcagatgctggtttggagggatagggggtggagatggtgcactctggggccaccctggctgggaaggaaacccagacagactgggctggtttraatctgccagtctagacatctaatcaggagaatccctcatccattcatcaaaaatgtccctgtaacttatgtttaaaggtcactttaaatgtccagcaaa

SEQ ID NO: 51161 - DNA, 201 bp, Homo sapiens
gaaacacaagcatttctttaagaatgaccaggtgttgccatatgtatttacggcgcaagcaagtgttgtctaagcagtttctctgtttgcttgtcatagcracatttagaaactcgaacatgctttcatttatgtaaatagtttatgaagctttgacaacaaatgtaaacagacctgaaattataaatctgctaaatttgt

SEQ ID NO: 51162 - DNA, 201 bp, Homo sapiens
cagtatgagggcgtattaccttgctggccaccacttggtaccgagtgcaactggttactctatctcgaaggtggtcttctgagaggttctatgaactgctrtgaatcaggacagtcctcaggcagtgacagactgtgggtggggaaggggagaggaggagatgagaatttatccaccaactcctgtatcccatcgattgaa

SEQ ID NO: 51163 - DNA, 201 bp, Homo sapiens
ggtgaattgatgtttgtatagcttctaaagtcaagtctctgagcctcaatttcctcattcatgaaatagggataaagatggtgtctaatgtgaaggctgcrgtgatgatgatagatgaaattatataatatgctgtatgtgtatgtatgccaagtgctcaatgttgcctaccatttgaattattagtgtttattttattta

SEQ ID NO: 51164 - DNA, 201 bp, Homo sapiens
ttgatttttgcaagttataatacctccccacctcacttaaactgatatgcagtggttgcatcaataagaagtttctgttcatctcattgttctgatgcctyttttgtctacaggtcggtgaaattacctctagaagatgggtcattttttaatgaaacggatgtcgttttcccccagtcgttgccgaaagatctcatctat

SEQ ID NO: 51165 - DNA, 201 bp, Homo sapiens
gcttctaaagtcaagtctctgagcctcaatttcctcattcatgaaatagggataaagatggtgtctaatgtgaaggctgcggtgatgatgatagatgaaawtatataatatgctgtatgtgtatgtatgccaagtgctcaatgttgcctaccatttgaattattagtgtttattttatttattttattttaacagagtctg

SEQ ID NO: 51166 - DNA, 201 bp, Homo sapiens
aagaagagggatactagagaaactcaaaaaaaggggaggtcagtaaaattttaggtaattgaaaaatgcatcacaaaagagatcagactgaagcttgaccrgggaacatagttaaaagttgtctaaataaagatgagaggacagtgcatctatgcaaacatagatgatgattccaaataagcagtagaagtaatcaataag

SEQ ID NO: 51167 - DNA, 201 bp, Homo sapiens
atatttctgcctgcttgatgtccctggtggaaagataccagctagaaaaaaaatcttggaatctagactcattggactgactgaatcacgtgtctaccccrggtcaatcacttgcaccataggaatcctaaactctgattggccaggcctaagtcaaatgcatagccttggatgctgggtagagtcaacccacttaaatga

SEQ ID NO: 51168 - DNA, 201 bp, Homo sapiens
agatgaattgcaaacaaaattcaatgactttctgcctgaaagaaacttaaatttaagtatggaaagacttttgtttctgataattaccagaagtttttttwaaaaaaaaaaaaactatgctaacttatgttttaataaataaatgactaacttaaaatatctatggagaataggaaactaggaaaaagatatcataaaaga

SEQ ID NO: 51169 - DNA, 201 bp, Homo sapiens
aaataaggaaattgtatgaatatttaaaatgcctggaacactaaagtaatgatatttcaaaaagaaagaaaaagaaagaaagaaagaaaagaaaagaaaaagaaagaaagaaaaaaatgcaaggcttggaaggtgcacacatgactgccactaacattcattgactggctcggccataagccacagccagcttcaagggtg

SEQ ID NO: 51170 - DNA, 201 bp, Homo sapiens
gagagaataaatgaattcgaagatagatcagaagttattcagaatgatactagaaaagcaaaagggtaggaaatacagaagggaacataagagataagaayaatacagtgaaaagatctaacatatgtttgattagagtccagagaggagaaagtgggacagaggcaataattaaagagatattgactggggatttcccag

SEQ ID NO: 51171 - DNA, 201 bp, Homo sapiens
aataaggaaattgtatgaatatttaaaatgcctggaacactaaagtaatgatatttcaaaaagaaagaaaaagaaagaaagaaagaaaagaaaagaaaaagaaagaaagaaaaaaatgcaaggcttggaaggtgcacacatgactgccactaacattcattgactggctcggccataagccacagccagcttcaagggtgg

SEQ ID NO: 51172 - DNA, 201 bp, Homo sapiens
attgcttaaagacatgaatttacagatttaagaggtccagtgaatcccaaacagaatacataaaatgatatccacacttagacttaccagagtgaaactgytgaaaaccaaagacagagaaaattttaaaagcagtcggagaaaagacagattacttctaaggaatttcagttagactaatagctgacttctctgtggcaa

SEQ ID NO: 51173 - DNA, 201 bp, Homo sapiens
ttttcttttccttcatctagcaagggactttgttcatggtaggagttcaggatattctcttaaatgggtaaatgaataaatccattttaaaatacaccacwttatttatttatttatttatttatttatttatttatttatttttgagatggagtcttgctctgttgcccaggctggagtgcagtggcacaatcttggctc

SEQ ID NO: 51174 - DNA, 201 bp, Homo sapiens
attggctgtgaagagggtcatcttttaatgattaatggagacaccttgcaagtgactgtacttaataagatagaagaggaatcgccattgggtaagaaackgtcctacttcatattcctgtatagccatgggtgttggtttttttggttttccctatttttctctttcttggagacatctttgaatcctccttcttcttaa

SEQ ID NO: 51175 - DNA, 201 bp, Homo sapiens
tgttacaagcaggataaagagtgtttcctttgggaggccgagacgggtggatcacgaggtcaggagatcgagatcatcctggttaacacagtgaaaccccrtctctactaaaaatacaaaaaaattagccgggcatggtggcggacgcctgtaatcccagctacttgggaggctgaggcaggagaatggtgagaacccggg

SEQ ID NO: 51176 - DNA, 201 bp, Homo sapiens
aattagccgggcatggtggcggacgcctgtaatcccagctacttgggaggctgaggcaggagaatggtgagaacccgggaggcagaacttgcagtgagtcragatcacgccactgcactccagcctgggcgacagagcgagactccgtctcaaaaaaaaaaaaaaaaaaaaaaaaagagtgtttcacgtggaaggacctgc

SEQ ID NO: 51177 - DNA, 201 bp, Homo sapiens
cccaccccaacccttttctccaggctgatcatctgttaagcccaaaagccatcttgaaaattacctttctattgctcggttagaggtgttgtttttttggtttttttttagacagagtctcattctgtcacccaggctaggatgcagtggtgcaatcttggctcactgcaacctccgcctcctgggttcaagcgatctcgt

SEQ ID NO: 51178 - DNA, 201 bp, Homo sapiens
cccttggcacttactgtctctgaatctgccaatgcccagctcaaataccaccccctccagcaagttttccccattgcattgtccctcatctgccttttttsctattctctgactcactttccctgtaaaactgaggccatgaggtttcacttccctcccaactccctttctctcttccctttactcctactataccctcca

SEQ ID NO: 51179 - DNA, 201 bp, Homo sapiens
aaatgataaataaatttcctcagagtgttttcactattgtaaaaataactcaaattcctcttgagaataataaaattaacctaaatctattcacaaccagmcaaccaaccaacccgtttctattggatacttgccatgttctactactgtgtgaggaacagaaaaagaggatccgaagggaataaaaggcacactgcctac

SEQ ID NO: 51180 - DNA, 201 bp, Homo sapiens
aataaatttcctcagagtgttttcactattgtaaaaataactcaaattcctcttgagaataataaaattaacctaaatctattcacaaccagccaaccaamcaacccgtttctattggatacttgccatgttctactactgtgtgaggaacagaaaaagaggatccgaagggaataaaaggcacactgcctacccttgggt

SEQ ID NO: 51181 - DNA, 201 bp, Homo sapiens
atgatgaatgctcaatgttcctatgttttctgcgtctatggggttaagtatggttcctttttgtcagttgttctggtgagtatttctcaggcttttagccrtgattgttttcttaacacaaggttttattctctccctgaagccgaaagatgatctatatcctttgcttcacccgactatgcattgctggactccaacaag

SEQ ID NO: 51182 - DNA, 201 bp, Homo sapiens
gatgaattgcaaacaaaattcaatgactttctgcctgaaagaaacttaaatttaagtatggaaagacttttgtttctgataattaccagaagttttttttaaaaaaaaaaaaactatgctaacttatgttttaataaataaatgactaacttaaaatatctatggagaataggaaactaggaaaaagatatcataaaagaa

SEQ ID NO: 51183 - DNA, 201 bp, Homo sapiens
atgagggcatgaaaggtacaaataataaattaaagtcagtctgtccttaaaaaaaattattatgatgaatgctcaatgttcctatgttttctgcgtctatrgggttaagtatggttcctttttgtcagttgttctggtgagtatttctcaggcttttagccgtgattgttttcttaacacaaggttttattctctccctga

SEQ ID NO: 51184 - DNA, 201 bp, Homo sapiens
aaatagccttggtatagcatatgacagtatagtgtttttaaaacatagtttttttgctttcttaggatacaatacaatgataagcataagtatttataaayttgacattaaggtcattgattatataaattgtatcataaattatatcccaatttatgtaaattaaaaaatagataaatgttctaaatacatgaaattcaa

SEQ ID NO: 51185 - DNA, 201 bp, Homo sapiens
ctcctcctccatttagtcagcatttgtgccttttatgactcttgtcctcttcaagaccacccttgatgtttgtttaaccccctttaaagtaactattatarcatttgctctggtgagtgatggagaatggagatgagctcaaaaaaagcaccttgcctgctttcccttccagggcccaagcatttgaaaccagccatctaa

SEQ ID NO: 51186 - DNA, 201 bp, Homo sapiens
agatgctgcttgggggtcctggacaggagcccccaccctctcctagcctggatgactacgtgaggtctatatctcgactggcacagcccacctctgtgctrgacaaggccacggcccagggccaacccaggccaccccacaggccagcccaggcctgccggaagggccgccctgctgtgtccctgcgagacatcaccgcac

SEQ ID NO: 51187 - DNA, 201 bp, Homo sapiens
acacaggggcctcatggcatggtcagggtcccagctgtgggtgagagcagggcactgtccagctgtccactggggaagtcaagatgtcctaaggcccagghcagggcatctggagtctgaaggaccctagttcctagaggcatctggcagcaagaaggtgaggcatcagggaacgggaatcaggctgggactgatcagagg

SEQ ID NO: 51188 - DNA, 201 bp, Homo sapiens
cctcagaacactctactcgcacctcccggtgatccatgaactctgacccctccccagtaaaggcttctgtagagagcatgctgggtctgcatctcctctcrtctcctccatggtggtcactgcccctggcaggtctctgaaagggaaatgcttttctgcagaggcccctgcttgggcagttcacagtgagaccgaccccct

SEQ ID NO: 51189 - DNA, 201 bp, Homo sapiens
attgagctgggggcaacagccaagctcacctgggcaggtctctgccacctccttgctctgtgagctgtcagtctaggttattctctttttttgtggctatktttaattgctttggatttgttaaatgttttctgtcttctgttaagtgtgttttctctggagatagaatgtaaaccatattaaaaggaaaaagtttcagac

SEQ ID NO: 51190 - DNA, 201 bp, Homo sapiens
ccaggccccgcccaccaagctgttttcctaagacagccttccgagcaggctatttttggccctcgtgacagtgattgatagctgctgggaaggtataaaarcagcttgcctgcgaaggttcttcacactgctcagggaagagcctgctacggtggactgtgagactcagtgcactgtcctcctcccagcgaccccacgctg

SEQ ID NO: 51191 - DNA, 201 bp, Homo sapiens
agctgggggcaacagccaagctcacctgggcaggtctctgccacctccttgctctgtgagctgtcagtctaggttattctctttttttgtggctatttttrattgctttggatttgttaaatgttttctgtcttctgttaagtgtgttttctctggagatagaatgtaaaccatattaaaaggaaaaagtttcagacaagc

SEQ ID NO: 51192 - DNA, 201 bp, Homo sapiens; identical to SEQ ID NO: 28092

SEQ ID NO: 51193 - DNA, 201 bp, Homo sapiens; identical to SEQ ID NO: 28073

SEQ ID NO: 51194 - DNA, 201 bp, Homo sapiens; identical to SEQ ID NO: 28077

SEQ ID NO: 51195 - DNA, 201 bp, Homo sapiens; identical to SEQ ID NO: 28112

SEQ ID NO: 51196 - DNA, 201 bp, Homo sapiens; identical to SEQ ID NO: 28114

SEQ ID NO: 51197 - DNA, 201 bp, Homo sapiens; identical to SEQ ID NO: 28082

SEQ ID NO: 51198 - DNA, 201 bp, Homo sapiens; identical to SEQ ID NO: 28115

SEQ ID NO: 51199 - DNA, 201 bp, Homo sapiens; identical to SEQ ID NO: 28105

SEQ ID NO: 51200 - DNA, 201 bp, Homo sapiens
gtgcactgtaggatttggggctggcaacagcagccggggttgggggcactgctggggtgcatggctgagtgtctggggctgggttaaggacaaggatcagyggagttagggatgcagctagacagggcatagaagggtagatttgaggtcagggctgaggttaaactaggtcctgatattgtttgtcacgggtcctctacc

SEQ ID NO: 51201 - DNA, 201 bp, Homo sapiens
agggcgagagggagagaggataaatagcagcgtggcttccctggctcctctctgcatccttcccgaccttcccagcaatatgcatcttgcacgtctggtcrgctcctgctccctccttctgctactgggggccctgtctggatgggcggccagcgatgaccccattgagaaggtcattgaagggatcaaccgagggctgag

SEQ ID NO: 51202 - DNA, 201 bp, Homo sapiens
cacatctgccgccagacagagccagggatgggtgggtggggaggaacggcgcagcagaggagcgggcacggcaggctgcagggtgccgcgagcagaggacrgtgcactgtaggatttggggctggcaacagcagccggggttgggggcactgctggggtgcatggctgagtgtctggggctgggttaaggacaaggatcag

SEQ ID NO: 51203 - DNA, 201 bp, Homo sapiens
ggggtcctggatctgcaagatgtgactggctcagacgtcgaagtccagagccacatctgccgccagacagagccagggatgggtgggtggggaggaacggygcagcagaggagcgggcacggcaggctgcagggtgccgcgagcagaggacggtgcactgtaggatttggggctggcaacagcagccggggttgggggcac

SEQ ID NO: 51204 - DNA, 201 bp, Homo sapiens
ttctggacagtgaggaggcagtgggttaagctgtgcctcccaccgcagccccagtcaccctggaggggaccaggtccctggggaaaaggaactgggagacyctccgcgtttgtggggttgtaacaagagtctgggctttgtccacagggcaaccatcaaagcggatcttccagccatcaaggaggggccacaaccacgccg

SEQ ID NO: 51205 - DNA, 201 bp, Homo sapiens
agtgaggaggcagtgggttaagctgtgcctcccaccgcagccccagtcaccctggaggggaccaggtccctggggaaaaggaactgggagaccctccgcgkttgtggggttgtaacaagagtctgggctttgtccacagggcaaccatcaaagcggatcttccagccatcaaggaggggccacaaccacgccgttagcctc

SEQ ID NO: 51206 - DNA, 201 bp, Homo sapiens
ctctctgcatccttcccgaccttcccagcaatatgcatcttgcacgtctggtcggctcctgctccctccttctgctactgggggccctgtctggatgggcrgccagcgatgaccccattgagaaggtcattgaagggatcaaccgagggctgagcaatgcagagagagaggtgggcaaggccctggatggcatcaacagtg

SEQ ID NO: 51207 - DNA, 201 bp, Homo sapiens
agggagtcgacaatgctgcagggcaggccggaaatgaggctgggaggtttggccagggagtccaccatgctgcagggcaggccggaaatgaggctgggagrtttggccagggggcccaccatggtctcagtgagggctggaaggagacagagaagtttggccaggggatccaccatgctgccggtcaggttgggaaggagg

SEQ ID NO: 51208 - DNA, 201 bp, Homo sapiens
gggcaaccatcaaagcggatcttccagccatcaaggaggggccacaaccacgccgttagcctctggggtaagcgcggactctggggtaggggagaggaggmccctgggagttccctagcatggctgtgggtcagacgctggagactgaccttcttgtccttgaattgcaggcctcggtcaacacgcctttcatcaaccttc

SEQ ID NO: 51209 - DNA, 201 bp, Homo sapiens
cacccttgtgtatcccaggctatgggggcggcagagcatcctctcaggctaaacacacgaggcttgttggttcctgcagaggccccagcccctctgcctgyggggactggcttccttgtgttcttaagtttagatgctaccttcctgaaacttccccagaacataactccggggccagagcagccagtccccttgtgcttc

SEQ ID NO: 51210 - DNA, 201 bp, Homo sapiens
ttttctgctctgcgtcctgatagatacgctcaccccgaccccttcccggtgtctgtttggacagctccccgggcgggcagacctgcagcctctgcaaagamcctccaacctgatacccagtcctgggcttccctctctccacctgctccctcccctttgcaccctgccctcatcttttgggtgcctttcatttccaccaag

SEQ ID NO: 51211 - DNA, 201 bp, Homo sapiens
gctggaaggagacagagaagtttggccagggggtccaccatactgctggtcaggttgggaaggaggcagagaagtttggccagggggcccaccatgctgcrgggcaggccggaaatgaggcagggagatttggccagggggcccaccatgctgcggggcaggccggaaatgaggctgggaggtttggccagggggtccacc

SEQ ID NO: 51212 - DNA, 201 bp, Homo sapiens
gggcaggctgggaaagagggagacatagcagttcatggtgtccaacctggggtccacgaggccgggaaggaggcagggcagtttggccagggagttcaccrtacccttgaacaggccgggaaggaagcagacaaagcggtccaagggttccacactggggtccaccaggctgggaaggaagcagagaaacttggccaaggg

SEQ ID NO: 51213 - DNA, 201 bp, Homo sapiens
tttggccagggtgtccaccatgctgcctcgcaggtggggaaggaggaagacagagtggtccaaggcctccatcatggcgttagtcaggctggaagggaggsggggcagtttggccacgacattcaccacacagcagggcaggctgggaaagagggagacatagcagttcatggtgtccaacctggggtccacgaggccggg

SEQ ID NO: 51214 - DNA, 201 bp, Homo sapiens
aggcaccaagaagggagcgtggggagcaggagagggtggactcctgtgcgccctcactctccaggctccatgaggggtcctggatctgcaagatgtgactggctcagacgtcgaagtccagagccacatctgccgccagacagagccagggatgggtgggtggggaggaacggcgcagcagaggagcgggcacggcaggct

SEQ ID NO: 51215 - DNA, 201 bp, Homo sapiens
ccatcacggggccaaccaggcgggaagtgaggcagggaagtttggccagggagtcgacaatgctgcagggcaggccggaaatgaggctgggaggtttggcmagggagtccaccatgctgcagggcaggccggaaatgaggctgggagatttggccagggggcccaccatggtctcagtgagggctggaaggagacagagaa

SEQ ID NO: 51216 - DNA, 201 bp, Homo sapiens
ggactctggggtaggggagaggaggcccctgggagttccctagcatggctgtgggtcagacgctggagactgaccttcttgtccttgaattgcaggcctcrgtcaacacgcctttcatcaaccttcccgccctgtggagggtgagtgccccatggtgtctcttttctgctctgcgtcctgatagatacgctcaccccgacc

SEQ ID NO: 51217 - DNA, 201 bp, Homo sapiens
atgctgcagggcaggccggaaatgaggctgggaggtttggccagggagtccaccatgctgcagggcaggccggaaatgaggctgggagatttggccagggrgcccaccatggtctcagtgagggctggaaggagacagagaagtttggccaggggatccaccatgctgccggtcaggttgggaaggaggcagagaagtttg

SEQ ID NO: 51218 - DNA, 201 bp, Homo sapiens
ctgtggagggtgagtgccccatggtgtctcttttctgctctgcgtcctgatagatacgctcaccccgaccccttcccggtgtctgtttggacagctccccrggcgggcagacctgcagcctctgcaaagaccctccaacctgatacccagtcctgggcttccctctctccacctgctccctcccctttgcaccctgccctc

SEQ ID NO: 51219 - DNA, 201 bp, Homo sapiens
gctgcagggcaggccggaaatgaggctgggaggtttggccagggagtccaccatgctgcagggcaggccggaaatgaggctgggagatttggccagggggyccaccatggtctcagtgagggctggaaggagacagagaagtttggccaggggatccaccatgctgccggtcaggttgggaaggaggcagagaagtttggc

SEQ ID NO: 51220 - DNA, 201 bp, Homo sapiens
gatacgctcaccccgaccccttcccggtgtctgtttggacagctccccgggcgggcagacctgcagcctctgcaaagaccctccaacctgatacccagtcytgggcttccctctctccacctgctccctcccctttgcaccctgccctcatcttttgggtgcctttcatttccaccaaggcaaacacaagctggcagaaaa

SEQ ID NO: 51221 - DNA, 201 bp, Homo sapiens
cagacaaactgatccatcatggggtccatcacggggccaaccaggcgggaagtgaggcagggaagtttggccagggagtcgacaatgctgcagggcaggcyggaaatgaggctgggaggtttggccagggagtccaccatgctgcagggcaggccggaaatgaggctgggagatttggccagggggcccaccatggtctca

SEQ ID NO: 51222 - DNA, 201 bp, Homo sapiens
ccactggcagtgactggctgtccttcagctcacacggcagtgcacaccccactgccgccccctatccctgagtcgcgccttggcccccctgcaggcaccgygcagggcctggtggtgaacacgggcgaccgcaccatcattgggcgcatcgcatcgctggcgtcgggggtggaaaacgagaagacacccatcgctatcgag

SEQ ID NO: 51223 - DNA, 201 bp, Homo sapiens
gtgtgcccagggctcttccctgacttccccgtttccggtcaggcttctgccagctctacctgaatgagaaggactacccgcctggctatgccttcgacgtrgaggccatgaactttccatctagcggcctctgctttgcgggacttgtatccatgattgacccaccccgggccaccgtccctgatgctgtgctcaagtgtc

SEQ ID NO: 51224 - DNA, 201 bp, Homo sapiens
cagctctcagagcccgcaccgagctctcggccccgcccctctcctcagccccgccccgttccctcgtccacagccccgccccgttcccccgtccacagccycgcctctcccccccgcccacagctgtccatccatacgctggaggacccgcgggacccgcgacacttgctggtgatgaagggcgcccccgagcgcgtgctg

SEQ ID NO: 51225 - DNA, 201 bp, Homo sapiens
caccgagctctcggccccgcccctctcctcagccccgccccgttccctcgtccacagccccgccccgttcccccgtccacagcctcgcctctcccccccgyccacagctgtccatccatacgctggaggacccgcgggacccgcgacacttgctggtgatgaagggcgcccccgagcgcgtgctggagcgctgcagctcca

SEQ ID NO: 51226 - DNA, 201 bp, Homo sapiens
acactcttgggcacagagtgacagacaagacctgtgtgtgcaatgacagccagtgcaggacacatgggtggcaggcaggtgaacagacctaaatggacatacctacagccatgcacacacaggcggacactcaggtaggcccgggccgacccatgcacacacatgactcagatacagatactcagacagagatggaaacag

SEQ ID NO: 51227 - DNA, 201 bp, Homo sapiens
tccttccccccacccccacactctgatgcaaggcagagagagcatttaggggttcacggccctgggaccctatgcccggtgggctgcagaggctctccgcygggactcaggctggactcaggctgtttccgtttgcccctggcctgcagacattcgggcagcgcctgtaccagcagtacacctgctacaccgtgttcttca

SEQ ID NO: 51228 - DNA, 201 bp, Homo sapiens
cactcttgggcacagagtgacagacaagacctgtgtgtgcaatgacagccagtgcaggacacatgggtggcaggcaggtgaacagacctaaatggacatacctacagccatgcacacacaggcggacactcaggtaggcccgggccgacccatgcacacacatgactcagatacagatactcagacagagatggaaacaga

SEQ ID NO: 51229 - DNA, 201 bp, Homo sapiens
gattaaatgagctaatgcacgtgcaacactcggcacctggagcagtcagtgatccccacagttagctggtattaggagttgtgttgccaggcatggtggcrcatgcttgtaattccagctacttgggaggctaaggcaggagaatctcctgaacctgggattcggaagttgcagtgagctgagattgcaccactgcactcc

SEQ ID NO: 51230 - DNA, 201 bp, Homo sapiens
ctgcccctctgtcccagggcctctctgcgagcctggctgctgagctgctgctgcgggatgggcccaacgcactgcggccaccacggggcaccccagagtaygtcaagttcgcgaggcagctggccgggggcctgcagtgcctcatgtgggttgccgccgccatctgcctcatcgcctttgccatccaggctagtgaggggg

SEQ ID NO: 51231 - DNA, 201 bp, Homo sapiens
actcttgggcacagagtgacagacaagacctgtgtgtgcaatgacagccagtgcaggacacatgggtggcaggcaggtgaacagacctaaatggacatacctacagccatgcacacacaggcggacactcaggtaggcccgggccgacccatgcacacacatgactcagatacagatactcagacagagatggaaacagaa

SEQ ID NO: 51232 - DNA, 201 bp, Homo sapiens
ctcctacttccagattggtgggtgcccgtgggccggggagcctggaggtggggggctctgcgctgggctgctcgcctgccccaggccctgccttgggctcyggctggttctggacctcagtgtctgcatttggtcctgggtctccgttgtcctccgtgtccctctctgtttgtgacagtctctctggttctgctgtgtccc

SEQ ID NO: 51233 - DNA, 201 bp, Homo sapiens
tccctctctctcccaggctggtgggaccaggaactctactattagagggacgactgccttcaagcatccctgcaactgccacagcaggtgggggcagggcwcgtgggaccctctggacagccaccaagatatctgagcaaccaagagtcccagccccaccagtatctgcttctgtagcccacggcaccccaaacttggagg

SEQ ID NO: 51234 - DNA, 201 bp, Homo sapiens
cccctaaacagacacggacaaataaaccccctcagatagaccccatggcagacagacagaaaagaaccacagatacagtcacgaatgcagccagaggcgcrgctgtgttgacaggtatttattcggtaacatttacacagtgctttctctgggccagacacaccatcatttccttaattttgtactcataaccacactatg

SEQ ID NO: 51235 - DNA, 201 bp, Homo sapiens
attcagataatgtgagtgaaggggtcagcacaaggtcaggcatccataggtgtttggtgcaaggggcctggttattttacccatttcctggccctgctaaraaagggtgtgcccagggctcttccctgacttccccgtttccggtcaggcttctgccagctctacctgaatgagaaggactacccgcctggctatgccttc

SEQ ID NO: 51236 - DNA, 201 bp, Homo sapiens
gtgaccaccccatcaccgccaaggccattgcagccagtgtgggcatcatctcggaaggcagcgagacagtggaggacatcgctgcccgcctccgtgtgccygtagaccaggttaatcgcaagtaagcccccccagacctccccggggttctccccacatctggcacagaccgaggtcccagcgaggtcctcccatctcctc

SEQ ID NO: 51237 - DNA, 201 bp, Homo sapiens
gcccgggccgacccatgcacacacatgactcagatacagatactcagacagagatggaaacagaacaggtatctggccaaacttgaatcacagacacgtgyccctaaacagacacggacaaataaaccccctcagatagaccccatggcagacagacagaaaagaaccacagatacagtcacgaatgcagccagaggcgca

SEQ ID NO: 51238 - DNA, 201 bp, Homo sapiens
tggtgcatggagcttcctagtaggtggggaaaagcatggggaaaaccaagaaaaccagggcaccagggagcaggtcggtggcctcaggcaggcagcttccrgcccctctgaataaccccaccccttccctgtccccagctgtacctggcaatcgctctcattgctgtggttgtcgtcaccggctgctttggctactaccag

SEQ ID NO: 51239 - DNA, 201 bp, Homo sapiens
tcaagaacctggaggcggtggagacattgggctccacttcggtgatctgctcggacaagacagggactctcactcagaaccgcatgactgtgtcccatctktggtttgacaaccacatccacacagctgacaccacggaagaccagtcaggtgtgggggagggagggcacaggcgccagggcaggatctggtggatggtgg

SEQ ID NO: 51240 - DNA, 201 bp, Homo sapiens
tcccaaaagtctgcgagatacccttcaactccaccaacaagttccaggtgcgcagccggccccgcccacggcctgggcccgcccacctcgggccccgcccmaggccacacccacatcagcgggccacgaggggcttcgctccttgccccttctctccgcagccaaaccccaccccatctcccgctccgcctatggccccgt

SEQ ID NO: 51241 - DNA, 201 bp, Homo sapiens
aaacgagaagacacccatcgctatcgagatcgagcattttgtggacatcatcgcgggcctggccattctcttcggtgccacattttttattgtggccatgkgcattggctacaccttcctgcgggccatggtcttcttcatggccatcgtggtggcctatgtgcctgaggggctgctggccactgtcacagtgagtggggg

SEQ ID NO: 51242 - DNA, 201 bp, Homo sapiens
gactgatcttcgacaacctgaagaagtctattgcctacacattgaccaagaacatcccagagctgacaccctacctcatctacatcaccgtcagcgtgccyctgcccctcgggtgcatcaccatcctcttcatcgaactctgcactgacattgtaagtccacagcccagggtacccatccacagggtgcccagagacactt

SEQ ID NO: 51243 - DNA, 201 bp, Homo sapiens
ccgtgtgcccgtagaccaggttaatcgcaagtaagcccccccagacctccccggggttctccccacatctggcacagaccgaggtcccagcgaggtcctcycatctcctccccagggatgcccgtgcctgtgtgatcaatggcatgcagctgaaggacatggacccatcggaactggtcgaggccctgcgcacccaccccg

SEQ ID NO: 51244 - DNA, 201 bp, Homo sapiens
ccttcccagggcaacttgccttgtgtgcggcccacttgttcctccacgtgtgactgagttcagccagagcatcccggacccccagactccctgccagttcgggggggcaagggcctttcccaccatctccagctccaaactcctgcttctgatgatcgcaactgcagatgggtgtctctgccctgacactaatgcatcatc

SEQ ID NO: 51245 - DNA, 201 bp, Homo sapiens
agatgaaaggtggggacagagtgcccgccgacatccgcatcctggcggcccagggctgcaaggtggacaactcctcgctgacaggggagtctgagccacaracccgctcacccgagtgcacgcacgagagccctctggagacccgcaacatcgccttcttctccaccatgtgccttgagggtctgtgaagcccccgcctgc

SEQ ID NO: 51246 - DNA, 201 bp, Homo sapiens
cccagggctcttccctgacttccccgtttccggtcaggcttctgccagctctacctgaatgagaaggactacccgcctggctatgccttcgacgtagaggscatgaactttccatctagcggcctctgctttgcgggacttgtatccatgattgacccaccccgggccaccgtccctgatgctgtgctcaagtgtcgcacc

SEQ ID NO: 51247 - DNA, 201 bp, Homo sapiens
ccaccttcacccttccccgcagctctcagagcccgcaccgagctctcggccccgcccctctcctcagccccgccccgttccctcgtccacagccccgcccygttcccccgtccacagcctcgcctctcccccccgcccacagctgtccatccatacgctggaggacccgcgggacccgcgacacttgctggtgatgaaggg

SEQ ID NO: 51248 - DNA, 201 bp, Homo sapiens
tggggagcacctcgctctccaaatccgcccccagcccaactccgcaccctaattctgttcattccctgcgtccaggactccaaatctgcacctagccccgmcttaacgcttaccttctaccaaggacccctccacacaaggcctccatcttccaccttcacccttccccgcagctctcagagcccgcaccgagctctcggc

SEQ ID NO: 51249 - DNA, 201 bp, Homo sapiens
atggggagcacctcgctctccaaatccgcccccagcccaactccgcaccctaattctgttcattccctgcgtccaggactccaaatctgcacctagccccrccttaacgcttaccttctaccaaggacccctccacacaaggcctccatcttccaccttcacccttccccgcagctctcagagcccgcaccgagctctcgg

SEQ ID NO: 51250 - DNA, 201 bp, Homo sapiens
cccgcccctctcctcagccccgccccgttccctcgtccacagccccgccccgttcccccgtccacagcctcgcctctcccccccgcccacagctgtccatmcatacgctggaggacccgcgggacccgcgacacttgctggtgatgaagggcgcccccgagcgcgtgctggagcgctgcagctccatccttatcaagggcc

SEQ ID NO: 51251 - DNA, 201 bp, Homo sapiens
gagggaagggtcatccgggggctgggtccctcagggttgggtggaacccaattccacccaggtctggggagggggcccgcgatatgagcctaggaggaggsggctcggttctggtccgggagagccgccgtgcgggacccagcctggacgcctggtctgcagggcagacgtttgaccagtcctcggagacgtggcgggcgc

SEQ ID NO: 51252 - DNA, 201 bp, Homo sapiens
gcccctcgggtgcatcaccatcctcttcatcgaactctgcactgacattgtaagtccacagcccagggtacccatccacagggtgcccagagacacttgcytgcagatggacaggagggacagagaccaccacagacactcttgggcacagagtgacagacaagacctgtgtgtgcaatgacagccagtgcaggacacatg

SEQ ID NO: 51253 - DNA, 201 bp, Homo sapiens
aaaatgcattggtttatgatactgaaaaattctggggaattaagcttcaggtctagccagatccaggagctcagtgtcattaggaattttcctttctccakgtctcagctctgctgttctctttgctggctttatttgcaggcactcccttcacttggggacacacacacccctgctccagcagctcaaacttaactccca

SEQ ID NO: 51254 - DNA, 201 bp, Homo sapiens
ctctctcacctcttacaggtctctgctcagatatcaccttctcaataagcccttccctgggtacacttaaaatcgagtcaccgtttccttcaccaagcttratatgtttttttccactttctaacacactatataattcgtttctttattttctgtcaccctcactagaatgtcagctcctcaaggacagggatttttgtc

SEQ ID NO: 51255 - DNA, 201 bp, Homo sapiens
tgcccgtgggccggggagcctggaggtggggggctctgcgctgggctgctcgcctgccccaggccctgccttgggctccggctggttctggacctcagtgyctgcatttggtcctgggtctccgttgtcctccgtgtccctctctgtttgtgacagtctctctggttctgctgtgtccctgctctctctctgaccttgctc

SEQ ID NO: 51256 - DNA, 201 bp, Homo sapiens
ctttccttgttcactcctctgcagttatggtgtcctccctgctgttcctccgacagttcgggcctgtcctcacctcagggcctttgcacctgctgttctcyctgccaggagcactcttctcccagctttccacgtggctgactctctcacctcttacaggtctctgctcagatatcaccttctcaataagcccttccctgg

SEQ ID NO: 51257 - DNA, 201 bp, Homo sapiens
ttgcagtagcactggattgggtcactcatttatccctgagccagtcactggggctgggggatggaagaccttgattggccaggtctgggcttacttacccratcttagccagggacctcactgcaactgatggtgtaggggagaggagtggttccccaaacacaaaacaagggtgggaaagccaaggccaggcaggcaatg

SEQ ID NO: 51258 - DNA, 201 bp, Homo sapiens
agccagtgtgggcatcatctcggaaggcagcgagacagtggaggacatcgctgcccgcctccgtgtgcccgtagaccaggttaatcgcaagtaagcccccmcagacctccccggggttctccccacatctggcacagaccgaggtcccagcgaggtcctcccatctcctccccagggatgcccgtgcctgtgtgatcaatg

SEQ ID NO: 51259 - DNA, 201 bp, Homo sapiens
gacactcttgggcacagagtgacagacaagacctgtgtgtgcaatgacagccagtgcaggacacatgggtggcaggcaggtgaacagacctaaatggacatacctacagccatgcacacacaggcggacactcaggtaggcccgggccgacccatgcacacacatgactcagatacagatactcagacagagatggaaaca

SEQ ID NO: 51260 - DNA, 201 bp, Homo sapiens
tgcccagtaactgctgcctccactggcctctctcctgctatcttctaggacagggggcttcagcctccctgtctctctcctgcatgactgccacctccccrtgactgccacctccccagggcacactgcttctctgtctcccactgtcactaccctctcccaggtcacatcctccactggcagtgactggctgtccttcag

SEQ ID NO: 51261 - DNA, 201 bp, Homo sapiens
cccaactcccatcagatcctgactgtggtttagaacagccggcaaatgccagcgggtgccagtgccagatggtgacatgccaaaaaaacctttctaactgrccaataactccccccacggccccctccacatttcactaaaggggtggtgctgagaggcccgggccactccagtgttcagtgtgtagaacacctccctgct

SEQ ID NO: 51262 - DNA, 201 bp, Homo sapiens
acacaaggcctccatcttccaccttcacccttccccgcagctctcagagcccgcaccgagctctcggccccgcccctctcctcagccccgccccgttcccycgtccacagccccgccccgttcccccgtccacagcctcgcctctcccccccgcccacagctgtccatccatacgctggaggacccgcgggacccgcgaca

SEQ ID NO: 51263 - DNA, 201 bp, Homo sapiens
cacccttccccgcagctctcagagcccgcaccgagctctcggccccgcccctctcctcagccccgccccgttccctcgtccacagccccgccccgttcccycgtccacagcctcgcctctcccccccgcccacagctgtccatccatacgctggaggacccgcgggacccgcgacacttgctggtgatgaagggcgccccc

SEQ ID NO: 51264 - DNA, 201 bp, Homo sapiens
agagcccgcaccgagctctcggccccgcccctctcctcagccccgccccgttccctcgtccacagccccgccccgttcccccgtccacagcctcgcctctyccccccgcccacagctgtccatccatacgctggaggacccgcgggacccgcgacacttgctggtgatgaagggcgcccccgagcgcgtgctggagcgctg

SEQ ID NO: 51265 - DNA, 201 bp, Homo sapiens
actgaaacgtttgagcagctgcacccacctttgatcctcaacacttggcctctaagcccttgaccctccatagcaaccagcactgacctctgagcccctgrccctgcctaagtggcacccccagcactgagtctcctttctccctctctctcccaggctggtgggaccaggaactctactattagagggacgactgccttc

SEQ ID NO: 51266 - DNA, 201 bp, Homo sapiens
tccccggggttctccccacatctggcacagaccgaggtcccagcgaggtcctcccatctcctccccagggatgcccgtgcctgtgtgatcaatggcatgcwgctgaaggacatggacccatcggaactggtcgaggccctgcgcacccaccccgagatggtgtttgcgcgcaccagcccccagcagaagctggtgatcgtg

SEQ ID NO: 51267 - DNA, 201 bp, Homo sapiens
gggcccaggctgtccaggctggtgtggctgtgccgtccctgcaggtcctgcctgctaacctcagtcctgttcctgctcacaagtgggggaagggggacccraagtggaggggacaagggcccagccaaaccctcagtcccagttccttccactcctggccagttcccatctgtgtccctggcatatgaaaaggccgagagt

SEQ ID NO: 51268 - DNA, 201 bp, Homo sapiens
ccatgaactttccatctagcggcctctgctttgcgggacttgtatccatgattgacccaccccgggccaccgtccctgatgctgtgctcaagtgtcgcacygcaggcatccgggtatgccactgtggggaggaacaagtggagtgaggacagaggatggcagcaggatttgggttgaagaaccccatgacaaacccacctg

SEQ ID NO: 51269 - DNA, 201 bp, Homo sapiens
tgtcccagggcctctctgcgagcctggctgctgagctgctgctgcgggatgggcccaacgcactgcggccaccacggggcaccccagagtacgtcaagttygcgaggcagctggccgggggcctgcagtgcctcatgtgggttgccgccgccatctgcctcatcgcctttgccatccaggctagtgagggggacctcacca

SEQ ID NO: 51270 - DNA, 201 bp, Homo sapiens
cacagagtgacagacaagacctgtgtgtgcaatgacagccagtgcaggacacatgggtggcaggcaggtgaacagacctaaatggacatacctacagccaygcacacacaggcggacactcaggtaggcccgggccgacccatgcacacacatgactcagatacagatactcagacagagatggaaacagaacaggtatct

SEQ ID NO: 51271 - DNA, 201 bp, Homo sapiens; identical to SEQ ID NO: 27276

SEQ ID NO: 51272 - DNA, 201 bp, Homo sapiens; identical to SEQ ID NO: 27278

SEQ ID NO: 51273 - DNA, 201 bp, Homo sapiens; identical to SEQ ID NO: 27282

SEQ ID NO: 51274 - DNA, 201 bp, Homo sapiens; identical to SEQ ID NO: 27480

SEQ ID NO: 51275 - DNA, 201 bp, Homo sapiens; identical to SEQ ID NO: 27228

SEQ ID NO: 51276 - DNA, 201 bp, Homo sapiens; identical to SEQ ID NO: 27284

SEQ ID NO: 51277 - DNA, 201 bp, Homo sapiens; identical to SEQ ID NO: 27285

SEQ ID NO: 51278 - DNA, 201 bp, Homo sapiens; identical to SEQ ID NO: 27482

SEQ ID NO: 51279 - DNA, 201 bp, Homo sapiens; identical to SEQ ID NO: 27288

SEQ ID NO: 51280 - DNA, 201 bp, Homo sapiens; identical to SEQ ID NO: 27291

SEQ ID NO: 51281 - DNA, 201 bp, Homo sapiens; identical to SEQ ID NO: 27294

SEQ ID NO: 51282 - DNA, 201 bp, Homo sapiens; identical to SEQ ID NO: 27541

SEQ ID NO: 51283 - DNA, 201 bp, Homo sapiens; identical to SEQ ID NO: 27503

SEQ ID NO: 51284 - DNA, 201 bp, Homo sapiens; identical to SEQ ID NO: 27542

SEQ ID NO: 51285 - DNA, 201 bp, Homo sapiens; identical to SEQ ID NO: 27303

SEQ ID NO: 51286 - DNA, 201 bp, Homo sapiens; identical to SEQ ID NO: 27185

SEQ ID NO: 51287 - DNA, 201 bp, Homo sapiens; identical to SEQ ID NO: 27186

SEQ ID NO: 51288 - DNA, 201 bp, Homo sapiens; identical to SEQ ID NO: 27242

SEQ ID NO: 51289 - DNA, 201 bp, Homo sapiens; identical to SEQ ID NO: 27187

SEQ ID NO: 51290 - DNA, 201 bp, Homo sapiens; identical to SEQ ID NO: 27308

SEQ ID NO: 51291 - DNA, 201 bp, Homo sapiens; identical to SEQ ID NO: 27309

SEQ ID NO: 51292 - DNA, 201 bp, Homo sapiens; identical to SEQ ID NO: 27244

SEQ ID NO: 51293 - DNA, 201 bp, Homo sapiens; identical to SEQ ID NO: 27245

SEQ ID NO: 51294 - DNA, 201 bp, Homo sapiens; identical to SEQ ID NO: 27247

SEQ ID NO: 51295 - DNA, 201 bp, Homo sapiens; identical to SEQ ID NO: 27248

SEQ ID NO: 51296 - DNA, 201 bp, Homo sapiens; identical to SEQ ID NO: 27365

SEQ ID NO: 51297 - DNA, 201 bp, Homo sapiens; identical to SEQ ID NO: 27366

SEQ ID NO: 51298 - DNA, 201 bp, Homo sapiens; identical to SEQ ID NO: 27367

SEQ ID NO: 51299 - DNA, 201 bp, Homo sapiens; identical to SEQ ID NO: 27518

SEQ ID NO: 51300 - DNA, 201 bp, Homo sapiens; identical to SEQ ID NO: 27265

SEQ ID NO: 51301 - DNA, 201 bp, Homo sapiens; identical to SEQ ID NO: 27267

SEQ ID NO: 51302 - DNA, 201 bp, Homo sapiens; identical to SEQ ID NO: 27209

SEQ ID NO: 51303 - DNA, 201 bp, Homo sapiens; identical to SEQ ID NO: 27324

SEQ ID NO: 51304 - DNA, 201 bp, Homo sapiens; identical to SEQ ID NO: 27471

SEQ ID NO: 51305 - DNA, 201 bp, Homo sapiens; identical to SEQ ID NO: 27474

SEQ ID NO: 51306 - DNA, 201 bp, Homo sapiens; identical to SEQ ID NO: 27476

SEQ ID NO: 51307 - DNA, 201 bp, Homo sapiens; identical to SEQ ID NO: 27147

SEQ ID NO: 51308 - DNA, 201 bp, Homo sapiens; identical to SEQ ID NO: 27478

SEQ ID NO: 51309 - DNA, 201 bp, Homo sapiens; identical to SEQ ID NO: 27530

SEQ ID NO: 51310 - DNA, 201 bp, Homo sapiens; identical to SEQ ID NO: 27151

SEQ ID NO: 51311 - DNA, 201 bp, Homo sapiens; identical to SEQ ID NO: 27326

SEQ ID NO: 51312 - DNA, 201 bp, Homo sapiens
agcccaaatgacatagactctgggactgggagggactcgccgcatgtcgcctcaccttgaaatacagtttacatcttgtcaaatggttttaaaatacaagkcagagtatggcctttgggttcttgccccatctcacagttttcatatctttctggtttcaggtgacatgggaagtccaggccctaaaggtaattataacat

SEQ ID NO: 51313 - DNA, 201 bp, Homo sapiens
atctggagggaaaaggcaggagctgcctgcatttgcttcattttccctgtctctttcacagatatccacagctacagcagcagtggtggtggtggcagtgraggaggtggcggtgttggtggcgctggcggcggcccttggggaccagcgccagcctggtgcccctgcggctcctgctgcagctggtggaagtggctgctg

SEQ ID NO: 51314 - DNA, 201 bp, Homo sapiens
tttccttggtccagctgaccgggattggcgagcttccctgtgcacaggaatctccaaaagagtttgggccacatttcccgagcctttgactcagggggtakgcatgtgggcaggagtctttatcttagtcatccacggtgattctgcagccagaagaatactgagcaccacgttcaagatgacaggatcccacctctctcc

SEQ ID NO: 51315 - DNA, 201 bp, Homo sapiens
ctggccgaccaggaataaaaggtaagtgaatttccaaatgagatttctttcttttcactggccatttttgtggaaggaagggatggacaggaggaggcctytctctggccagagcctggatcaacagtggcatctagtggttctagcagagggctatgaggctgggagcccagggatttgtgaaccaagcccagtcctcaa

SEQ ID NO: 51316 - DNA, 201 bp, Homo sapiens
gtgggagtaccgtatccagagagtgtgacagacagggctgtcccgtggctgatggctgcgtgggctcctgggacacaatgtgcttcaaggccactgggacrgtagagggaggaatcgcagaaatcactccaggagcaactgagagaccttgcttctactttaccaggtcctgctggcccagacggacaccaaggcccaaga

SEQ ID NO: 51317 - DNA, 201 bp, Homo sapiens
cctggcatttcttctggtgcttctgtggtatccaaatctctatccctatctgggccagatgtccctctcaccagccttcctccttgcccctgcagtcttckgagttccaaacaacatggcgtcctgctcacccactttgcaccctggactcagcacatcctcctcaggtcagtgtcaccatcttgagatgacttttccagg

SEQ ID NO: 51318 - DNA, 201 bp, Homo sapiens
acggagcactagtgaccacccaagggtatctggaattgctgggccttcatcgtcctgactacttgttctaatcacatcaggacttcccggtacccctggcygaccaggaataaaaggtaagtgaatttccaaatgagatttctttcttttcactggccatttttgtggaaggaagggatggacaggaggaggcctttctct

SEQ ID NO: 51319 - DNA, 201 bp, Homo sapiens
ccaacacctaactcgttctgggtcccagatgagtcatatgaccatgctggattttctgctggggccgagagaaggatgttggctaagagtcctttccccgygcagcttaacggcacagttacgcagtcaacaagcttttgatgccggcccacagcaggaagagacctgtgccagtcacacagtggaatacaaaggaagttg

SEQ ID NO: 51320 - DNA, 201 bp, Homo sapiens
accagtcaggccctgtgctcagtccaggagccagccctgtcctgggtggaacagcacaggaacttaaaagcccccagtcgtagtcactcaggccagaaagycaccaaaagtcagagaatctggagggaaaaggcaggagctgcctgcatttgcttcattttccctgtctctttcacagatatccacagctacagcagcagt

SEQ ID NO: 51321 - DNA, 201 bp, Homo sapiens
gcacgtcgttgaaagcaagtttattaagaaagtaaaggaataaaaaaatggctactccataggcagagcagctagctcctccagtttaaaagctcaggtcmatctgtttgtcctttcaggagacctgaagactgtgtccacaaagggcaagaccaccactgcaggtgggtgagaaccgcgaaccctgcagtgacaggatcc

SEQ ID NO: 51322 - DNA, 201 bp, Homo sapiens
gtggcatctagtggttctagcagagggctatgaggctgggagcccagggatttgtgaaccaagcccagtcctcaagccccacccctccccaaacacctccycaccccacaaacctgagccttgctttcatacttggatgtctccaggccactgttgcaggaggttctagaagggcactgccctccccaaagcctttctgtg

SEQ ID NO: 51323 - DNA, 201 bp, Homo sapiens
ctaaaaaaagaaaagcaagctgcctacaatgctgactcaggcctaaaagccgaagctaatggtaagaacaaatatgattgttgtccaccttgacttcagcyaggccacatttcatttcattgtcttcggagaccttgctactcaaagtgtggtccacgggccagcagcatcagccacacctgggagtgtgttataaaagca

SEQ ID NO: 51324 - DNA, 201 bp, Homo sapiens
gaaccaagcccagtcctcaagccccacccctccccaaacacctcctcaccccacaaacctgagccttgctttcatacttggatgtctccaggccactgttrcaggaggttctagaagggcactgccctccccaaagcctttctgtgccctgttttgcctctaaatgcccccattagtgcttcatccccctggtttgtaggc

SEQ ID NO: 51325 - DNA, 201 bp, Homo sapiens
cactgttgcaggaggttctagaagggcactgccctccccaaagcctttctgtgccctgttttgcctctaaatgcccccattagtgcttcatccccctggtwtgtaggcttggtcccctcctaacaagtcttttcccctggggcaggagctacctttgcccttatctttcatatcagccttggtgtgaatggctacatcaga

SEQ ID NO: 51326 - DNA, 201 bp, Homo sapiens
aaagacaacacacctgctaagaaggagatggagctgctcatcatgaccaaggacagcgggaaggtctttacagcctcccctgccagcatcgctgcaagtgygtcagatcctgtgtggcttgggtttcagaagaaagccaaatagtgtaggagaccaaatgtcctagcaaggtggtttgggaccctatgagtcatgaaacca

SEQ ID NO: 51327 - DNA, 201 bp, Homo sapiens
tggcagagagcagcctcgtgacagcttttgctcatttctattttcttctctctatagaagttcttaatttacaaggtcccccaggcccacccggcccacgygggccaccaggtgagtatcttggagacctttggaaggtggggagtttgggggacaggagattcaatgcacttagtgaggaagccaagatcctcaggggtg

SEQ ID NO: 51328 - DNA, 201 bp, Homo sapiens
aatgtcacgcaggagccagtttgtgcaggggagcccaggctgtggctggaccatggctgcgacccccatggcctgggtgggtcctgctagtgcatcctctsctctccaggggatgacgtgcgtcagtacctacgtcagtacttgatgggccctcggggtccgccagggccaccaggagccagtggagatgggtccctcctg

SEQ ID NO: 51329 - DNA, 201 bp, Homo sapiens
ttgatttttatgtcaaaagatatcctgctttttcttgaatgatgaaggttgtcatttccatgtacagtatttataaccctcatttttaatgatgggatagsattctgctaaatgaattcaccatagtttattttatcatttccaaatttaggggtacagggcaacagaaatctaaacgaataacatcctagttattgtatc

SEQ ID NO: 51330 - DNA, 201 bp, Homo sapiens
gtgttaacacccacctcgtactgaaaagcagctcctgtgctggtgccacaccggctacctgtgccctcagtccccagactcatgtattacttagttacgcyccatttttccttccaggtgacaggggccctgctgggccaccaggtcatcctgggccacctggccctcgaggacacaagggagaaaaaggagacaaaggta

SEQ ID NO: 51331 - DNA, 201 bp, Homo sapiens
gtacgtgtcaggcccgccagggccccctgggccccctgggcctccgggctctatcagcagctctggccaggagattcagcagtacatctctgagtacatgyagagtgagtagctggccgccgcaagccgtggggacaagaacatggagatacagtctctttgcaagggagctgtggtatcatcacagaaatgaggctaaga

SEQ ID NO: 51332 - DNA, 201 bp, Homo sapiens
ctactttaatctatccacgacttttgtaaatccatcagtcactaggttggaaaaaatccagaagtaagagaccgaatctgtttaaaacccttcagggaacytgtgatctagaaaaaacacaagatgagaaaataaagcctggagtggaggataaggaggtatccagatgtatagtccaaacagtaaatgtttggagcaaaa

SEQ ID NO: 51333 - DNA, 201 bp, Homo sapiens
tcagtaggctagggttggagcttaggcgctggaaagtgacacctctttgcagctacaactcactgaattaggagacccaaaatgtccctgaaaatcagtcracctttcccaccaaagacacaacactcaagatatcaatcttgatcattaactggctcagacatgagtcaagcacacaaggaaggctgtcctgtcaacagc

SEQ ID NO: 51334 - DNA, 201 bp, Homo sapiens
gactcagcacatcctcctcaggtcagtgtcaccatcttgagatgacttttccaggctatttgcatagaagtgttaggatgcttcacccaagagcatgaagrcctttcttccatgcatactgcagctcagaagcagaggcacagggttgcacagaacctgccttcaaccacagggagaactcagaccccaagggaaaagtct

SEQ ID NO: 51335 - DNA, 201 bp, Homo sapiens
ttagaatctgatctctagtctttgcctcagtttcttcttcccataccatgatccccttattgtgtgtgtgtgtgtgtgtgtgtgtgtgtgtgtgtgtgtgwgacaggagatgtgaagctgactcaggatttgctttttcttgcaggaaatctccgaggaagccctggccctaaaggtattgccatggattgaaccttgtct

SEQ ID NO: 51336 - DNA, 201 bp, Homo sapiens
tctaaatgcccccattagtgcttcatccccctggtttgtaggcttggtcccctcctaacaagtcttttcccctggggcaggagctacctttgcccttatcwttcatatcagccttggtgtgaatggctacatcagacccttcctgagaggaggctttagtacaggcagagaggagtgttaagatgctactgagagggcaag

SEQ ID NO: 51337 - DNA, 201 bp, Homo sapiens
agcccctacaactgtcccacagagcactctaggaatcccgctctacctggcgggctcatcgcctctgtcctttgacctttgagtaattttcccacctaagrcgattcccaggcagaggtggtggaatgtgggagcatgaaggactctccagtcagccccattctgggctcactgaaaggcaagctttccacatcctcaagt

SEQ ID NO: 51338 - DNA, 201 bp, Homo sapiens
ttcaccatagtttattttatcatttccaaatttaggggtacagggcaacagaaatctaaacgaataacatcctagttattgtatcatagttgacctctacrctgaaaattgaaaacaaataaatttattttgtggaactgcccaaataataaattcagaaacatttaaactctcctcctaccaactctaagtcaggaaact

SEQ ID NO: 51339 - DNA, 201 bp, Homo sapiens
gacgtgaaaggtgtgttttggaaaaggaggacagggccagggctcttcaccggggtcttgcaaggtgattccctggggcttggggcagctgtcagagaagktctgggattacaagaggaccaggggcagacttggccttgaagatgagtatctggcaggagtgtacagctgacccagagagcaatgacaaccgtctgtggg

SEQ ID NO: 51340 - DNA, 201 bp, Homo sapiens
actttggtgtatgcattctgcttagggtaggtctttcaaaggaaataagtggggaaaaggagaaggctgaaggctggttaaaatatagcgggctttagagrcaagacctttctgcattgttttcagcattgtaaaatgacttgtgttgttttatttagaatatgatacgggcttataattccttctctcccaatctcagtt

SEQ ID NO: 51341 - DNA, 201 bp, Homo sapiens
agaagtctgtgtttacattgtttgtttcatttgccattattaacagtggcaggacacaactgtaaacaaaccagcataatcacaaagctggtgccctatcycacctgctcccagtcatgaaaatccaggataccaaatgtagcaagcagcaaacccatctctggggtgttacagagacaaagcctccaagatattcaattc

SEQ ID NO: 51342 - DNA, 201 bp, Homo sapiens
gaactgaaagtgaccaaagttcctctccacttcttctggtgaaggctgatcattccagtgaggatgttgctctattcgttcattcatttctccatgattcrttgttgattggctgtcttctccatgtgctaggacctatgagctgcctttaaggaggttacgagttattgggttgaggggaaggacccaggtacatataat

SEQ ID NO: 51343 - DNA, 201 bp, Homo sapiens
gattgttgagacacacactaataagtgtggtttggcttaaccagggaaggcttcctggaggaggtgaggcaaacttctcattttggattccaggtgatccrggtgttccaggggctcttggcattcctagtggtccttctgaaggtaagaactgaaagtgaccaaagttcctctccacttcttctggtgaaggctgatcat

SEQ ID NO: 51344 - DNA, 201 bp, Homo sapiens
ctgtcccatagggacttctctaagagggtacatattagacatctgctgtttagaaggaatagggaaattctcaatgtccttcttacattgttctaattctytcctcaagtttggataaggatttacgggagcattgggtttagcttctttatgatccccagattcctcttcctccagccttcctgttactccctgatctcc

SEQ ID NO: 51345 - DNA, 201 bp, Homo sapiens
aggtaagaggcaattccttcaccggcagagttagctatgcctgtgcttccttctctctgtcaacacccgtccctccttcactctgtctctgtttctccccscttccttcatttactgagcacccaccctgagtcagggtctgtgctaggccctgcagagacgctgggcataggctgggctacagggccaggcctagggctg

SEQ ID NO: 51346 - DNA, 201 bp, Homo sapiens
ctgaaacccagggcaggaactgaacctggtaaagagaataaggagtttggcctgagaaaagcaaactcttgcattctcagacaatgaggtagatcagttaycctacttcacagcataggaggtgaatgtgctctcagcatttagagaaggggaggctgaggcttggagtgggtaaatgacttgcccaaggtcccacggcca

SEQ ID NO: 51347 - DNA, 201 bp, Homo sapiens
ggccagatcccccaaatgaagaatactggggaaatgtgtagagttttcgtgtattcattcagtgactatttattaaatgtctcctctatgccaagcaccargcattgaggaaaagcaatggacaagagagacacagtcactgcccttgtggacagtgggtctctggaggaagtcagaaaaccaacatgtcccagtcaagta

SEQ ID NO: 51348 - DNA, 201 bp, Homo sapiens
cagtctattttcttgctttgccccaaatcagcaataggtcttggcggtagtgactctagccatatttcttcagatcctgaaacccagggcaggaactgaamctggtaaagagaataaggagtttggcctgagaaaagcaaactcttgcattctcagacaatgaggtagatcagttatcctacttcacagcataggaggtga

SEQ ID NO: 51349 - DNA, 201 bp, Homo sapiens
tccgcagcactaccccgacctttctttctcttccttctgcccagctgccggcttgtcattcatcccaggccctccaggacctcctggtcccccagggcctygagggcccccgggtgtctcaggagccctggcaacctatgcagctgaaaacagcgacagcttccggagcgagctgatcagctacctcacaagtaggtgccc

SEQ ID NO: 51350 - DNA, 201 bp, Homo sapiens
gcacagggctttccctaatagcaacctgttttagggcatagatatttgtttgcttgtgacagctgcctttggtttcctaaattcccacaatgtaagactcrgcaggcattgaattttatggtttagggggtagaggttttagttatgttgattattagattgattggatattccctactttccacccctagtactgggccc

SEQ ID NO: 51351 - DNA, 201 bp, Homo sapiens
ttcccatgaatgttcctatcagaagggggcaggaagctccaccctccatacctgcctagggccaggcacttgcacattagccactgcccttgactggaagyctttggccttcacctgttacatgcagctcatggagccctcagaaactgctggcaccctccctgctttctacaaaatctatatcaactttgtccacatatt

SEQ ID NO: 51352 - DNA, 201 bp, Homo sapiens
ttagctaccagcttcctgcccctcccatctctgaagaggccaaaatggcaagtaaacactctggcttttagaatcttttgccaatgcctgagaccatggasgcaggagagaaccttggttctggcagccatgaggtggatgatggggaaaggattgaccattgctgattgtactggaacctccttgctcagcctggaattt

SEQ ID NO: 51353 - DNA, 201 bp, Homo sapiens
atgtgctaggacctatgagctgcctttaaggaggttacgagttattgggttgaggggaaggacccaggtacatataatgatacctaacaatgcagacaccrcatgatggagaacagacagacccagggtgctggggagttgagagaagggggatgcgatgttgggggtccttcagcaggttgcagaaggaaagggcggttt

SEQ ID NO: 51354 - DNA, 201 bp, Homo sapiens
ccagagcctctccaaaccctggctgactgcactgtgtgtgttgttggcttccagggtccagttctttcggactcaaccttcagggaccaccaggcccaccwggcccccagggaccaaaaggtgacaaaggtcagtgagggagcagtgagaaggtggtgaggagtaggggtgagcctggtgcccagagcccagagcctgaag

SEQ ID NO: 51355 - DNA, 201 bp, Homo sapiens
gcttgatagaaaggcacctggtgcaaataagcaagagtagagcagtgtttctctatgaatggttgagtgtgtgcatgggtgtagtgcaagtgtgcgtgtgygtgtgtgtgtgtgtgtgtgtgtgtgtggcatctctaggtactgcccaaagggcaacgcagccccagcaatcatggatcttggggaggctctacagggctg

SEQ ID NO: 51356 - DNA, 201 bp, Homo sapiens
attccgaattcataataatcgggccactgggatacagtgtcaacaagggtctgtccagattcagggcggccacgctggagagacaccgagtgagccttcckgcaattgactaatgtgttcctaattataggttcttcccacctgtgcatgaaggttggcagcatctggcaggcattaggctaaagcatgttctcaaaaata

SEQ ID NO: 51357 - DNA, 201 bp, Homo sapiens
ccatctcttctgaagacatcctggctgtgctgcagcgtgagtcacctgtggggggatcgagggtgggactatctttgctttctcctggcctcactcgtcakgcaaaccttgtcctcgtctgagccttggaagggctgcaagagggaggcagagtcctttggacaaagagccacttactgctctgatctgcttgctgagtca

SEQ ID NO: 51358 - DNA, 201 bp, Homo sapiens
ggtcccccaggacctgtcaccaccatcacaggcgagactttcgactactcagagctggcaagccacgttgtgagctacttacggagtaagcccttccccaygccctgcacctggcaccttcctcctgtgggtctgcttttgctcccagagcctcatctcctcgtttgctgtttgctttgcccttctctggaacatgagttt

SEQ ID NO: 51359 - DNA, 201 bp, Homo sapiens
agttggagggcttcacccttgctgcggcttgatctagttcaactgctttgggagtttgacactcggagggcactgtgctcctgctgaagagggtactgggmgatccctgcttcctgtgcccaagctctggtgttttacaggtcagggcctactgcaagggatggcctacactgtccagggcccaccaggccagcctgggcc

SEQ ID NO: 51360 - DNA, 201 bp, Homo sapiens
attcaggcaaatgccaattactccaggcagacactgccaaaagcagaatttgcataacaatcccattcacagtgaggaagaaaaggagagtgtcaaagcakggaggaaaaggagaaccaagctggtgttgaaatggggcaaacaagttaaataaatgtagtcttacaaaagatttcacctttgaagccatctttgcagtag

SEQ ID NO: 51361 - DNA, 201 bp, Homo sapiens
ggtagtgggcaagggcggggggaacacaggacagagttgagaggttgagaagagaatatgccaggttataatgggttctgtacatagcttctttttcagargacaccctaaaaaaagaaaagcaagctgcctacaatgctgactcaggcctaaaagccgaagctaatggtaagaacaaatatgattgttgtccaccttgac

SEQ ID NO: 51362 - DNA, 201 bp, Homo sapiens
tgtgtctgtttccagtgtcaggcacctacgatgcaatgatcctggatgccaaccttccctcccatgtgtggtcctccaccctgcccgcggggtcctccatsgggacctatcacaacaacatgacaacccagagctcatccctcctcaacaccaatgcctactctgcgggatcaggtacctggcgggcagcccacaccctct

SEQ ID NO: 51363 - DNA, 201 bp, Homo sapiens
aggaggagcatactgccctatggggacagcatggatagaatagaaaaggaccgcctccagggcatggcacccgcggcgggagcagacctggacaaaattgrgctgcacagtgacagccaggaggagctctggatgttcgtgaggaagaagctaatgatggaacaggaaaatggtgagagcatcgccgggcacagggccagc

SEQ ID NO: 51364 - DNA, 201 bp, Homo sapiens
attagccaagcatagtggtgtgcgtagtggtgcacactcatattatactaaccccatctctactaaaaatacaaaaatacaaaaattagctgggtgtggcrgtgcatgcctgtaaccccagctacttgtgaggctgaggcaggagaattgcttgaacccaggaggcagaggttgcagtgggccaaggttgtgccactgcac

SEQ ID NO: 51365 - DNA, 201 bp, Homo sapiens
atataactcacttatagaaagtttcctcttatatttcgtttaaaggaatcagtctcccaacacgtacctggcacctcagattggctgtggaacacacagayattggggtggcttcagattgagagagaggcatctacctgtacctgcctagagcaggttatatccacaaagtaccttccaatgaggagctcccaggccctg

SEQ ID NO: 51366 - DNA, 201 bp, Homo sapiens
tcaagtctgtctgtgatgtgcctggatcactgattttgccaaaccccaaatgtgacttaccaggagcacccttccttcccacaactccccacattcagggkttgccctgaagacattagaacgaaacataatgttcttaaacacctccaaattcatgaagaagtacacagtgaagtcagctagggtgttggtctcagctga

SEQ ID NO: 51367 - DNA, 201 bp, Homo sapiens
ttttcagggtaaaggcattgttaatttagaaggattttatttcagatcttttaaagaaaaatagaattcattgagtaactactttcagatctttctataartataacacatagtttgttggagtaactatattggggtaaataatgttactgcttatcttccaatgcaaacataacaacaattttaaagaaatatttattt

SEQ ID NO: 51368 - DNA, 201 bp, Homo sapiens
atagggaccttggcagcttgggtggggcttatcttcttttcaagtcttaattagcaccgagatgccaggctggaagtggtgaactgtgaactcaagaggckgggtttgagttcgaagtccttttaagctaaaggatgacagggtggaggatatggccagtatatgatttcttaaaaactggtttttggtttccatagtagg

SEQ ID NO: 51369 - DNA, 201 bp, Homo sapiens
atgcccatgattctgattaggtgtggtttctggttgagcccatgccacttcccaggggttccaagtggccctgaccttggaatcaaagcagaagctgcttycttgacctcttggaggagggagcagaccaccattgttaaagcatacacagcttgcaagtgtccaaccagctagttctttgtcctttgcaggcgagcctgg

SEQ ID NO: 51370 - DNA, 201 bp, Homo sapiens
aaaatgtccctgaaaatcagtcgacctttcccaccaaagacacaacactcaagatatcaatcttgatcattaactggctcagacatgagtcaagcacacarggaaggctgtcctgtcaacagcatcaccttgtaaggcatcacttgtatgttcctgtgtctctcacagccaaactggttaggttggtggtcttgccagctc

SEQ ID NO: 51371 - DNA, 201 bp, Homo sapiens
ataaggatttacgggagcattgggtttagcttctttatgatccccagattcctcttcctccagccttcctgttactccctgatctccctgtcctctacttkgtgagatgtaaagtggaggcaagcgtgttatgggattccagagctttttattgggtgagggctttttactatgctcttttttttcctcttgaagcgggag

SEQ ID NO: 51372 - DNA, 201 bp, Homo sapiens
tccatctaaaccctcattactgtccccatggctggagagagttgattcatcatctgcttctcactggagagggtcgggggtacctctctgccagggctgaycaggcttctcctgagtcacctggaaccaccctcccatgctgacccagcttcctttcttgcagcatatggggtgaagaaaaacatgccccagagtcctgcg

SEQ ID NO: 51373 - DNA, 201 bp, Homo sapiens
aaacattaggccagaacctgttcctagtggaaaatccatccacccatccatttatccatccatctacccatccacctatccatccatccatccatccatcyatccatccatccatccatccatccacccacccgcccattcatccacccacccattcatccatccatccacccatccaactatttgacaagtattgattga

SEQ ID NO: 51374 - DNA, 201 bp, Homo sapiens
gggtaggggtggggatggcaaaagctcacctcccaagagctttgagcttgatagaaaggcacctggtgcaaataagcaagagtagagcagtgtttctctakgaatggttgagtgtgtgcatgggtgtagtgcaagtgtgcgtgtgtgtgtgtgtgtgtgtgtgtgtgtgtgtggcatctctaggtactgcccaaagggcaa

SEQ ID NO: 51375 - DNA, 201 bp, Homo sapiens
gtgcgtccccatccacccgatgtaagtggtcatgatcttgctgaaaagaaagggtccagaaatccagggctagtgctgtgtgtgtgtgtgtgtgtgcatgygtgtgtgtgtgcatgcatgcacacacatgtatgtacatgcatgcaatcataaaacatctttaagggtcttctgtgaattggaccctgggttaggtggctg

SEQ ID NO: 51376 - DNA, 201 bp, Homo sapiens
aggcccaccaggtgagagccgagcttaccactgggaggtgggagggggaggtgagaggtgggtagcaatgggaccctgagcccagggccctctgggctggyttataggaaagagcttccctgctgcctcctcctgagcagagggttcctggctcccctcttggcactaataagtcttgggggttctctttcctaggggagg

SEQ ID NO: 51377 - DNA, 201 bp, Homo sapiens
cctccacctctagttacaggagggctcactcacctgcctccactctgcccaactccccaggctcaacctttgaaaggaaaactcacgttacccgccatgcrtatgaaggtatcagtcccactaaccatacaagagaaccattctcttccccaagcaacttcactcattctttgaagatttacatgctggccacctgtgtct

SEQ ID NO: 51378 - DNA, 201 bp, Homo sapiens
gcttttgctcatttctattttcttctctctatagaagttcttaatttacaaggtcccccaggcccacccggcccacgtgggccaccaggtgagtatcttgragacctttggaaggtggggagtttgggggacaggagattcaatgcacttagtgaggaagccaagatcctcaggggtggcatcagctccctgagctcagca

SEQ ID NO: 51379 - DNA, 201 bp, Homo sapiens
gtagtcttacaaaagatttcacctttgaagccatctttgcagtagtcacggttgccataattgcccaagccaagatccccacaggccacaagatatgtttyaacttcctactgatcttctaactttcaggtgaccaagtctatgctgggcggagaaggagaagaagtattgctgtcaagccgtgagctagccatggcagga

SEQ ID NO: 51380 - DNA, 201 bp, Homo sapiens
atattgacattaatttctatacaacagaattcgccagtttgaagtgtataattcagtgattgctagtatatttaccaagttatgcagccatggttacagtycaattttagaagatttccatggctccacaaaaagaagtgaccattagcagtcattcctcattctccctcctctctcctcagcccctggaaaccacaaatc

SEQ ID NO: 51381 - DNA, 201 bp, Homo sapiens
gcggagaaggagaagaagtattgctgtcaagccgtgagctagccatggcaggacagctcctggaccaggtctcataatgcatgtggcacttaggtccaagstctccagagggtgaaagctggagtctgtcaatgtcctactgagacagcacagccaacctagctagcaacatttgttttagtctgaacaatatatacttat

SEQ ID NO: 51382 - DNA, 201 bp, Homo sapiens
ggggaccccagtgaattcctttatgcagtatggacatcagttttctcattatgggtttgcttatcatttctctcccatcagggagcacccacctcccatcytcagtttgagtggcccctatcttgcccagctcttcctcctcctttttagaaaatttgggttttaatatcaccttagggatctgtgggattaggctaaaca

SEQ ID NO: 51383 - DNA, 201 bp, Homo sapiens
attcacttcccctctaggaggtgatgatagggtttctaatggttatatgtatatcacattcccatttgcttagaaagtctgattgtagctatgattgtccrtaggcccatactagagttcatggatatgttatactgaaccaggccagagcaaacagaaaaagaaggttgagggcaatggacaaggaaggaataaagggag

SEQ ID NO: 51384 - DNA, 201 bp, Homo sapiens
cagttggcaggatggggaattgttggaggtagggaggtctccctttttaagcagcactcttcttgggcacacctagatttcctgtttccagagctcagaartgtcagagcagcctaaagggccatctgctgctaggagttcagtgtcagggattgtgatctaagctccttcattcacacccttctctatctcttcccttgt

SEQ ID NO: 51385 - DNA, 201 bp, Homo sapiens
ggaattttattagaacatctccagctgcctgggaggtatgcagttggcaggatggggaattgttggaggtagggaggtctccctttttaagcagcactctkcttgggcacacctagatttcctgtttccagagctcagaaatgtcagagcagcctaaagggccatctgctgctaggagttcagtgtcagggattgtgatct

SEQ ID NO: 51386 - DNA, 201 bp, Homo sapiens
caggagctccaggcaagatcgtgacttcgggtaggcaggtcctagagggaccctcctttctgtgtctttcttatactgggcacctaccttgactctgcagygttctgggcaggatgtggctgggagttttttggatcagtagcgggggaggagggaaatttagcagcgatgagaagaagaaatgccaggctgcccaccaca

SEQ ID NO: 51387 - DNA, 201 bp, Homo sapiens
caaaatgaggtgactagattccccagcagggagtgttgatttgtctctcactggggtgtgtgcatgtgtctgtttccagtgtcaggcacctacgatgcaaygatcctggatgccaaccttccctcccatgtgtggtcctccaccctgcccgcggggtcctccatggggacctatcacaacaacatgacaacccagagctca

SEQ ID NO: 51388 - DNA, 201 bp, Homo sapiens
tagattcctgccttcactaagctgatgtcagtggtggaggcagacgacaaacacataaagtatgcaagataattacagaaaaggatacagattataaggamagcaataagtaatgtggtagagataggagtgtgtgtatgagggtgaagtgctttagatggggtagtcagttaaagcctcctcaagaaggcaactcttaag

SEQ ID NO: 51389 - DNA, 201 bp, Homo sapiens
gcaaacattaggccagaacctgttcctagtggaaaatccatccacccatccatttatccatccatctacccatccacctatccatccatccatccatccayccatccatccatccatccatccatccacccacccgcccattcatccacccacccattcatccatccatccacccatccaactatttgacaagtattgatt

SEQ ID NO: 51390 - DNA, 201 bp, Homo sapiens
aattacagaaaaggatacagattataaggacagcaataagtaatgtggtagagataggagtgtgtgtatgagggtgaagtgctttagatggggtagtcagytaaagcctcctcaagaaggcaactcttaagacctggaggataaaaatgaacccaagttagttaaggaaggacttacctgactgggggacttttacccatt

SEQ ID NO: 51391 - DNA, 201 bp, Homo sapiens
tcctccagtttaaaagctcaggtcaatctgtttgtcctttcaggagacctgaagactgtgtccacaaagggcaagaccaccactgcaggtgggtgagaacygcgaaccctgcagtgacaggatccagtggggctgcttatggctaatggaccagatgatggtccctcgcctggaagcagtgcagtgcacagaagccaccag

SEQ ID NO: 51392 - DNA, 201 bp, Homo sapiens
tgcagcatatggggtgaagaaaaacatgccccagagtcctgcggctgtgaacactggcgtttccacctccgccggtgagtgctgctcccagctgccagggdtcaggctggtgcacagggaggattactctgcagtaatcctgcctgtgtatccttccaatacacatggtatactggaagaggaaataggacccatgagtgg

SEQ ID NO: 51393 - DNA, 201 bp, Homo sapiens
tggaacaggaaaatggtgagagcatcgccgggcacagggccagctcccctgagtccctttcttctttgcatctatgtggtatgtgtgcatgtgctgtgagyaccatcatccggcccactctcggcctctctcctcccctgatcctctcaatagcgctgagaggtaggtgggaccaagactgtggtcccactttactcctgg

SEQ ID NO: 51394 - DNA, 201 bp, Homo sapiens
cattttctttctccccagcctgcaccacaagtgtgcagagcgatgaccttttgcacaaggactgcaagttcctgatcctagagaaagacaacacacctgcyaagaaggagatggagctgctcatcatgaccaaggacagcgggaaggtctttacagcctcccctgccagcatcgctgcaagtgcgtcagatcctgtgtggc

SEQ ID NO: 51395 - DNA, 201 bp, Homo sapiens
tcctcccctgatcctctcaatagcgctgagaggtaggtgggaccaagactgtggtcccactttactcctggaaaaactgagttctggaaagaataattgcycaagatcactggactagccaaatttagaatctgatctctagtctttgcctcagtttcttcttcccataccatgatccccttattgtgtgtgtgtgtgtgt

SEQ ID NO: 51396 - DNA, 201 bp, Homo sapiens
ggccagcagcatcagccacacctgggagtgtgttataaaagcaggatcccagccctagctcagatctgctgagtcagaagctgcagttcaacaagcttccyaggtgatttgcatttgcattactgaagcaaaagcctgcctctgccatgtctacgaaggcatttgttttctcattttactttttctccataatcttcagaa

SEQ ID NO: 51397 - DNA, 201 bp, Homo sapiens
ggatctgtgggattaggctaaacaatctaacttcttcctccagggaagcttgcttagcagctttatctgcaagcctgttccccacagcttctatagttttkcctatggctatctctgctagaagcaagaggctttttaaaacttgtttgatcagttccccatgtacaaattctttctccctgctatttattaggccccgct

SEQ ID NO: 51398 - DNA, 201 bp, Homo sapiens
accctggctgactgcactgtgtgtgttgttggcttccagggtccagttctttcggactcaaccttcagggaccaccaggcccacctggcccccagggaccmaaaggtgacaaaggtcagtgagggagcagtgagaaggtggtgaggagtaggggtgagcctggtgcccagagcccagagcctgaagagatggcagcaagta

SEQ ID NO: 51399 - DNA, 201 bp, Homo sapiens
tctcctcttttacttgttgaagctcgaatgcttttgagacattctgtgtccttgaagtggactctttaatccctttaattattcgttcccttaggtcctgyatttgggcccgatctttggggttattgttattccatctgggatttgcatttaggaatttctgctcagctggcgggactccttgcccgagaggatgctgtc

SEQ ID NO: 51400 - DNA, 201 bp, Homo sapiens
gtcattgtcccagccctccttccccaagtctccagcccgcacacccctcctgaccatgttagtggtggggactgatactgccagagtacctgaacctgcarttgtcagataaaatacaggactcccagttaactttgaagataaacaacaaataatttttcactataacttgtcccaaatatttcatgggacatacttata

SEQ ID NO: 51401 - DNA, 201 bp, Homo sapiens
atgggattccagagctttttattgggtgagggctttttactatgctcttttttttcctcttgaagcgggagcatgggggttaattcactaatttaacaaasagcataacccgtctcctcttgtgaggatggggttttattattcacatagagaattaaagcttggcacacccaatcctcgtctgagccaaacttaggccaa

SEQ ID NO: 51402 - DNA, 201 bp, Homo sapiens
tggactatttgggagaatgttagagggtgtctttttagttccctcttttgttgggcaggggctttaggtgtttgtttagggttgtcttggtgcattttgtkgcagcccacaatgcattgcaatcctagttagcttaggggctcttcaagtatttgacttatgacctaagtagctgggcaagctgataagaacagacaaaaa

SEQ ID NO: 51403 - DNA, 201 bp, Homo sapiens
gggtttcactgtgttagccaggatggtctcgatttcctgaccccgtgatctgccccccttggcctcccaaagtgctgggattacaggcttgagccaccgcrcctggccagccatatctatttctatcagctctcacaccacctcacagggagagtgaggacaagctttgtcacccagctcagatgagaagactgactccca

SEQ ID NO: 51404 - DNA, 201 bp, Homo sapiens
tttccacctcccccttgtttgctttaggtgaccagggtgagaaaggacctcgaggcctcacaggtcagtctgtcatgggaatctactttaatctatccacracttttgtaaatccatcagtcactaggttggaaaaaatccagaagtaagagaccgaatctgtttaaaacccttcagggaacttgtgatctagaaaaaaca

SEQ ID NO: 51405 - DNA, 201 bp, Homo sapiens
tgcttcagtacctgctaagcaggtaacctgaggttttcttcccgacagcttcggggtacggtgtcagcttgttctcgtcctccatctcttctgaagacatyctggctgtgctgcagcgtgagtcacctgtggggggatcgagggtgggactatctttgctttctcctggcctcactcgtcaggcaaaccttgtcctcgtct

SEQ ID NO: 51406 - DNA, 201 bp, Homo sapiens
gggaaggagtccatggaaagcatcctttgacttttactatagggtgtgtgcatatgtgtgcctgtatgtgtgcatgtgtgtgcatacatgtctcatcattycaaagctagggatactcatctgtgtgcatggtttcttctgccgggcaggtcctgtaggtctccaagggctccgaggtgaagtaggacttcctggtgtcaa

SEQ ID NO: 51407 - DNA, 201 bp, Homo sapiens
cctgcaggtggctatggtatggatgtaaccaagaaaaacaaacgagatggaactgaagtcactgagagaagtaagagcatcagaattttttaatttatgtrttttattatgaaagtaataaaaatttggaaacagaataagtaattcattaataattctaccacaaccactgtatcatgtttaagtgtgttcctaaatgga

SEQ ID NO: 51408 - DNA, 201 bp, Homo sapiens
catacactcccacacacacactcccatacgcacactccgatacactcccatacacacacacactcactcccatacacacatactcatacacacacacacasagaatgaagcacacaggcacactggacctgcttctccggccccgtgggcccctccgttcctcctttgggctcctcctctctgcctctcttcctgccacca

SEQ ID NO: 51409 - DNA, 201 bp, Homo sapiens
tccatgagcacaggaggaggtggtgcaggctccctgggtgcaggcggtgcctttggtgaagctgcaggagacaggggtccctatggcactgacatcggccyaggcggaggctatggggcagcagcagaaggcggcatgtatgctggcaatggcggactattgggagctgactttgctggagatctggattacaatgagctg

SEQ ID NO: 51410 - DNA, 201 bp, Homo sapiens
agctctcagcctactcagcttaaggagccccagtcctgggacccgagctgtggggaacagagcacgctgggggctttgtactttgttttcccaacacctarctcgttctgggtcccagatgagtcatatgaccatgctggattttctgctggggccgagagaaggatgttggctaagagtcctttccccgtgcagcttaac

SEQ ID NO: 51411 - DNA, 201 bp, Homo sapiens
gtcaggaaacagcaggctctggcctcctgcttttctctcctcccatcacccgggaggcccagcctcatcccctcctttcaggtggggcccacagcgccccragcacaggctgggaattcagcttcctccgcagcactaccccgacctttctttctcttccttctgcccagctgccggcttgtcattcatcccaggccctcc

SEQ ID NO: 51412 - DNA, 201 bp, Homo sapiens
gccacatgtgctggcaaggggccttcagccgtggcagggacagaggtggggagagatggctttcccaggcgcagcccggtgtgtgattagggccgacctgsggctccacctctcagtgactggagggctgagttgaatgaggctcagaattgggagtgggagagcctgacgggaacagccattcctggatgatgtcaggaa

SEQ ID NO: 51413 - DNA, 201 bp, Homo sapiens
gtcttttctcccctctcccttctcctggcacatgtccttccttcttacccattttctttctccccagcctgcaccacaagtgtgcagagcgatgacctttygcacaaggactgcaagttcctgatcctagagaaagacaacacacctgctaagaaggagatggagctgctcatcatgaccaaggacagcgggaaggtcttt

SEQ ID NO: 51414 - DNA, 201 bp, Homo sapiens
tgtcatccattccaaatccccctgagagttatctaaataacacacagctattgggcagcagggctggagaccgggggtgcaaattataaatcatcagcatytgaagcctacttaaaatcagatccattttcattaagtccacaatataaataactatcattaattaagacttcatgggtaggtagctatttcctcactaaa

SEQ ID NO: 51415 - DNA, 201 bp, Homo sapiens
cagggcagacacaattttgaatcagtgcacaaaagggacaattacaatcacctgtcatccattccaaatccccctgagagttatctaaataacacacagcyattgggcagcagggctggagaccgggggtgcaaattataaatcatcagcatttgaagcctacttaaaatcagatccattttcattaagtccacaatataa

SEQ ID NO: 51416 - DNA, 201 bp, Homo sapiens
taaacacctccaaattcatgaagaagtacacagtgaagtcagctagggtgttggtctcagctgaactgagagaccatggggaaggagaaatgcagagaaayggagtgacttgagacaagagggcctggtcctccttcaacctcagaccaggcctggactggatctaattgtccaaggagagacatcaacagcaaaacaact

SEQ ID NO: 51417 - DNA, 201 bp, Homo sapiens
cctgggccgcagggaccccctggggacagccgcctcctgtccacggatgcctcccacagtcggggtagcagctcctcctcacacagctcatctgtcaggcrgggcagctcctacagctcttccatgagcacaggaggaggtggtgcaggctccctgggtgcaggcggtgcctttggtgaagctgcaggagacaggggtccc

SEQ ID NO: 51418 - DNA, 201 bp, Homo sapiens
gggtactgggcgatccctgcttcctgtgcccaagctctggtgttttacaggtcagggcctactgcaagggatggcctacactgtccagggcccaccaggcyagcctgggccacaggggccacccggcatcagcaaggtcttctctgcctacagcaacgtgactgcggacctcatggacttcttccaaagtaagggcatcca

SEQ ID NO: 51419 - DNA, 201 bp, Homo sapiens
ccgtgcctggcctaaacactcaactttcaaatagcatcacggactcaggaacaatcctcctccaagctcatccttctcattcccaattccttccaccccargtcaggaacttgtgttcagagtcccttaaccaagaaatcagagtcatttctcacaaccacacttattgtttgaatgcaagcggcacccataacttggtgt

SEQ ID NO: 51420 - DNA, 201 bp, Homo sapiens
agcatcccccagaaaagcagtccctggggagtcaagactagggctgtaagtttagccccataatgggcttggggccatgtttccatctctcttcaatggcyccgttatgtgatccctaagtgggtggatggatcattcaggaaatcagaagttagaccatttccttgactgactgcggcccagatgcacacaccaaaagta

SEQ ID NO: 51421 - DNA, 201 bp, Homo sapiens
tctgagcaagcacctgcctctctcttgtcccctatggccacagagcttgtcctgctgtcttgagaatcttgagctgtggccagtgcctctgccaagactckacaatgtgttctaatgcctgttcatcagcagaggcaaggaacctgggccaaaatgacttaaaaaggacttgggaaggagtccatggaaagcatcctttga

SEQ ID NO: 51422 - DNA, 201 bp, Homo sapiens
ggagcctgtcttcagagacagacattgccccttcctggttgtcccttgtagggcattttacaccaaggtgtccatttcctttttaggtgacaaaggaccartgggaccaccaggacccaaaggtatgccactcactgctgctctgtcattaccagggcctgcctcactcctgggagcccagatgggaccctcactgtaggg

SEQ ID NO: 51423 - DNA, 201 bp, Homo sapiens
tccagaagtaagagaccgaatctgtttaaaacccttcagggaacttgtgatctagaaaaaacacaagatgagaaaataaagcctggagtggaggataaggrggtatccagatgtatagtccaaacagtaaatgtttggagcaaaaaagaaagtgtaggattgtctctgattcttttggggaatacagttgagaaaattaag

SEQ ID NO: 51424 - DNA, 201 bp, Homo sapiens
cagctggagccaggattgccagacttctggtcagcaccagtcaggccctgtgctcagtccaggagccagccctgtcctgggtggaacagcacaggaacttraaagcccccagtcgtagtcactcaggccagaaagtcaccaaaagtcagagaatctggagggaaaaggcaggagctgcctgcatttgcttcattttccctg

SEQ ID NO: 51425 - DNA, 201 bp, Homo sapiens
ctcctccaccaactccctggcacacactccctttcactatgagtcgtgagaagcaccttaggaaggaaaaataggcacagaacaatctagaacaccattckagtagaaatgagattagattgtgtgtcaattctgtctgcctgtgccctgttcccctcgggtgcaggaatctgagaggaaccccaagctcatagctgagct

SEQ ID NO: 51426 - DNA, 201 bp, Homo sapiens
ccagaaagtcaccaaaagtcagagaatctggagggaaaaggcaggagctgcctgcatttgcttcattttccctgtctctttcacagatatccacagctacrgcagcagtggtggtggtggcagtggaggaggtggcggtgttggtggcgctggcggcggcccttggggaccagcgccagcctggtgcccctgcggctcctg

SEQ ID NO: 51427 - DNA, 201 bp, Homo sapiens
attgctgggccttcatcgtcctgactacttgttctaatcacatcaggacttcccggtacccctggccgaccaggaataaaaggtaagtgaatttccaaatragatttctttcttttcactggccatttttgtggaaggaagggatggacaggaggaggcctttctctggccagagcctggatcaacagtggcatctagtgg

SEQ ID NO: 51428 - DNA, 201 bp, Homo sapiens
aatctggagggaaaaggcaggagctgcctgcatttgcttcattttccctgtctctttcacagatatccacagctacagcagcagtggtggtggtggcagtrgaggaggtggcggtgttggtggcgctggcggcggcccttggggaccagcgccagcctggtgcccctgcggctcctgctgcagctggtggaagtggctgct

SEQ ID NO: 51429 - DNA, 201 bp, Homo sapiens
agaaaatatctccacatgggatggtgacaaaaatatgaaaacttctgaacaaagttgttaggagataaaacgtttattgaaagagcaggacactcactaawgcctgctctgtggtttcaactgtattaatacaagatgcaaaaaagaaaaaatgctggaagaaaataaaatgcccacacattgaagagttatggacaattt

SEQ ID NO: 51430 - DNA, 201 bp, Homo sapiens
gtggaaaatccatccacccatccatttatccatccatctacccatccacctatccatccatccatccatccatccatccatccatccatccatccatccayccacccgcccattcatccacccacccattcatccatccatccacccatccaactatttgacaagtattgattgagcatctatgttgtcaggtgctgtgca

SEQ ID NO: 51431 - DNA, 201 bp, Homo sapiens
agcccagggccctctgggctggcttataggaaagagcttccctgctgcctcctcctgagcagagggttcctggctcccctcttggcactaataagtcttgrgggttctctttcctaggggagggtttgccaggcccaccaggcccaccaggatcgttcctgtccaactcaggtaatgtcagggagtcaagtcgcacctgtt

SEQ ID NO: 51432 - DNA, 201 bp, Homo sapiens
gctttagcaagggcagtctaagtgctcctggagcctgtacagtgctgggtgcagggccctggagagcgccacatgtgctggcaaggggccttcagccgtgrcagggacagaggtggggagagatggctttcccaggcgcagcccggtgtgtgattagggccgacctggggctccacctctcagtgactggagggctgagtt

SEQ ID NO: 51433 - DNA, 201 bp, Homo sapiens
tgtatctgcccctctgctgattgctgtcttgtcctccttctcaggttccagcggctctcctggcccacagggccctccaggtcagtttgctgcttcttgtwaataggttctgtttccagggcaaaggtggcaatgttaaaaggaaaaccaaatatttttaaagccaaagaagcaattataaagcaagcctcctagagatat

SEQ ID NO: 51434 - DNA, 201 bp, Homo sapiens
gatgtccccacctgtatctgcccctctgctgattgctgtcttgtcctccttctcaggttccagcggctctcctggcccacagggccctccaggtcagtttkctgcttcttgtaaataggttctgtttccagggcaaaggtggcaatgttaaaaggaaaaccaaatatttttaaagccaaagaagcaattataaagcaagcc

SEQ ID NO: 51435 - DNA, 201 bp, Homo sapiens
tcagagtatggcctttgggttcttgccccatctcacagttttcatatctttctggtttcaggtgacatgggaagtccaggccctaaaggtaattataacaygggcatttttaccttaaatattagcaagtgttaattgtttcaaacaatcagcaagtgtcagaaaacccaccttgcactccaagaagtaatttgacaacag

SEQ ID NO: 51436 - DNA, 201 bp, Homo sapiens
ttgctggtgtcccccctgaacaccgtggtcctgcggacccagaactcacaaatgtcacgcaggagccagtttgtgcaggggagcccaggctgtggctggaycatggctgcgacccccatggcctgggtgggtcctgctagtgcatcctctgctctccaggggatgacgtgcgtcagtacctacgtcagtacttgatgggcc

SEQ ID NO: 51437 - DNA, 201 bp, Homo sapiens
taatttgacaacagatgggacaggtgtgtgaggaggagaggtttccaatcccagggacctttggctggacacagagcagttttccttggtccagctgaccrggattggcgagcttccctgtgcacaggaatctccaaaagagtttgggccacatttcccgagcctttgactcagggggtatgcatgtgggcaggagtcttt

SEQ ID NO: 51438 - DNA, 201 bp, Homo sapiens
ggaaagaataattgcccaagatcactggactagccaaatttagaatctgatctctagtctttgcctcagtttcttcttcccataccatgatccccttattgtgtgtgtgtgtgtgtgtgtgtgtgtgtgtgtgtgtgtgtgacaggagatgtgaagctgactcaggatttgctttttcttgcaggaaatctccgaggaagc

SEQ ID NO: 51439 - DNA, 201 bp, Homo sapiens
gccgttagctggggtacgggatcctgacttggaggctggccatccctgtctttaggagatcctggcatggaaggccccatgggccagagagggcgagaagkccccatgggacctcgtggtgaggcagggcctcctggatctggagagaaaggggaaagaggtaagaggcaattccttcaccggcagagttagctatgcctg

SEQ ID NO: 51440 - DNA, 201 bp, Homo sapiens
acagagcacgctgggggctttgtactttgttttcccaacacctaactcgttctgggtcccagatgagtcatatgaccatgctggattttctgctggggccragagaaggatgttggctaagagtcctttccccgtgcagcttaacggcacagttacgcagtcaacaagcttttgatgccggcccacagcaggaagagacct

SEQ ID NO: 51441 - DNA, 201 bp, Homo sapiens
ggatcctgacttggaggctggccatccctgtctttaggagatcctggcatggaaggccccatgggccagagagggcgagaaggccccatgggacctcgtgrtgaggcagggcctcctggatctggagagaaaggggaaagaggtaagaggcaattccttcaccggcagagttagctatgcctgtgcttccttctctctgtc

SEQ ID NO: 51442 - DNA, 201 bp, Homo sapiens
tatggcactgacatcggcccaggcggaggctatggggcagcagcagaaggcggcatgtatgctggcaatggcggactattgggagctgactttgctggagrtctggattacaatgagctggctgtgagggtgtcagagagcatgcagcgtaagtggggacatttaggccttggtgctggggggaaggagcgtgggagcatc

SEQ ID NO: 51443 - DNA, 201 bp, Homo sapiens
taggccttggtgctggggggaaggagcgtgggagcatctccagactggctttcttgtttgtggaacccccaggctgtgaagacagaatcaagcaggcaggkgctggaggggacaggcagccccagcctagctctcagcctactcagcttaaggagccccagtcctgggacccgagctgtggggaacagagcacgctggggg

SEQ ID NO: 51444 - DNA, 201 bp, Homo sapiens
agacactgccaaaagcagaatttgcataacaatcccattcacagtgaggaagaaaaggagagtgtcaaagcagggaggaaaaggagaaccaagctggtgtkgaaatggggcaaacaagttaaataaatgtagtcttacaaaagatttcacctttgaagccatctttgcagtagtcacggttgccataattgcccaagccaa

SEQ ID NO: 51445 - DNA, 201 bp, Homo sapiens
gctgctcacctggctgctactcctggggctgctcttcggcctcattgctctgggtacgtggcaaaggcagcagggcagcctgtgtggtaggaggcaggccrgccccactgcctgtcagaagggcaggaatctgtgaatgggcccacgtgttagggggcgaggggacctgaatgcattggtgcagacccttgttaccgcaga

SEQ ID NO: 51446 - DNA, 201 bp, Homo sapiens
aaagaataattgcccaagatcactggactagccaaatttagaatctgatctctagtctttgcctcagtttcttcttcccataccatgatccccttattgtktgtgtgtgtgtgtgtgtgtgtgtgtgtgtgtgtgtgtgacaggagatgtgaagctgactcaggatttgctttttcttgcaggaaatctccgaggaagccc

SEQ ID NO: 51447 - DNA, 201 bp, Homo sapiens
aatggaaggatgaagagctgaatgatcttatggtatctgttgggaggtatctgttggttttagagtcagaatatcttagataaggcagcatctaagagaarcccagcaatgagcccaaatgacatagactctgggactgggagggactcgccgcatgtcgcctcaccttgaaatacagtttacatcttgtcaaatggtttt

SEQ ID NO: 51448 - DNA, 201 bp, Homo sapiens
aggtaagtggtggcagagagccagtccctggatcctgtgttaacacccacctcgtactgaaaagcagctcctgtgctggtgccacaccggctacctgtgcyctcagtccccagactcatgtattacttagttacgccccatttttccttccaggtgacaggggccctgctgggccaccaggtcatcctgggccacctggcc

SEQ ID NO: 51449 - DNA, 201 bp, Homo sapiens
gacccagagagcaatgacaaccgtctgtgggttctcggctgcaggcccaggctgagaggactcactcccgggtcctttaaggagcccaggtggagactgcygggcctcccacctggacatctggagtgcagaacagcagaggcttcagcccacccggtccagcgctcactctgagctatcactgtgttaggagcttggtct

SEQ ID NO: 51450 - DNA, 201 bp, Homo sapiens
tttgagcttgatagaaaggcacctggtgcaaataagcaagagtagagcagtgtttctctatgaatggttgagtgtgtgcatgggtgtagtgcaagtgtgcgtgtgtgtgtgtgtgtgtgtgtgtgtgtgtgtggcatctctaggtactgcccaaagggcaacgcagccccagcaatcatggatcttggggaggctctacag

SEQ ID NO: 51451 - DNA, 201 bp, Homo sapiens
ttgagcttgatagaaaggcacctggtgcaaataagcaagagtagagcagtgtttctctatgaatggttgagtgtgtgcatgggtgtagtgcaagtgtgcgtgtgtgtgtgtgtgtgtgtgtgtgtgtgtgtggcatctctaggtactgcccaaagggcaacgcagccccagcaatcatggatcttggggaggctctacagg

SEQ ID NO: 51452 - DNA, 201 bp, Homo sapiens
gttcctaattataggttcttcccacctgtgcatgaaggttggcagcatctggcaggcattaggctaaagcatgttctcaaaaataaacttcctttcttacaaaaaaaaaaaaaaaatcccaacaacagtatttgactttgttatgctttcaaaatagcctcgtaatactccattcatccacttcccccaaagacaaacagc

SEQ ID NO: 51453 - DNA, 201 bp, Homo sapiens
tgtgtgtgtgtgtgacaggagatgtgaagctgactcaggatttgctttttcttgcaggaaatctccgaggaagccctggccctaaaggtattgccatggaytgaaccttgtctctgattcatttcctgcagttggaagtgagttttctgggtagattagaagcctttttctttgttctaaatggaaggatgaagagctgaa

SEQ ID NO: 51454 - DNA, 201 bp, Homo sapiens
ccttgcttttgcagcttatggagccattcaaggaccccctgggcaaaaaggagagatgggcactccaggacccaaaggtaagtggtggcagagagccagtmcctggatcctgtgttaacacccacctcgtactgaaaagcagctcctgtgctggtgccacaccggctacctgtgccctcagtccccagactcatgtattac

SEQ ID NO: 51455 - DNA, 201 bp, Homo sapiens
catattctctgagtaggaactataggaaaaacaaaaaagtgtgaggtgtcctttccatttaaatatgaaacattaagtaccatatgaatggtagagatggsggatactaagcctgactggtcatcagttttctgggtgttttaacatttcaaaagcctagtcctaacccctaaagattgatcagtagagctgagttgagtc

SEQ ID NO: 51456 - DNA, 201 bp, Homo sapiens
gcttctttggaatttgatagccacatacttttgttttcctctagatgctgcctctactcatgtagactatgaagtcttgactcatcctagatcttaggatyttaggtttgggcttcacaccacttgccttttacagtctagctatacctaatgcctttaaaaagaaaagttggtgagaatgttattggcgctttttgacat

SEQ ID NO: 51457 - DNA, 201 bp, Homo sapiens
ttggaacgagaaaagggccatgttcggagtgtatgacaacatcgggatcctgggtaagacttgaccttcgacgtggtacacaatttcagaatggcaattasgctgtaacgactatcttttcctcctgtgtagagagtggtactgtgctcaatagtaagagcaaacacttatgtagctgtttacattgtgtttggcactgtt

SEQ ID NO: 51458 - DNA, 201 bp, Homo sapiens
aagagcaaacacttatgtagctgtttacattgtgtttggcactgttctgagtcccctcgtataatttttacttcataagtaaaaataaacaatttttccaragttaataaatggcagcatcagaattttaaccccaagcagtctggctccagagtctgtgctattgttctgtactgtaatgtgccttgtctataggtgctg

SEQ ID NO: 51459 - DNA, 201 bp, Homo sapiens
gccttttacagtctagctatacctaatgcctttaaaaagaaaagttggtgagaatgttattggcgctttttgacataatgctgttatgttaatagtgtttytaaagagccttccacactgaaatgaaatataagagaaaaatggagtcatacttctgtactactctcataaaatatttattaggcatattctctgagtagg

SEQ ID NO: 51460 - DNA, 201 bp, Homo sapiens
ctcaatagtaagagcaaacacttatgtagctgtttacattgtgtttggcactgttctgagtcccctcgtataatttttacttcataagtaaaaataaacartttttccagagttaataaatggcagcatcagaattttaaccccaagcagtctggctccagagtctgtgctattgttctgtactgtaatgtgccttgtcta

SEQ ID NO: 51461 - DNA, 201 bp, Homo sapiens
gtggctgttgcggatggggcgtaggtgggcggtgtgcccacagctacctgggtaaggcccaagatggctgtcttcgccttagtactcgtgtgaagttggcrgggacggttcctgtcatcttcttgggcttatttggtgtgctgttgaaggggggagactagagaaatggcagggaacctcttatccggggcaggtaggcgc

SEQ ID NO: 51462 - DNA, 201 bp, Homo sapiens
gggaaactgtacttttccctgtgaggaaacggctttgtattttctctgtaataaaatggggcttctttggaatttgatagccacatacttttgttttcctytagatgctgcctctactcatgtagactatgaagtcttgactcatcctagatcttaggatcttaggtttgggcttcacaccacttgccttttacagtctag

SEQ ID NO: 51463 - DNA, 201 bp, Homo sapiens
ggggagactagagaaatggcagggaacctcttatccggggcaggtaggcgcctgtgggactgggtgcctctggcgtgcagaagcttctctcttggtaagtrgctgatgtaggcaccccgataactgcttcgtagtataataggcggctcagattaattccctcccttccccatccccaggtgtgcctagattgatcggtat

SEQ ID NO: 51464 - DNA, 201 bp, Homo sapiens
cacaatttcagaatggcaattaggctgtaacgactatcttttcctcctgtgtagagagtggtactgtgctcaatagtaagagcaaacacttatgtagctgyttacattgtgtttggcactgttctgagtcccctcgtataatttttacttcataagtaaaaataaacaatttttccagagttaataaatggcagcatcaga

SEQ ID NO: 51465 - DNA, 201 bp, Homo sapiens
aaataaacaatttttccagagttaataaatggcagcatcagaattttaaccccaagcagtctggctccagagtctgtgctattgttctgtactgtaatgtkccttgtctataggtgctgctcagcaagatgcaaccgtgggttgaaagcttagctggtgtaggatgagttctcttgtcttggatctaatgtgttctctcac

SEQ ID NO: 51466 - DNA, 201 bp, Homo sapiens
gaaagggaatgaattgcaacgttgtatccgaaagaggaaaatggttggaagtagaatgttcgctgatgacctgcacaaccttaataaacgcatccgctatytctacaaacactttaaccgacatgggaagtttcgatagaagagaaagctgagaacttcggaaaaggctcatctgtcaccctggagaagggaaactgtact

SEQ ID NO: 51467 - DNA, 201 bp, Homo sapiens
ctggcgtgcagaagcttctctcttggtaagtggctgatgtaggcaccccgataactgcttcgtagtataataggcggctcagattaattccctcccttccscatccccaggtgtgcctagattgatcggtataaggctcactctcccgccccccaaagtggttgatcgttggaacgagaaaagggccatgttcggagtgta

SEQ ID NO: 51468 - DNA, 201 bp, Homo sapiens
cgagaaaagggccatgttcggagtgtatgacaacatcgggatcctgggtaagacttgaccttcgacgtggtacacaatttcagaatggcaattaggctgtracgactatcttttcctcctgtgtagagagtggtactgtgctcaatagtaagagcaaacacttatgtagctgtttacattgtgtttggcactgttctgagt

SEQ ID NO: 51469 - DNA, 201 bp, Homo sapiens
tgaggcgggaagggtggtagaggcccctcctgccggaacccggggggcggggcttgtggctgttgcggatggggcgtaggtgggcggtgtgcccacagctrcctgggtaaggcccaagatggctgtcttcgccttagtactcgtgtgaagttggcggggacggttcctgtcatcttcttgggcttatttggtgtgctgttg

SEQ ID NO: 51470 - DNA, 201 bp, Homo sapiens
aaaatggggcttctttggaatttgatagccacatacttttgttttcctctagatgctgcctctactcatgtagactatgaagtcttgactcatcctagatyttaggatcttaggtttgggcttcacaccacttgccttttacagtctagctatacctaatgcctttaaaaagaaaagttggtgagaatgttattggcgctt

SEQ ID NO: 51471 - DNA, 201 bp, Homo sapiens
tctactcatgtagactatgaagtcttgactcatcctagatcttaggatcttaggtttgggcttcacaccacttgccttttacagtctagctatacctaatkcctttaaaaagaaaagttggtgagaatgttattggcgctttttgacataatgctgttatgttaatagtgtttctaaagagccttccacactgaaatgaaa

SEQ ID NO: 51472 - DNA, 201 bp, Homo sapiens
atttcaaaagcctagtcctaacccctaaagattgatcagtagagctgagttgagtctagggcatctatgtgttttgttcttttttaataataatttttaaraattacagctgggcagaatggtgcccacatgtaatcccagcattttgggaggctgaggtgggaggattgcttggagacaggaatttgagactggtctggg

SEQ ID NO: 51473 - DNA, 201 bp, Homo sapiens
accccaaagaactgatcagggggcccatatggcttcgaggttggaaagggaatgaattgcaacgttgtatccgaaagaggaaaatggttggaagtagaatrttcgctgatgacctgcacaaccttaataaacgcatccgctatctctacaaacactttaaccgacatgggaagtttcgatagaagagaaagctgagaactt

SEQ ID NO: 51474 - DNA, 201 bp, Homo sapiens
cttgaacccgggaggcagagattgcagtgagctgagatcataccattgcactctagcccgggcgacagagcaagactccatctcaaaaaaaaaaaaaaaaatcaaatcacatctctggcactgacttagtgtgggatgattgctgtccctatcggacacatgggagtgataatgctcatattatgggatggttggacaaaa

SEQ ID NO: 51475 - DNA, 201 bp, Homo sapiens
cagtctctcgagtagctgggactacaggcgcccgccaccacgcctggctaattttttccatttttagtagagacggggtttcactgtgttagccaggatgktctccatctcctgacttcgtgatccgccagcctcggcctcccaaagtgctgagattacaggtgggagccaccgtgcccagccagaaaatccctgtactat

SEQ ID NO: 51476 - DNA, 201 bp, Homo sapiens
ataatcccagcactttgggaggccgaggtgggtggatcacgaggtcaggagttcaagacctgcctggtcgagatggtgaaaccccgtctctactaaaaatmcaaaaaaaaaaaaaaaaaaaaaaattagctgcgggtagtggcaggtgcctgtaatcccagctcctcaggaagctgaggcaggagaatcgcttgaactcgg

SEQ ID NO: 51477 - DNA, 201 bp, Homo sapiens
agccattctgatagatgtatagtacagatgtatggtacaaattaaaaccgtctcattgtggttttaatttgcatttctctgatggctaatgctattgaacrtttttttcatgtatttatttgctatctgtatatccttttcagtcaactatctatatttcttacgcattttgaaattggattgttcttttgactgttgaat

SEQ ID NO: 51478 - DNA, 201 bp, Homo sapiens
ggctgcagtgagctgtgattttgccactgcactccagcctgggctacagagtgagatcctgtctcaaaaaaaaaaaacaaaaaaccaaaacaaacaaaaamcaaacccgaaacaaacaaacaaaaacccagaaacaaacctgctaaacctttccagagcagctgtactattttaaatttacactgatgtaaacgtatgagt

SEQ ID NO: 51479 - DNA, 201 bp, Homo sapiens
ttctaacaggccctgctttgcaggtgacccggcgctttgggatcccagggctgaagaaaatcatggactggtttggctactatggaggcccctgccgcgcmcccttgcaggagctgagccccgctgaggaggaggcactgcgcatggatttcaccagcaacggctggctctgagggcaggcagggtccatggctggcctga

SEQ ID NO: 51480 - DNA, 201 bp, Homo sapiens
agtaggtattccacaaacaacagctctattagctcattctgaattgcctactctctctacggttttgaggccactgtgcctagggttccactcctatctarccttagaagcatacttacaggcttgcagaagtggcgggggtttctgagatcacagccaaacccattttcattgccccgatgggcacaaagaggactagag

SEQ ID NO: 51481 - DNA, 201 bp, Homo sapiens
gctgtagcgcgcctgggacacatagtaggtattccacaaacaacagctctattagctcattctgaattgcctactctctctacggttttgaggccactgtrcctagggttccactcctatctagccttagaagcatacttacaggcttgcagaagtggcgggggtttctgagatcacagccaaacccattttcattgcccc

SEQ ID NO: 51482 - DNA, 201 bp, Homo sapiens
tttgcatgcaaggtaagggcctcatgggcctggctgcagtcccaggctgagctaggcactccacaatattttgtttgggtaaagtgatgggtgggctctaragctccctcacagctgtatccttacctcaaaggggcagattaacttagatttacagaaacgacagctgaggaggtaaatctgagtccctctggaggtgaa

SEQ ID NO: 51483 - DNA, 201 bp, Homo sapiens
ccaggctggtcttgaactcctgaccttgtggttcgcccgcctcggcgtcccaaagtgctgggatcacaagtgtgaaccattgtgcctggcctaattttaawttttttttagtagagacagggtttcaccatgttggccaggctggtctcgaactcctggcctcaaatagtccacccgtcttggcctcccaaagtgctggga

SEQ ID NO: 51484 - DNA, 201 bp, Homo sapiens
tgatttatttcttcagcattttgtagtttccagccaacaagtcctgtacatatttttaaaaactaacacctaaggatctggtgcagagtggctcacgcctrtaatcttagcatttttggagatagagacggcagtattgcttgaggccaggagtttgagacccacctgggcaacatggccagaccccatctcttaaaaaaa

SEQ ID NO: 51485 - DNA, 201 bp, Homo sapiens
cttttttttttttttttttgagacggagtcttgctctgtggcccaggctggagtgcagtggtgcgatctcggctcattgcaagcttcacctcccgggttcrtgccattctcctgcctcagtctctcgagtagctgggactacaggcgcccgccaccacgcctggctaattttttccatttttagtagagacggggtttcac

SEQ ID NO: 51486 - DNA, 201 bp, Homo sapiens
aacatggtacatttctctgtttatttagatcttctttgatttatttcttcagcattttgtagtttccagccaacaagtcctgtacatatttttaaaaactracacctaaggatctggtgcagagtggctcacgcctgtaatcttagcatttttggagatagagacggcagtattgcttgaggccaggagtttgagacccac

SEQ ID NO: 51487 - DNA, 201 bp, Homo sapiens
tgcaagctctgccttccaggttcacgccattttcctgcctcagcctcctgagtagctgggactacaggctcccaccaccatgcacggctaattttttttttgtgtgtgtgtatttttagtagagatggggtttcaccgtgttagccaggatggtctcaatctcctgacctcgtgatcgtccgcctcggcctcccaaagtgt

SEQ ID NO: 51488 - DNA, 201 bp, Homo sapiens
cccaggctggagtgcaatggcatgatctcgcctcctgggttcaagcgattctcctgcctcagcctcccgagtagctgggattacaggcgcctgccaccacrcccagctaatttttgtatttttagcagagatggggtttcaccgtgttggccaggctggtcttgaactcctgacctcaggtgatccaactgcctcggcctc

SEQ ID NO: 51489 - DNA, 201 bp, Homo sapiens
ctgcaagctctgccttccaggttcacgccattttcctgcctcagcctcctgagtagctgggactacaggctcccaccaccatgcacggctaattttttttktgtgtgtgtgtatttttagtagagatggggtttcaccgtgttagccaggatggtctcaatctcctgacctcgtgatcgtccgcctcggcctcccaaagtg

SEQ ID NO: 51490 - DNA, 201 bp, Homo sapiens
tttatacaacaaaacttccttgggaaatgatgctttgcttttcctgggagaccatttagtgttagggtcaggaggagctatggggaggtgagggcagccasatgcaaggggagtagaggtctgggctgtgcctgagactctcacagatccttccccttcctgacttcccaggtctggtgtgacctgcgtcaggtttcaggg

SEQ ID NO: 51491 - DNA, 201 bp, Homo sapiens
tactgcaagctctgccttccaggttcacgccattttcctgcctcagcctcctgagtagctgggactacaggctcccaccaccatgcacggctaattttttktttgtgtgtgtgtatttttagtagagatggggtttcaccgtgttagccaggatggtctcaatctcctgacctcgtgatcgtccgcctcggcctcccaaag

SEQ ID NO: 51492 - DNA, 201 bp, Homo sapiens
gagtgtgagccagaatgccctgggccctgggggtgggtggatgtgcaggatccaggctcctaggccctagcttgggtcctgtctccttgttctgcctcttytgggacatgctgaggcaccttcgcttggcccagtgtcctggtccaggcctccttctgcctgctctcacctctctccttcctctggcagccactcaagcca

SEQ ID NO: 51493 - DNA, 201 bp, Homo sapiens
cagaaagtcaggaaaactaggtataggcagttctggtgatttctttattctttataaacacctttttctacagtacaattcagagaataaatagaggcacrcggctataacttccaccacaatctgctgttgaagagacattcaatgtgaggctagggagctagaggtgggggacgtatttgggtaccagggtaacgggag

SEQ ID NO: 51494 - DNA, 201 bp, Homo sapiens
tcccagtgtgggaactccttgtgactcccagaaaatcctgacttcggacaaagtcgagcaccactgattgtcaaacttaagtgtgcattaaaatttccttrggggcgaattaaagttccaacttttgggcccaagaagatgcattgaaacaaacatcctgtgtgattgtgacagagtaaccctaggaccacacttagagat

SEQ ID NO: 51495 - DNA, 201 bp, Homo sapiens
ctaaactgtgtctctggtctgaagactgggaaggagcaatttctcaatttatctttctactgtggatgctttcctacgccctgaggcacatgaagtcagamaggaagggcagaggggcaagtaggcacagtaagggaatttttttttctttttttttttttttgagacagagtttcactctgtcacccaggctggagtgca

SEQ ID NO: 51496 - DNA, 201 bp, Homo sapiens
gaggtgggtggatcacgaggtcaggagttcaagacctgcctggtcgagatggtgaaaccccgtctctactaaaaatacaaaaaaaaaaaaaaaaaaaaaaattagctgcgggtagtggcaggtgcctgtaatcccagctcctcaggaagctgaggcaggagaatcgcttgaactcggagggcagaggttgcagtgagccga

SEQ ID NO: 51497 - DNA, 201 bp, Homo sapiens
catccccattccttactgcacaatcccctgaggcagtgctctctgtaggaccatcccacagatgggaatctgggcctcagagtgacatggtcactgcccarggtcattcggctaacacatagctgagctgaggtttgcacctcgtctgactgcatggcccatgctccattttactccctcgctgactctcattataaaccc

SEQ ID NO: 51498 - DNA, 201 bp, Homo sapiens
gaaaatccctgtacttttttttttttttttttgagacggagtcttgctctgtggcccaggctggagtgcagtggtgcgatctcggctcattgcaagcttcrcctcccgggttcatgccattctcctgcctcagtctctcgagtagctgggactacaggcgcccgccaccacgcctggctaattttttccatttttagtaga

SEQ ID NO: 51499 - DNA, 201 bp, Homo sapiens
gcctcgaggtggtgagccgtgtgcgccaggccatgcccaagaacaggctcctgctagctggctccggatgcgagtgtgagccagaatgccctgggccctgsgggtgggtggatgtgcaggatccaggctcctaggccctagcttgggtcctgtctccttgttctgcctcttctgggacatgctgaggcaccttcgcttggc

SEQ ID NO: 51500 - DNA, 201 bp, Homo sapiens
cgctctgggcccgctgaacaatggcagaacacttctcacgtcgcagcagcttgttgttctcaaagagaccttcattgcgggggattccatgagaaccatcrgggaaagtcagcaggcctttgaggagggcagagaaaatatgggagtgacaatggcattaatgtctcaaagatgagacatatctttggccttgatatgtcc

SEQ ID NO: 51501 - DNA, 201 bp, Homo sapiens
aagccattaaagagcccattctcaaaatgacccaggtaggtgccaccatctgcaaacatcagttgaccaaaaccatgcctgcggcctgaacaaagagaagrataggtgtcaggttggaaggaggcagcttcagggtcccttcttactcttgtagcatcccttacctgccatcaccctacccacaaagaaaacaagagaagc

SEQ ID NO: 51502 - DNA, 201 bp, Homo sapiens
aagtggagtagattaaaaataaaaaaaaaagcacaggctctggaggctggggggaatctcagctctgcagtttattcactgagtaatgctgggcaaagcaytcacctctctgggcctgagtttctactctgtgtacagagggatcatgaggattagagagcatcagggccatgctgctgtagcgcgcctgggacacatagt

SEQ ID NO: 51503 - DNA, 201 bp, Homo sapiens
gagggcagctctgagatctgtttccaaccttggcttctgtgtggattctctctgtcgtgcgggctctctgggactttcttgagggcatctctttgagcacygggctttcattccaccacacttacccggccctcatccaggatgaggctctgggcacagctctcacaccacatttgctgttgcaggtgaccaggattgggc

SEQ ID NO: 51504 - DNA, 201 bp, Homo sapiens
ggagggaggcctgtccaggtggccctgtagtgaagcaggctgggacctgtgggtgggcaagtctctggctcttgggacctggggcggctgccctctcctgyttttctctgcgcccccctccccaggttgctgatctctctccaatccctgtggtgctgtacagtgtcccagccaacacagggctggacctgcctgtggatg

SEQ ID NO: 51505 - DNA, 201 bp, Homo sapiens
ttctgtctgcaaagatgggaaggaaatgtgtgaaagattatggtgtcgtaaggtaggaacaccaatgtcctagttgttcggtagaggatgggaaggagttrgtcagctgtgtctcttgcaggcttcgtggtccagggctccaatggcgagtttcctttcctgaccagcagtgagcgcctcgaggtggtgagccgtgtgcgc

SEQ ID NO: 51506 - DNA, 201 bp, Homo sapiens
gtgaaactccatctctacaaaaaaaactacacaaattagttgggcatggtagctcatgcctgtaatcctagctggctaagacaggaggatcacttgaaccyggggggctaaggctgccgtgagccgtgattgtgacactgcactccagcctgggtgacagagtgagaccctcaaagaaaaagtaaatacataaaaaatgtg

SEQ ID NO: 51507 - DNA, 201 bp, Homo sapiens
ctcctgagtagctgggactacaggcgcacactaccacatctagctacctcctcatcttttccagatctaagcaatacaatgttttctccagtaattttgayaatgcagattcctaggcccaaactcagacttactgaatcagattctgtagtcagagcctgggaacctgcagttttaataagcacatcattagatccttac

SEQ ID NO: 51508 - DNA, 201 bp, Homo sapiens
cctctcctccttttctgggtcctagcacttttgctcctgagggcagctctgagatctgtttccaaccttggcttctgtgtggattctctctgtcgtgcggrctctctgggactttcttgagggcatctctttgagcactgggctttcattccaccacacttacccggccctcatccaggatgaggctctgggcacagctct

SEQ ID NO: 51509 - DNA, 201 bp, Homo sapiens
gataggatgtgaatgggagtggggtggaaagtcactcacttggttgacatttcaaattttaggtccacttaaaaaatagctaataaaagaactacttattmctcatctgtgttctgcagggagtgagacaaggtcaggattgaccagatatttaccagagtcccatttttctgtcagaccctcccttatttaaggctaaga

SEQ ID NO: 51510 - DNA, 201 bp, Homo sapiens
agcatgggagggaggcctgtccaggtggccctgtagtgaagcaggctgggacctgtgggtgggcaagtctctggctcttgggacctggggcggctgccctytcctgcttttctctgcgcccccctccccaggttgctgatctctctccaatccctgtggtgctgtacagtgtcccagccaacacagggctggacctgcctg

SEQ ID NO: 51511 - DNA, 201 bp, Homo sapiens
ctgggattacaggtgcctgccaccacgcctggctaatttttgtatttttagtagagatggggtttcaccatgttggccaagctggtcttgaactcctgacmtcacggtccgccggcctcggcctcccaaagtgctgggattacaggcgtgagccaccgcgctgggcctcttatttatttatttatttttaagatggggtct

SEQ ID NO: 51512 - DNA, 201 bp, Homo sapiens
aatgtccccaggctgaagaggtgctgggaccagggcttgggatgcctggaggggagaggctctggctgatgttctgcgtcttacttcgtgcaggagctgtkgggggcgtctgcgccctggccaatgtcctgggggctcaggtgtgccagctggagcgactgtgctgcacggggcaatgggaagatgcccagaaactgcagc

SEQ ID NO: 51513 - DNA, 201 bp, Homo sapiens
tcggctggctttctgatggccagctatgccttgggtaggccgcccactgctctcaaattgtcatgggtgaccaagagatacccaggtacctgggtcttccrggagagatcgtgagggctggggctgggtctgcagatggtagtttgccagcctgcccactctgaaaactcagaaacctggccacgccgcttacctgtctga

SEQ ID NO: 51514 - DNA, 201 bp, Homo sapiens; identical to SEQ ID NO: 29739

SEQ ID NO: 51515 - DNA, 201 bp, Homo sapiens
tggaaagttagctgtccagatgaacggagtcgagcagctgctgatctctgttatttaatgatgctaaggagcaagccgattctaccagtcacatagctccrcctaccccacctattcccaaggagcagagagtatatatgacatgaagccctgatctcaaggaaagaagataggatgtgaatgggagtggggtggaaagtc

SEQ ID NO: 51516 - DNA, 201 bp, Homo sapiens
tccagcaaatgaagtgttcatcatggatactccccaggggtccttctcaccctccttccactcgccacgatattcctccccactggagtaggtgaaggaamcttttgtcagggtcatggtgacagattacaggataaaaggatgaaactgtaggaaataagcaaaggagaaccagtgtcatggaatggcgggaggaaagga

SEQ ID NO: 51517 - DNA, 201 bp, Homo sapiens
gcccaacactcaggctgaggagggaacgtatcacattgtaagggcctcctgcagccagttaaaggtcctctgaagaggagatgagggccaggcacagtggmttactcctgtaatcccagcactttgggaggccaaggcaggaggatctcttgagaccaggagttggagaccagcctggccaacatagtgagaccctgtctc

SEQ ID NO: 51518 - DNA, 201 bp, Homo sapiens
tgttctgcgtcttacttcgtgcaggagctgtggggggcgtctgcgccctggccaatgtcctgggggctcaggtgtgccagctggagcgactgtgctgcacrgggcaatgggaagatgcccagaaactgcagcaccgcctcattgagccaaacgctgcggtgagccagtggcagcgggggcgcggcctggcggggggtgggc

SEQ ID NO: 51519 - DNA, 201 bp, Homo sapiens
ctgaagtttttgtattttgctattacagacctgctctctggtctctaaatctggattcccaatgtaccctgggtgccatagagttggcagttactttcctkggggaagagggtaggacttcaatgttctgaaagtgacagatctccgagttccagatatgggtgttcagcaaatttctcagtctcttctaacaggccctgc

SEQ ID NO: 51520 - DNA, 201 bp, Homo sapiens
ttcttccccaatctgaagtttttgtattttgctattacagacctgctctctggtctctaaatctggattcccaatgtaccctgggtgccatagagttggcrgttactttcctgggggaagagggtaggacttcaatgttctgaaagtgacagatctccgagttccagatatgggtgttcagcaaatttctcagtctcttct

SEQ ID NO: 51521 - DNA, 201 bp, Homo sapiens
tcagggtccttgggtttggattagatttgagccctggagggaagggagaagaagggaagctgttcccttcagctgaagccccagtgagtagagatttgagkgacttttccagcactgcaggggagaatgcttgttcctattccatctggtccctccagactttggctggttgtctaggcctttgtacatctcccctgccat

SEQ ID NO: 51522 - DNA, 201 bp, Homo sapiens
catcccagtgtgggaactccttgtgactcccagaaaatcctgacttcggacaaagtcgagcaccactgattgtcaaacttaagtgtgcattaaaatttccytgggggcgaattaaagttccaacttttgggcccaagaagatgcattgaaacaaacatcctgtgtgattgtgacagagtaaccctaggaccacacttagag

SEQ ID NO: 51523 - DNA, 201 bp, Homo sapiens
cagcctccccagtagctgggattacaaagtgttgggattacaggcatgagccactgtgcctgccctaaattcttgagccttgagagaaattgtacaggtgkgatgtgaccttggctcctccaatcccaggcatttcttcctggctttcaaatacctggtgtcccctttaatgcggactgttagaggagagacttcctgagg

SEQ ID NO: 51524 - DNA, 201 bp, Homo sapiens
tcccccagaagcaatcccacaggagcgagaagctgtgtgcctccagacgttccctgcaatgttaccaatgcaaaataactaccaaaaaaaaaaaaaaaaaagcagctaaatatccaatgagagatatcctgatatcctggcaactcactctggaatctgacggtgtagtgaacagcatggaaaaagttggtggaatgaagt

SEQ ID NO: 51525 - DNA, 201 bp, Homo sapiens
tttttagtagagatagcgtttcaccacgttggccaggctggtctcgaactcctgacctcaagtgattggcctgccttggcctcccaaagtgctggaattayaggcatgagccactgcgcctggtcttttttttttttttttttttttttgagacagagtctcactctgtcacccaggctaccgatcagtggtgcgatctgg

SEQ ID NO: 51526 - DNA, 201 bp, Homo sapiens
aaaaattagctgggtgtggtggcaggcacctgtaatctcagctactcgggaggctgagacagaagaattgcttgaacctgggaggtggaggttgcagtgagccgagaccatgccactgccctccagcctgggtaacagagccagactctgtctcaaaaaaaacataaaaaagaaaaaaataaataaagttcatcacaaaaa

SEQ ID NO: 51527 - DNA, 201 bp, Homo sapiens
ggttgaattaacaatagcattttcaaattcctttatttaatcctaaaatggaataaaggaatggcaggcactatatggaattaaatcctggagttgaaaakgaagatccataaagttggctatatatcctgatgtatttgtcctccagcaaatgaagtgttcatcatggatactccccaggggtccttctcaccctccttc

SEQ ID NO: 51528 - DNA, 201 bp, Homo sapiens
cagtggcatgatctcggctgactgcaagctctgcctcccgggttcatgccattctcctgcctcagcctcccgagtagctgggactacaggtgcccaccacsacgccccactaactttttgtattttttagtagagatggagtttcaccgtgttagccaggatggtctcaatctcctgacctcgtgatccgcccgccttggc

SEQ ID NO: 51529 - DNA, 201 bp, Homo sapiens
gcaagacctcatgtcaaaaatgtaaaattaaaaaacaaaaaataggccgggcgtggtagctcatgcctgtaatcccagaactttgtgaggccgaggtgggyggatcacgaggtcaggagttcgagaccagcttggccaacatggtaaaaccccatctctactaaaaatacaaaaattagccgggtgtggtggcgggcacct

SEQ ID NO: 51530 - DNA, 201 bp, Homo sapiens
caggagaatcacttgaacccaggaggcagagattgcaatgagctgagatcaggacactgcactccagcctgggtgacagagcaagactgtctcaaaaaaawaaataaataaaaataaatgaataaattataacaatagctttaggtcccccattatcagggaaaagcctttagagatcatgttgtccagccccttcctttt

SEQ ID NO: 51531 - DNA, 201 bp, Homo sapiens
agtgttttttgttttgttttgtttttgagacggagtttcactgttattcttccccaggctggagtgcaatggcgcgatctttgctcactccaacctccgcytcagcctcccaagtagctgggattacaggcatgcgccaccacgcctggctaattttgtattttcagtagagatggggtttcaccatgttggtcaggtgac

SEQ ID NO: 51532 - DNA, 201 bp, Homo sapiens
gggtctttcccacctactcaggctttgggtaaaaaggccaggctattagaacatcatgggggtggcgaggcctgcaggagggtggcttaccacccattccragaaaaaaaatccatgcttgataaagcctccgggactctagtggtaaagttattagtcaatctttcatcagtggttcctggcctttttatcccaaacaac

SEQ ID NO: 51533 - DNA, 201 bp, Homo sapiens
aagggaactgcacggtggctcaaacctacaatcccagcactttgggaggctgaggcttgcggaccacttgagctcaggagtttgagaccagcctgggcaayatggtgaaaccccatctgtaccaaaattacaaaaaatccaaaaattagccgggtgtggtggtgcgttcctgtagtcccagctacttgggaggctgaggtg

SEQ ID NO: 51534 - DNA, 201 bp, Homo sapiens
aaatcactcgaactcaggaggcggaagttgcagtgagccgagatcgtaccactgcactccagcctgggcgacagagtgggactgtttcaaaaaaaaaaaaattgcattgaaatattacttattttgatgattgagatttttggcctccccttaagttttgcatgcaaggtaagggcctcatgggcctggctgcagtcccag

SEQ ID NO: 51535 - DNA, 201 bp, Homo sapiens
agagttcttagaagatcgtaaagattttctcttatttttttcttttaagttttatagctttatgttttataagtctgtgactcattttgagttaatttttrtataaagtgtaagacttaggtcaaggttttgtgttttttttccctaatggatattcacttgctgtagcatcttttgctgaaaaggccatctttcctccat

SEQ ID NO: 51536 - DNA, 201 bp, Homo sapiens
tacttatcagctggtgcccactgcgctgtcaggcagtgagatttctggctgacttggaggcgctctgggcccgctgaacaatggcagaacacttctcacgycgcagcagcttgttgttctcaaagagaccttcattgcgggggattccatgagaaccatcagggaaagtcagcaggcctttgaggagggcagagaaaatat

SEQ ID NO: 51537 - DNA, 201 bp, Homo sapiens
cgtgctatcgggggccaggtcctgaaaaaataggaatgactggggctggcaaaggagttagaaggcaggagagtgttgtcttcaaataatcggttctgtgstcagactgtataccccaattctttgttgggcaagcaaaggagaacttcagagagaacgcccatcaagttcagggtcattctgaagtctgaggcaacagaa

SEQ ID NO: 51538 - DNA, 201 bp, Homo sapiens
ccaagaagatgcattgaaacaaacatcctgtgtgattgtgacagagtaaccctaggaccacacttagagatgcctggagagaaagagtgtaaaccaggggmctctaaatccgtgctatcgggggccaggtcctgaaaaaataggaatgactggggctggcaaaggagttagaaggcaggagagtgttgtcttcaaataatc

SEQ ID NO: 51539 - DNA, 201 bp, Homo sapiens
tgagggcaggcagggtccatggctggcctgagcccatctcagcctcctgccttgcacttgcagcctgaagcggagagcacagggggatgagggtggcaggyagcggggagccgatagaggctcctttgcctgctgtggtcctccaggcagcctttcacaggcacgcccatgcatatctcctattctaacggcccctgacct

SEQ ID NO: 51540 - DNA, 201 bp, Homo sapiens
ggaggaggcactgcgcatggatttcaccagcaacggctggctctgagggcaggcagggtccatggctggcctgagcccatctcagcctcctgccttgcacytgcagcctgaagcggagagcacagggggatgagggtggcaggcagcggggagccgatagaggctcctttgcctgctgtggtcctccaggcagcctttcac

SEQ ID NO: 51541 - DNA, 201 bp, Homo sapiens
gagtacagtgacgtgatctcggctcactgcaagctccgcctcccgggttcacgccattctcctgcctcagcctcccgagtagctgggactacaggcgcccrccaccacgcccggctaatttttttgtatttttagtagagacggggtttcaccgtgttcaccaggatggtctcgatatcctgacctcatgatccgcccgcc

SEQ ID NO: 51542 - DNA, 201 bp, Homo sapiens
ggctggagtacagtgacgtgatctcggctcactgcaagctccgcctcccgggttcacgccattctcctgcctcagcctcccgagtagctgggactacaggygcccgccaccacgcccggctaatttttttgtatttttagtagagacggggtttcaccgtgttcaccaggatggtctcgatatcctgacctcatgatccgc

SEQ ID NO: 51543 - DNA, 201 bp, Homo sapiens
tagctgctattcttttttttttttttgagatggagtctcgctctgtcgcccaggctggagtacagtgacgtgatctcggctcactgcaagctccgcctccygggttcacgccattctcctgcctcagcctcccgagtagctgggactacaggcgcccgccaccacgcccggctaatttttttgtatttttagtagagacgg

SEQ ID NO: 51544 - DNA, 201 bp, Homo sapiens
tttatgaatctgggtgctcctgtgttgggtgcatgtagattttgtttagttaggtcttctcattgaattaaaccctttaccattatgcaattctcttgtcttttttttttttttttgacctttcttggtttaaagtctgttttgtctgaaattagtattgcaacccctgcttttctctttttctttttttttaaattatac

SEQ ID NO: 51545 - DNA, 201 bp, Homo sapiens
tgccatctgaacaggcttcagtccccatctccagtctcagggaaagagaatataaatatgttaatgatcctgtttaattcttgtctatttacatgaagttytgacaattctgatagggcgtgcttttctccagtagtaaagtgactagacagatttagcatggtccctagttcatagatctttcgtttcttccttcaccca

SEQ ID NO: 51546 - DNA, 201 bp, Homo sapiens
tgggtgtggtggtgtgtgcctgtaatcccagctactatggaggctgaggcaggagaatcgtgtaagcctgggaggcagaggttgcagtgagctgagatcaygccattgcactccagcccaggtgacggtgcgagactccgtctcaaaaaaaagaaaaaacaacacaaaacaaaacaaaaacttactgaacaaatttatcaa

SEQ ID NO: 51547 - DNA, 201 bp, Homo sapiens
gggagaaagaaggaggttttctaggttcttgattactcccacttttcctttcaggtgacaaatcagacgctaagtttttccttcatggttctgcaagacawcccagtaggagacttgaagccagcaattgttaaagtctatgattactatgagacaggtgagtgaaagaaaaatgaaacaatcttaaccagagccaagaaa

SEQ ID NO: 51548 - DNA, 201 bp, Homo sapiens
taaagacactggtgaaaaagagtcaaagaacaataagaatatgttttgctcatgggagaaagaaggaggttttctaggttcttgattactcccacttttcstttcaggtgacaaatcagacgctaagtttttccttcatggttctgcaagacatcccagtaggagacttgaagccagcaattgttaaagtctatgattact

SEQ ID NO: 51549 - DNA, 201 bp, Homo sapiens
ctgggaggctgaggcaggagaatggcgtgaacccgggaggcgaagtttgcagtgagccgagatcgccccactgcactccagcctgggcgacagagcgagaytccgtctcaaaaaaaaaaaaaaaaaaaaaaggaatgtagttaggacttcagaaaggactaaaaatagtgagttttcaactattaaggaacaaagcatttt

SEQ ID NO: 51550 - DNA, 201 bp, Homo sapiens
gagggaaatatttactgaagcagaacattagaagttagctgattagagttaaaactacagaaagtaagctaagaaatctaggaaaggaaataaattcataragcccacagtgtaaaagcaaatgacttagttaaccaaccaagaaaactggaaggaacctgaacctctgaagtggcatagaaatgctttaggaagcaagga

SEQ ID NO: 51551 - DNA, 201 bp, Homo sapiens
accaggtgatgggctgatacatgcagcaaaccaccatggcacacctatgtaacaaacctgcacatcctgcacatgtaccccagaacttaaaataaaataamatttaaaaaataaataaataaatagataaataataaaagtttttttaaaaactgtgcaaaaaaaggtgagagcaaacagcaaatggtaccaaatttccat

SEQ ID NO: 51552 - DNA, 201 bp, Homo sapiens
ttagagttaaaactacagaaagtaagctaagaaatctaggaaaggaaataaattcatagagcccacagtgtaaaagcaaatgacttagttaaccaaccaaraaaactggaaggaacctgaacctctgaagtggcatagaaatgctttaggaagcaaggacaagctggtaatgaattgaacaacatgtggcagcaaaaaaaa

SEQ ID NO: 51553 - DNA, 201 bp, Homo sapiens
gtcttccagagtttgtatactttttggttttacatttaagtctttaaccaatcttgagttgatttttgtgcattgtgtaaggcggggatccagtttcaatmttctgcctatggctagccagttatctcagcaccatttattgaatagggagtcctttccttgtgtttgttagctttgttgaagatcagatggttgtgggtg

SEQ ID NO: 51554 - DNA, 201 bp, Homo sapiens
aggaaaggaaataaattcatagagcccacagtgtaaaagcaaatgacttagttaaccaaccaagaaaactggaaggaacctgaacctctgaagtggcataraaatgctttaggaagcaaggacaagctggtaatgaattgaacaacatgtggcagcaaaaaaaaaaaaaaaaagaaaagaaaagaaaaaagaaaaagagat

SEQ ID NO: 51555 - DNA, 201 bp, Homo sapiens
tagccagttatctcagcaccatttattgaatagggagtcctttccttgtgtttgttagctttgttgaagatcagatggttgtgggtgtgcagcattatttmtggtctctgcattctgtcccattgatttgtgtgtctgtttttgtacaagtactatgctgttttggtaactgtagccctgtagtatagtttgaagttgggt

SEQ ID NO: 51556 - DNA, 201 bp, Homo sapiens
tgaggcaggagaatggcgtgaacccgggaggcgaagtttgcagtgagccgagatcgccccactgcactccagcctgggcgacagagcgagactccgtctcaaaaaaaaaaaaaaaaaaaaaaggaatgtagttaggacttcagaaaggactaaaaatagtgagttttcaactattaaggaacaaagcattttttaccagag

SEQ ID NO: 51557 - DNA, 201 bp, Homo sapiens
gaggcaggagaatggcgtgaacccgggaggcgaagtttgcagtgagccgagatcgccccactgcactccagcctgggcgacagagcgagactccgtctcaaaaaaaaaaaaaaaaaaaaaaggaatgtagttaggacttcagaaaggactaaaaatagtgagttttcaactattaaggaacaaagcattttttaccagagt

SEQ ID NO: 51558 - DNA, 201 bp, Homo sapiens
aggcaggagaatggcgtgaacccgggaggcgaagtttgcagtgagccgagatcgccccactgcactccagcctgggcgacagagcgagactccgtctcaaaaaaaaaaaaaaaaaaaaaaggaatgtagttaggacttcagaaaggactaaaaatagtgagttttcaactattaaggaacaaagcattttttaccagagta

SEQ ID NO: 51559 - DNA, 201 bp, Homo sapiens
ggcaggagaatggcgtgaacccgggaggcgaagtttgcagtgagccgagatcgccccactgcactccagcctgggcgacagagcgagactccgtctcaaaaaaaaaaaaaaaaaaaaaaggaatgtagttaggacttcagaaaggactaaaaatagtgagttttcaactattaaggaacaaagcattttttaccagagtaa

SEQ ID NO: 51560 - DNA, 201 bp, Homo sapiens
gcaggagaatggcgtgaacccgggaggcgaagtttgcagtgagccgagatcgccccactgcactccagcctgggcgacagagcgagactccgtctcaaaaaaaaaaaaaaaaaaaaaaggaatgtagttaggacttcagaaaggactaaaaatagtgagttttcaactattaaggaacaaagcattttttaccagagtaag

SEQ ID NO: 51561 - DNA, 201 bp, Homo sapiens
caacaatattgggtttcttgtgtcaaattgcctgtccagaaaacaatttaaaaagtaagagtttatgttggcaatggaaagtaagggtagtaaaataatayaagaaaataatagtttttacttgcaaatttactctataaatggcctaaccctgcagatattgaatcatgaatcactgaatcattaaagctttgaagagtt

SEQ ID NO: 51562 - DNA, 201 bp, Homo sapiens
ggcacggtggctcacgcctgtaatcccagcactttcggaggccgaggcgggcagatcacgaggtcaggcgatcgagaccatcctggctaacatggtgaaaycccgtctctactaaaaatacaaaaaattagctgggcggggtggcgggcgcctgtagtcccagctactcgggaggctgaggcaggagaatggcgtgagtcc

SEQ ID NO: 51563 - DNA, 201 bp, Homo sapiens
gcacggtggctcacgcctgtaatcccagcactttcggaggccgaggcgggcagatcacgaggtcaggcgatcgagaccatcctggctaacatggtgaaaccccgtctctactaaaaatacaaaaaattagctgggcggggtggcgggcgcctgtagtcccagctactcgggaggctgaggcaggagaatggcgtgagtcca

SEQ ID NO: 51564 - DNA, 201 bp, Homo sapiens
aggcaggagaactgtttgaacctgggaggtgggggttgcagtgagccgagatcatgccactgcactccagcctggtgacagagtgagactctgtcaagaagaaaaaaaaaaagaaaagaaaagaaaagaaaagaaatgttgaacataggccccaaatctcttatggcttgtagggtgtctgctaagaggcccaccattagt

SEQ ID NO: 51565 - DNA, 201 bp, Homo sapiens
ggcaggagaactgtttgaacctgggaggtgggggttgcagtgagccgagatcatgccactgcactccagcctggtgacagagtgagactctgtcaagaagaaaaaaaaaaagaaaagaaaagaaaagaaaagaaatgttgaacataggccccaaatctcttatggcttgtagggtgtctgctaagaggcccaccattagtc

SEQ ID NO: 51566 - DNA, 201 bp, Homo sapiens
tgtttgtttgtttttcttttagcagtcaagccactctatcatagggctgctgaggtttgctgggggtccactccagaccccagttgctttggtttctcccrtacgtggaagtatcaccagcaaaggccatgaaacagcaaagatggcagcctgtgccttcctctagaaactccatcctgtgggggtactaacctgttgcca

SEQ ID NO: 51567 - DNA, 201 bp, Homo sapiens
aagaaaatctgtgaaaatttgttgactgtaaatagagttcccaaggatgcattctaaaacccatcttgacatccacaaatgtctggtcacctaaagacacyggtgaaaaagagtcaaagaacaataagaatatgttttgctcatgggagaaagaaggaggttttctaggttcttgattactcccacttttcctttcaggtg

SEQ ID NO: 51568 - DNA, 201 bp, Homo sapiens
tttctatttaaatatgatgaatatctagctgtctgcctatctgtctgaaatctattaataacatctgactgtcaatatccagctctcggcttgctctgccytctattcaccctagtttgacacaaccacattttgcctttacagaaccctattgttcgcaatgccctgttctgcctggagtcagcctggaatgtagcaaag

SEQ ID NO: 51569 - DNA, 201 bp, Homo sapiens
gctgtttcaggagctctgggtcactgctcaacaatgccataaaggtgaactgttccacaaacttctgagcctgacacacatcaacataacatcccccaggrgtgaagggaggaaggaggcacaaggaaattgcaaagatgaagtcctggatgatgtgggatggcatcagggaaagagtattacactttctacagagaagga

SEQ ID NO: 51570 - DNA, 201 bp, Homo sapiens
tgaatgaaacccagcagctgacgcaggagatcaaggccaaggccgttggctatctcatcactggtaagtgagacagagaaaaatttactttgttactctartgaaacttttcccaattaagcttcagttatatcatcaaatattaacccatgatgataatttttatgaaaacaacaatcttcccacactctaataggatgt

SEQ ID NO: 51571 - DNA, 201 bp, Homo sapiens
aaagaaaagaaaaaagaaaaagagatgtctaagctaaaaagaaaaagtctccaaactctcagtaacagctaattgactttcttgggtgcacactgtgatgsgggagcctgtgtgtacaaaacagagcagtaaagtgctcaatgaaaagagcctcagcactgcatttttcctccccctaggctcacagcttttgtactgaag

SEQ ID NO: 51572 - DNA, 201 bp, Homo sapiens
catgtggcagcaaaaaaaaaaaaaaaaagaaaagaaaagaaaaaagaaaaagagatgtctaagctaaaaagaaaaagtctccaaactctcagtaacagctrattgactttcttgggtgcacactgtgatgggggagcctgtgtgtacaaaacagagcagtaaagtgctcaatgaaaagagcctcagcactgcatttttcct

SEQ ID NO: 51573 - DNA, 201 bp, Homo sapiens
aaaaaaaaaaaagaaaagaaaagaaaaaagaaaaagagatgtctaagctaaaaagaaaaagtctccaaactctcagtaacagctaattgactttcttgggkgcacactgtgatgggggagcctgtgtgtacaaaacagagcagtaaagtgctcaatgaaaagagcctcagcactgcatttttcctccccctaggctcacag

SEQ ID NO: 51574 - DNA, 201 bp, Homo sapiens
gagagcagaaccctcatgagccaatcacctcttaaaggctccacctctcaatactaccacattggggattaagttttaacatgagttttggtggagaaacmatttctaaaccataatgttaccttatttaattcttatagctaccctgggaagtgagagttattagcttcattttacagaggagaaaacatattcagtgtg

SEQ ID NO: 51575 - DNA, 201 bp, Homo sapiens
tcttcattgatgaagcacacattacccaatctctcacgtggctctcccagatgcagaaggacaatggctgtttcaggagctctgggtcactgctcaacaaygccataaaggtgaactgttccacaaacttctgagcctgacacacatcaacataacatcccccaggggtgaagggaggaaggaggcacaaggaaattgcaa

SEQ ID NO: 51576 - DNA, 201 bp, Homo sapiens
ttccatttagtaaacctgggccaaaagagttgccactgtacatcttatctacgtatttgtatttgaattatcaagttcttgatagctgctattcttttttwtttttttgagatggagtctcgctctgtcgcccaggctggagtacagtgacgtgatctcggctcactgcaagctccgcctcccgggttcacgccattctcc

SEQ ID NO: 51577 - DNA, 201 bp, Homo sapiens
tgaggcagtacaatcacttgagcccagaaattcgaggctgcagtgagctatgattgcaccactgcatttcagcctgggcaacagagcaagaccctgtctcaaaaaaaaattacatttatttaaggtgtacaacataacgttatgggacacatatagataataaaatgactactatagtgatggaaagtaacatggccatca

SEQ ID NO: 51578 - DNA, 201 bp, Homo sapiens
taaaattaatacttgcaaacataagggaagtcatgtaccttttaacagatctaactatttatgtctctagagttgttgggatctgtgaaagtggtaataartgatttacaaattattttctatttttaaagtgaaggaaagttgtaaaaataggtttctgactgacattaccaacatagtcatatgaactgaatataaggg

SEQ ID NO: 51579 - DNA, 201 bp, Homo sapiens
gcaggagaactgtttgaacctgggaggtgggggttgcagtgagccgagatcatgccactgcactccagcctggtgacagagtgagactctgtcaagaagaaaaaaaaaaagaaaagaaaagaaaagaaaagaaatgttgaacataggccccaaatctcttatggcttgtagggtgtctgctaagaggcccaccattagtct

SEQ ID NO: 51580 - DNA, 201 bp, Homo sapiens
aggagaactgtttgaacctgggaggtgggggttgcagtgagccgagatcatgccactgcactccagcctggtgacagagtgagactctgtcaagaagaaaraaaaaaagaaaagaaaagaaaagaaaagaaatgttgaacataggccccaaatctcttatggcttgtagggtgtctgctaagaggcccaccattagtctga

SEQ ID NO: 51581 - DNA, 201 bp, Homo sapiens
gcttccttagattaggtttcaacattctcctgaatctcaatgaccttcattcctatccatagtctgaattctatttctgtcatttcagccatctcagcccwattaagaacccttgctggagaactggtgtgattgtttggaggaaagaagatgctctggctctttgagttgtcagagttcttgtgctggttctttctcatc

SEQ ID NO: 51582 - DNA, 201 bp, Homo sapiens
ttcttcccaaacttaagagctttgcagtataaacacatagtgatataaaataagtaatgttaagctaaagtcaaatttgcatgaagttggaaaaattccayattctacgtagagttataacaatttttaattgagtgccaccaatctcaggctttaatataatcattttaaaaaagtaaattttggccgggcacattggct

SEQ ID NO: 51583 - DNA, 201 bp, Homo sapiens
ccattccagaggctcagatcaagaagcctctattagccctttgtcagatgagtaggttgcgaaaattttctcccattttgtaggttgcctgttcactctgwtggtagtttcttttgctgtgcagaagctctttagtttaattagatcccatttgtcaattttgtcttttgttgccattgcttttggtgttttggacatgaa

SEQ ID NO: 51584 - DNA, 201 bp, Homo sapiens
ctctattagccctttgtcagatgagtaggttgcgaaaattttctcccattttgtaggttgcctgttcactctgatggtagtttcttttgctgtgcagaagytctttagtttaattagatcccatttgtcaattttgtcttttgttgccattgcttttggtgttttggacatgaagtccttacccatgcctatgtcctgaat

SEQ ID NO: 51585 - DNA, 201 bp, Homo sapiens
tgtagatatgcagagttatttctgagggctctgttctgttccattgatctatatctctgttttggtaccagtaccatgctcttttggttactgtagccttrtagtatagtttgaagtcaggtagtgtgatgcctccagctttgttcttttggcttaggattgccttggcgatgcgggctcttttttggttccatatgaact

SEQ ID NO: 51586 - DNA, 201 bp, Homo sapiens
tgctcttttggttactgtagccttatagtatagtttgaagtcaggtagtgtgatgcctccagctttgttcttttggcttaggattgccttggcgatgcggrctcttttttggttccatatgaactttaaagtagttttttccaattctgtgaagaaagtcattggtagcttgatggggatggcattgaatctgtaaattac

SEQ ID NO: 51587 - DNA, 201 bp, Homo sapiens
gaggatgacttgaggtcaggggtttgagaacagcctggccaacatggtgaaaccctgtctctacgaaaaaaacaaaaattagccaggcctggtggcgggcrcctgtagtcccagctacatggggggctggggcacgagaatcgcttgagccgggcagggggaggttgcagtgagccgaaatcacaccactgcgctccaacc

SEQ ID NO: 51588 - DNA, 201 bp, Homo sapiens
tccatgtggttctcttgtcaccaggatgtttctatcttttctccttttctttcctttcatccaaggctgaaggtattgagcaagaaaagactttcagttcyatgacctgtgcctcaggtaagagtccatcttcataatcatagtgagatcaaaaccacaaaggggtataaacctcaagttacaatgcacattcattttatc

SEQ ID NO: 51589 - DNA, 201 bp, Homo sapiens
accgtagatcttggcaacctcagcatacattattttttctttccttatcaagtggggaactttcaccttttcacctaaaggaagcactttacggcttctcyttcacctcccaattgccagcatcaatactctggtgcattggggccatgatgaagtaaaataagggtgacttgaacacaagcactgagatactgtgacaat

SEQ ID NO: 51590 - DNA, 201 bp, Homo sapiens
agtgggagctgaatgatgcaaacacatagacacatggaggcgagcaacatatatggggcctgtctgagagtgggagtgacagaagggagagcatcaggaakaatagctagtggatgctgggcttaatccctaggtgatgggatgatctgtgcagcaaaccaccatggcacacatttacctatgtaacaaacctgcacctcc

SEQ ID NO: 51591 - DNA, 201 bp, Homo sapiens
ttagcgcttgcagaattctttgctgcaagttaggttatatgccaggaacattcttgaagctgacacacaactcagctttctcagttccacgagagtcattmtccaacccgtcatcttgaaatctccaaaatatataattttaatttatcttatagcacttatctctttgtaaattatgtaatagtggttgtatatagatca

SEQ ID NO: 51592 - DNA, 201 bp, Homo sapiens
cttcacttgccctcctccccagctcatcaggtgtggctgaggtaggagtaacagtccctgacaccatcaccgagtggaaggcaggggccttctgcctgtcygaagatgctggacttggtatctcttccactgcctctctccgagccttccagcccttctttgtggagctcacaatgccttactctgtgattcgtggagagg

SEQ ID NO: 51593 - DNA, 201 bp, Homo sapiens
ctgaattgtttatttcagatgtcaaaaaataagtggaataaaatctaatgctctaatcttatttcccagagaacaacagttttgcaaagttccatacagtratttaaagtaaatttaatttatgtaaaagtaatttaatgtaaatcattaaattctgttcactccactggtaatttcatttttagtatagcaaccactctc

SEQ ID NO: 51594 - DNA, 201 bp, Homo sapiens
tgtactgtaagagagggaaaatgctgacaatggaaagaaagagtaattctgattatggaaacaggaaagacattcatagggatgctgtattttaaaaaacmtaaagaaggacaaagggcttcactggtgacaagaaacaacgtgaacatcacagaaatatctcataatccatggccaaaaccactattcaaatacagcagc

SEQ ID NO: 51595 - DNA, 201 bp, Homo sapiens
tacacacaaagaaaccaagattcaaattaattgtttcttgctgaggtgacttagctggtgatagctagaactgatcagagatttttttttagatacatccratacttcagggcacaaaatcagataaaatacaagattctgatgtactgtaagagagggaaaatgctgacaatggaaagaaagagtaattctgattatgga

SEQ ID NO: 51596 - DNA, 201 bp, Homo sapiens
  misc_feature (1)...(201): n = A,T,C or G, or insertion/deletion polymorphism (see Tables 1-2)
acaagtagattgaacaattatttttttccaggggatgggattgaaggtgttcactaactcaaaaatccgaaaaccaaagtcgtgttcagtcatcccttccntgtctgcaggagcagtaggtcaaggatactatggaggtaaaacagcaatttgcttttaattttatttcatgtccaacaatattactatgcccaaaatgct

SEQ ID NO: 51597 - DNA, 201 bp, Homo sapiens
attaacatgctggcttgtgagtttttgaatgttaataaaactctgtatctattcataatcttagtaattatgtagccttgcctctccatttttcagcagasaaaaatgaagccaataaaaaggttaaagtctcttgtgaggatcacacaaaagctcagtatgtgagtcagggctagatctaacctctgcctattcatctgg

SEQ ID NO: 51598 - DNA, 201 bp, Homo sapiens
ccctagtttgacacaaccacattttgcctttacagaaccctattgttcgcaatgccctgttctgcctggagtcagcctggaatgtagcaaaggaggggacycatgggagccatgtctacaccaaggcattgctggcctatgctttttccctactgggaaagcaaaatcagaatagagaaatactgaactcacttgataagg

SEQ ID NO: 51599 - DNA, 201 bp, Homo sapiens
tttgcctctgggtctttgaggaatcaccacactttcttccacagtggttgaactaatttacactccccacaacagtaaaaaaagcattcctttttctctgyaacctcatcagcatctgttgttttttgactttttaacagcagccattctgactggtgtgagatggtatctcattgtggttttgatttgcatttctctaat

SEQ ID NO: 51600 - DNA, 201 bp, Homo sapiens
agccattctgactggtgtgagatggtatctcattgtggttttgatttgcatttctctaatgattagtgatgttgagcttttcttcatatgtttgttggctrtatgtatgttttcttttgagaattgtctgttcatgtcctttgcccactttttaatgggtttttatttcttgtaaatttgtttaagttcctcgtagactct

SEQ ID NO: 51601 - DNA, 201 bp, Homo sapiens
gatttgtgtatgttgagccaagcttgcatcccagggatgaagcctacttggttgtggtggataagctttttgacgtgctgctggatttggtttgcaagtaytttgttgaggatttttgcatcgatgttcatcagggatattcgcctgaagctttctttttttgttgtgactctgccaggttttggtatcaagatgatggtg

SEQ ID NO: 51602 - DNA, 201 bp, Homo sapiens
gtgaaaggaaggggtccagtttcaattttctgcataaggctagccagcattcccagcaccatttactaaatagggaggcctttcctccattgcttgttttygtcaagtttgtcaaagatcagatggttgtaggtttgcggttttatctctgagttctctattctgtaccattggtctatgtgtctgttctttatcagtacc

SEQ ID NO: 51603 - DNA, 201 bp, Homo sapiens
cttgcctgttgttggtgtatagaaatgcctgtgatttttgcacattgattttgtatcctgagattttgctgaagttgcttatcagcttaagaatcttttgractgagataatggggttttctagatataaaatcaaataaagataatttgactttctctcttcctattcgaatacactttatttatttctcttgcctgatt

SEQ ID NO: 51604 - DNA, 201 bp, Homo sapiens
ttggtgtatagaaatgcctgtgatttttgcacattgattttgtatcctgagattttgctgaagttgcttatcagcttaagaatcttttggactgagataayggggttttctagatataaaatcaaataaagataatttgactttctctcttcctattcgaatacactttatttatttctcttgcctgattgccctggccag

SEQ ID NO: 51605 - DNA, 201 bp, Homo sapiens
ttagcccccttcctagggatatatacaaacagatttcctgcctttccagggatcccagggccggattatgtaaaactccagggtttctgtgtgcctgagcwgctgctctgccaagactccacatagctttgtgtatcagacccaagaccctggtggcatgggctcacaagggtatctcctgatccatgggttgcagagatc

SEQ ID NO: 51606 - DNA, 201 bp, Homo sapiens
tttctcccatacgtggaagtatcaccagcaaaggccatgaaacagcaaagatggcagcctgtgccttcctctagaaactccatcctgtgggggtactaacytgttgccagcccacatgcaactgttggaggtggctggagaccctcattgggaggtctcgcccagtcaggaggaatgggatcagggaccttctcaaagaag

SEQ ID NO: 51607 - DNA, 201 bp, Homo sapiens
gcccttgctggtgaggtgtcacagtcatctggaagagaagagacactctggcattttgagttttcgttgtttttgaattaattctttctcatctttgtgarcttatctacctttaatccttgaggctgctgccctttgaattagatttgtgttaggtcttttttgttgatgctgttgttttctgtttgtttgtttgttttt

SEQ ID NO: 51608 - DNA, 201 bp, Homo sapiens
ggcccccaatttcttctggcttccatggttttggcagagaggtccactgttagtatgatatgtttccttttgtaggtgacttggcctttctctctaggtgyccttaacatggtttctttcattttggcattggagaatctgatgattttgtgtctttgggttgatgttcttgtggagtatcttactggccttctctgcatt

SEQ ID NO: 51609 - DNA, 201 bp, Homo sapiens
gaagtcaggtaacatgatgcctccagctttgttcttcttgcttagaattgtcttggcaattcaggctcttttttggttccatatgaattttaaaatagatktttctaattctgtgaagaatgtcaatggtagtttaatgggaatagcactgaatctataaaatactttgggcagtatggccattgtcattacactgattct

SEQ ID NO: 51610 - DNA, 201 bp, Homo sapiens
tccacagcctgacctctgatccccagcaattcatgagctctcacatgtaaaatatactcgatcctctctctgagattctcattgtaaaataggaacagctsaaaggctaaatatcatttaaatcaggtccaagtacagataatgcctctcaggtgtgattcctcaggtacaatacctctagatacaaagacattgaactaa

SEQ ID NO: 51611 - DNA, 201 bp, Homo sapiens
gggtctagcttgtgacctgccctggttgcgattaacatggcggccaaagctgcagccacctgacagcttgacagaggttggaagatctgcttccaagacargtttcttgagagctattggcaggaggcctcagttcctcaccacacagaggtcctagggctgctggtgtcccacaatgtgacaactgattttctccagagc

SEQ ID NO: 51612 - DNA, 201 bp, Homo sapiens
ataaataatacatgttcatttatgtacctatttaattctactcaaaaacaaaggtaaataaagaagtagaaagggtgtttgcgttacctatctactgctgyataacaattttcttcaaaacctagtggcttaaaacaataaacatttattatcacatgcaatttctgtgagtcaggaattcagagcagcttagctaggtgg

SEQ ID NO: 51613 - DNA, 201 bp, Homo sapiens
aaactgtgagataactatatctgagacccctgtcctatttttaattatcaaaattaacattcttcaggttggagcatatccactagtgccccctgatctgyaggggtgtgtcccaagaccttcagtgggtgtctgaaactgtggatagcactgaacccaatgaccatcagctggaacacatttctgttcctgtcttccacc

SEQ ID NO: 51614 - DNA, 201 bp, Homo sapiens
tcaggatagatagctaatgcatgggggacctaataaccaggtgatgggctgatacatgcagcaaaccaccatggcacacctatgtaacaaacctgcacatyctgcacatgtaccccagaacttaaaataaaataaaatttaaaaaataaataaataaatagataaataataaaagtttttttaaaaactgtgcaaaaaaag

SEQ ID NO: 51615 - DNA, 201 bp, Homo sapiens
agtaaaatataacagtaaaaatacgtaccacttgccgagtacttgatagtttctcaagctgtctcatataggttttctcacttaatctgcccaacattccrgagaataatagtcccattttaagattagaaaagtggattcagaatagttgagagatttgttcaagataagtggcacaagctgagatgtgattttgaaatt

SEQ ID NO: 51616 - DNA, 201 bp, Homo sapiens
atttttgtgctgatctgtgacagaacctccattgacttagtccattgacttttagaataaaactgattgcaccaattaatacatattgttatgaaaacacmtttatggatgaaaacgcttactatcatcagtttttctctaatttagacttcttcctttcccaggcagtatatggtgctggtcccctccctgctccacact

SEQ ID NO: 51617 - DNA, 201 bp, Homo sapiens
aggtgtgagtaatgaacgaatatgggaaataaaacaatagtttactttccataacaaaataaaggtcatttgtaagaaagaaattttatgactaaagtaayttctaaaagtactgactctttatatttttcagacctggaagtcactgcaaacaggatcagtgaaatcacaaacattgtatccaaactcaaattcgtgaaa

SEQ ID NO: 51618 - DNA, 201 bp, Homo sapiens
tctctgggtgttgttcacatcaactatcaagtacttttcttctttaggtgcttctggtggatggaaaaggtgtgcccatccccaataaactcttcttcatytctgtgaatgacgccaattattactccaatgcaaccaccaatgagcagggtcttgcacagttttcaatcaatactaccagtatctcggttaataaacttt

SEQ ID NO: 51619 - DNA, 201 bp, Homo sapiens
tcatttatttggctgtcgaccagtatgagggagaggcatagtgtattttagagtggaagacaccgttgtaactattcattttggtgagaagctaaggtgamgaatttcaagacagtattctttctttgcttttctgtttactcaggttttcactgtgcatcccaacttgtgttttcactattcatgggtagcagaagacca

SEQ ID NO: 51620 - DNA, 201 bp, Homo sapiens
gttcttagtcaacaagattctcatttggacgactaactttggaggttacaaagcagatatgagtattaagttctcgaaggtcaattaacttacttaatgcaaaaaaaaaagttttcttgtcattagagacagaatagtagattcagtgactattgatctcaatcagtttgacatttattggttttggtatttttctcagct

SEQ ID NO: 51621 - DNA, 201 bp, Homo sapiens
gagttcagtcctctctgggtgttgttcacatcaactatcaagtacttttcttctttaggtgcttctggtggatggaaaaggtgtgcccatccccaataaastcttcttcatctctgtgaatgacgccaattattactccaatgcaaccaccaatgagcagggtcttgcacagttttcaatcaatactaccagtatctcggt

SEQ ID NO: 51622 - DNA, 201 bp, Homo sapiens
aggaacctgaacctctgaagtggcatagaaatgctttaggaagcaaggacaagctggtaatgaattgaacaacatgtggcagcaaaaaaaaaaaaaaaaaraaaagaaaagaaaaaagaaaaagagatgtctaagctaaaaagaaaaagtctccaaactctcagtaacagctaattgactttcttgggtgcacactgtgat

SEQ ID NO: 51623 - DNA, 201 bp, Homo sapiens
catgcttatagcagtgccaacatttgaagtggtgccttatacatttcatcacctacaatggaagtagttaactctggaagaggttacaaaacaacaaaaasggactgattcagttggagagaaaaaaaaagaaagaaaagaggtacaacaaacagaaaatgcaataacattttcaaactatttttatctctatttgccaga

SEQ ID NO: 51624 - DNA, 201 bp, Homo sapiens
tcattaagtctctcgtggttttataattaccgttattcaactaaatgtgggccatctactcaagtccccagtggaccattcagaaaatggaacttttgttsttgcccttttgtagctacctggtggcccttcaccctgctttaaaatgtaaagtattttctgaagtgttatctggtaccatttaatgcttccagtagaaat

SEQ ID NO: 51625 - DNA, 201 bp, Homo sapiens
ggaatatttgaggaccatgagaatttaaaggaaagacttaagacatcccccataacacttttcactaagccctatgttaatatattagcaacatggagacktacaacgagcatctttaccctctaaagccacgctatggtcattggacacattctagaccagagtttttcagcatcaacactattgacatttcgagccaca

SEQ ID NO: 51626 - DNA, 201 bp, Homo sapiens
cagcagtggcaaggcagggtgcacacacacacatgtgttggcaaattttattattaaaagctttaatttcctaccactattctttgccataaagtcaccayaattttttttctggttttatgacatttcaatctaccccactttccttgttgaactcaagacagtgataaaagggcttccttccttttagaaggggagctt

SEQ ID NO: 51627 - DNA, 201 bp, Homo sapiens
ttgcccccattgcacgaatgttcatctttgccattttaccagatggagaagttgttggagactctgaaaaatttgagattgaaaactgtctagccaacaargtgagcgatttaacataaaattaaaagaacacaaataaatgatactgtaggtgccatctattttaccccagagaaaactaagtccagaaaagtaaaatga

SEQ ID NO: 51628 - DNA, 201 bp, Homo sapiens
tatccttccctgtggagtcagacgttgcccccattgcacgaatgttcatctttgccattttaccagatggagaagttgttggagactctgaaaaatttgarattgaaaactgtctagccaacaaggtgagcgatttaacataaaattaaaagaacacaaataaatgatactgtaggtgccatctattttaccccagagaaa

SEQ ID NO: 51629 - DNA, 201 bp, Homo sapiens
tagtttggctagatatgaaattcttggttggaatttattttctttaagaatgttggccaggtgcagtggctcatacctgtaatcccagcactttggggggycaaggtggtcagatcatgaagtcaggagatcgagaccatcctggccaacatggtgaaaccccatctctactaaaaatacaaaaattagccaggtgtgatg

SEQ ID NO: 51630 - DNA, 201 bp, Homo sapiens
tccaggggatgggattgaaggtgttcactaactcaaaaatccgaaaaccaaagtcgtgttcagtcatcccttccgtgtctgcaggagcagtaggtcaaggrtactatggaggtaaaacagcaatttgcttttaattttatttcatgtccaacaatattactatgcccaaaatgctaaaatgaggtaatgtagccctatttc

SEQ ID NO: 51631 - DNA, 201 bp, Homo sapiens
ttgggtcctgtgctgagttcagatcctaaatttctgccttgatgatctgtctaatactgtctgtggagtgttgaagtttctcaatattattgtgtgggagyctgagtctctttgaaggtctctaagcacttgttttatgaatctgggtgctcctgtgttgggtgcatgtagattttgtttagttaggtcttctcattgaat

SEQ ID NO: 51632 - DNA, 201 bp, Homo sapiens
gaattctattttaatcacatggtagtccgagagtgtggagtgtatgatttcatttttctaaatttgctgaggatagttttatgtctgattgtgtgatcggytttagagtagtgccgtgtgcagttgagaagaatgtatgtgttgttgttttgtagtggatagttttgtagatgtctatcagatccatttgggtcctgtgct

SEQ ID NO: 51633 - DNA, 201 bp, Homo sapiens
cagagaaaaaggaaaggtaattagtgaagatctaccttaggggtaaaaagccagcttccctcatggtaggctaacacagactttgggggaaaatcccagaygccaaaaatttactctttggggcggttgtccactcgtctcttccaggacacagtggtggctctccatgccctgtccaggtatggagcagccactttcacc

SEQ ID NO: 51634 - DNA, 201 bp, Homo sapiens
cagatctcattgccagagctccctggagaatatgtcataacagtaactggggaaagatgtgtgtatcttcaggtagggctccaagcttatatgggtgagartcaactttaaacttgccaattgaaatggaaactctgttccttccttcctgggaaagtaaaaggcacctctggagacgttaagtaatgaggaagtgagggg

SEQ ID NO: 51635 - DNA, 201 bp, Homo sapiens
atgagttttcttgaggttgattctctccagcacagacttgacaactgaaagtgggtcatgtggggaatagaaggctgagaactgtgtccagctcaagaaayttccttcactgttttttcatttcagatcatggctaagggagtcatcgtcagatctggaacccacactctgcctgtggagtcaggagacagtgagtatcct

SEQ ID NO: 51636 - DNA, 201 bp, Homo sapiens
ctgatagtgtctttgctgtttcacagacatccatgaaatacaatattcttccagagaaagaggactccccatttgctttaaaagtgcagactgtgccccaracttgcgatggacacaaagcccacaccagctttcagatctcactgaccatcaggtaagacgttctaacctaatcacctatctttggcccaaaagcaactt

SEQ ID NO: 51637 - DNA, 201 bp, Homo sapiens
gtcacaagcagaaggggtgttttctccctttataaggagaaaacttaacttcatccctccagaattaacccttgatgtgataaatgtgagagactacaaargagaaccaatagccattctcccctgccttggggcagtaagcttcagaaagatgaaggtttcaggggaataaaatgaaaaagagaaaattaaaagttatca

SEQ ID NO: 51638 - DNA, 201 bp, Homo sapiens
cctcacatggggtgataggtcagtgtgcagctgaaagcctctccagccttcctagcttcccaaaatacaaagggagaagaatcctattgtatctgtggaartgagagacaaaccttgtcttggacagtgactcctaaaactctgggtgagtgacagtacccaaaagggcctatcaatcaacaaggacggtggctgtctgag

SEQ ID NO: 51639 - DNA, 201 bp, Homo sapiens
agaaggactaatttaaggtatattcatgttatctatttataaacatgggaatccattcaaatatagtgtaagggaggcagtaaaataacttgtattatcayggttataagtcttaatattgctacaaaagtggagagcgatagttcccccactaagtcttaggcttcttttagaaagctactgagcacagccatgcaaaaa

SEQ ID NO: 51640 - DNA, 201 bp, Homo sapiens
cctcccctatcagaacttactgttttcactaggcattctgctgcttctctgtgcctccatctcttaagcagtagacagagggcatgaaccttacctatgaygttcctttccactgttgccctctgtgattacagatacctcttacagttccttttaacctgaagaagcaaaactgatagcctacaaacaaacagtcccaga

SEQ ID NO: 51641 - DNA, 201 bp, Homo sapiens
tgcttataatcccagaactttgggaggccaaggggggaggatcgcctgaggccaggagttctagatcggccctagtaacatagtaagactctacctctgcaaaaaaaaaaaaaaaaaaaaaaattagcagtgggctggtggcgtgcacctgtagtcccagctgcttgggaagctgaggtgggaggatccctcgagcccaga

SEQ ID NO: 51642 - DNA, 201 bp, Homo sapiens
cctacattattttgctaagaatgatagcttctagctccatgtatgctcctgcaaaggacatgatggcgttcttttttatggctgcatagttccatggtgtrtatgtaccacattttctttattcagtcttccactgatgggcatttaggttgattccatgtctttgctactgttcattgcaacagggttgcaatgaacata

SEQ ID NO: 51643 - DNA, 201 bp, Homo sapiens
acacaaatatgaatggcataacactgccttaaggatattttaagcttcctttcttcccaaacttaagagctttgcagtataaacacatagtgatataaaayaagtaatgttaagctaaagtcaaatttgcatgaagttggaaaaattccatattctacgtagagttataacaatttttaattgagtgccaccaatctcagg

SEQ ID NO: 51644 - DNA, 201 bp, Homo sapiens
aaactctgtatctattcataatcttagtaattatgtagccttgcctctccatttttcagcagagaaaaatgaagccaataaaaaggttaaagtctcttgtraggatcacacaaaagctcagtatgtgagtcagggctagatctaacctctgcctattcatctggatactttttagttatatttaggtttttttatttgcaa

SEQ ID NO: 51645 - DNA, 201 bp, Homo sapiens
aaaaaaataagtgcactttgaagaaaagctaaggagcagttaccacaagggaaatagaattgtgcgcaaaacattatctgcaaggcttaaagtttcagaartcacataggtcttaaaggttggaagtcacaataatgataagaggcataaatgctaatttactaaggattactaaaaacaattttgaagctcataaggtaa

SEQ ID NO: 51646 - DNA, 201 bp, Homo sapiens
tgaagcttccgttgctgtaactttcaggttccgaagagcaagtagtgattagggtgtagcatggatcacctgcacagcacagctgacccactagttctttyagttgtgatgtgaggttaagttgagatctttctaacttttcgatgtggatgtttagtgctataagtttccctcttaacaccgccttagctgtgtcccaga

SEQ ID NO: 51647 - DNA, 201 bp, Homo sapiens
acaattcctgctcagtttctctaagaatgaagcaatactgtctcaatttcaaaattggtccttcgccacaaaacccataaaactgtctccaagtgatctcrtttttccagcttccattcacatcaaattatgctatgtctaggatacatagaatttccacctttgacaaagactcctctcttttcagggaatgagggatca

SEQ ID NO: 51648 - DNA, 201 bp, Homo sapiens
tcaggaatattggtttgcaaatattttgttgaggatttttgcatcaatgttcatcaaggacgtttggccagactattttttatgtgagtcccacttctcckcatgggggcaaccccacaacctgggactgcagccaccaccaccccacccccatcagggttttcaggctggtagcaactttacatttccctgggacggagc

SEQ ID NO: 51649 - DNA, 201 bp, Homo sapiens
cttgcatcccagggatgaagtctacttgatcgcggtagctaagctttttgatgtgctgctggattcagtttaccagtattttattgaggattttcgcatcratgttcatcaggaatattggtttgcaaatattttgttgaggatttttgcatcaatgttcatcaaggacgtttggccagactattttttatgtgagtccca

SEQ ID NO: 51650 - DNA, 201 bp, Homo sapiens
ccaaccttgcatcccagggatgaagtctacttgatcgcggtagctaagctttttgatgtgctgctggattcagtttaccagtattttattgaggattttcrcatcgatgttcatcaggaatattggtttgcaaatattttgttgaggatttttgcatcaatgttcatcaaggacgtttggccagactattttttatgtgag

SEQ ID NO: 51651 - DNA, 201 bp, Homo sapiens
cctttcttctttttgcttaggattgccttggctatttgggctctttttttagttccatatacatttttaaatagttttatctaggtctgtgaaggatgtcrttggtagttttataggaaaaacattaaatctataaattgctttgggcaatatgaccattttcatgatattgattcttcctatctatgagcatggaatatt

SEQ ID NO: 51652 - DNA, 201 bp, Homo sapiens
aaaagtggtcaataggctcaggaatgtcaaaataaactacttgcacacagccaccttgtgttcttgttgtgcgtccttcattccatgagttttcttgaggytgattctctccagcacagacttgacaactgaaagtgggtcatgtggggaatagaaggctgagaactgtgtccagctcaagaaatttccttcactgttttt

SEQ ID NO: 51653 - DNA, 201 bp, Homo sapiens
caagacagtattctttctttgcttttctgtttactcaggttttcactgtgcatcccaacttgtgttttcactattcatgggtagcagaagaccaccagggygctcagcacactgcaaatcgtgttttctccttaagtggaagttacattcacctggagcctgtggctggtaccctgccctgtggccacacggagactatca

SEQ ID NO: 51654 - DNA, 201 bp, Homo sapiens
aatatttgaatgttgggagactgaaaattcatttatttggctgtcgaccagtatgagggagaggcatagtgtattttagagtggaagacaccgttgtaacyattcattttggtgagaagctaaggtgaagaatttcaagacagtattctttctttgcttttctgtttactcaggttttcactgtgcatcccaacttgtgtt

SEQ ID NO: 51655 - DNA, 201 bp, Homo sapiens
gctgatctgtgacagaacctccattgacttagtccattgacttttagaataaaactgattgcaccaattaatacatattgttatgaaaacacatttatggrtgaaaacgcttactatcatcagtttttctctaatttagacttcttcctttcccaggcagtatatggtgctggtcccctccctgctccacactgaggcccc

SEQ ID NO: 51656 - DNA, 201 bp, Homo sapiens
catctgttctctaactttaactgaagttttctaattctctccagcttgaaagatctagctctgtgagccggacagaagtgagcaacaaccatgtcctcatytatgtggaacaggtgagggctctgacatcctggctgagactacatatgggtcgtctttctaagtgagtctctttactagaatagtcggtaacatgaggaa

SEQ ID NO: 51657 - DNA, 201 bp, Homo sapiens
cattcacatgggcccagagagttaatctcataacaagggactacaaaagaatagggttggctcagttgtttagaagaaaatctgtgaaaatttgttgactktaaatagagttcccaaggatgcattctaaaacccatcttgacatccacaaatgtctggtcacctaaagacactggtgaaaaagagtcaaagaacaataag

SEQ ID NO: 51658 - DNA, 201 bp, Homo sapiens
cgtttcttccttcacccaacgttatctttcagatgagtctgtggttgctgagtatatcgccccctgcagcacaggtaagagttcaccacttatgaccagtrctagatggcattaacccactctccaagggcccctgcaatttaaattctctacaaggcttttcctacatctgagacaatccacatggcatgtcctcacacc

SEQ ID NO: 51659 - DNA, 201 bp, Homo sapiens
ctgaggcagcaaaattgcttgagcctaggagcttgaggctgtcatgtgtgatagtgctactgcactccagcctgagctacagagcaagaccctgtcgagaragagagagagaaggaaatggtatactttgaatggaaacagatactgaggagcgtttccatcaaacaacagaagagaatatactaacacttggcactggaa

SEQ ID NO: 51660 - DNA, 201 bp, Homo sapiens
ctcttgtgaggatcacacaaaagctcagtatgtgagtcagggctagatctaacctctgcctattcatctggatactttttagttatatttaggtttttttwtttgcaaaccaaaaaataatgaataaagaataaaatcttaataatccataagtttagtaatttcactactctatatttactgtcaagtgtttcgccatag

SEQ ID NO: 51661 - DNA, 201 bp, Homo sapiens
tcagaggtggcattccttagcatccagataaaggggcctacgcaagatttcaggaagaggaacacagttctggtactgaacacccaaagtctggtctttgkccagacagacaaacccatgtataaaccaggacagacaggtaagtagggaaattccactgtttggggcaacactgagaagggccacctgaacagccaaagt

SEQ ID NO: 51662 - DNA, 201 bp, Homo sapiens
atttctcagactgataagctctttggttgatgcattaagagagatttacacttgcccagtaatgcccatagactatgtatcaaaaccaatcctaaaaacasgttctctagtcttattctttaagactgaactataaagggaagagatcgaaatatttttctatttaaatatgatgaatatctagctgtctgcctatctgtc

SEQ ID NO: 51663 - DNA, 201 bp, Homo sapiens
tcctgagacttggatctgggagttggtggcagtgaagtaagtaactttactttcctccatttgctggaggggagggaatgtggttcctccaacattttcawttctaagacaatcttcctgaaaagttctgaataattatcttaacctcttcctctttaggatagacctaagtaaaatgcgcaattgcataggctcattaat

SEQ ID NO: 51664 - DNA, 201 bp, Homo sapiens
cttaagtggattcagttcttgacgttagctttatgcatattaattctcacttgagaaaaggtggcttacattcattatttctgttcttcacttgccctccyccccagctcatcaggtgtggctgaggtaggagtaacagtccctgacaccatcaccgagtggaaggcaggggccttctgcctgtctgaagatgctggactt

SEQ ID NO: 51665 - DNA, 201 bp, Homo sapiens
aatcacatctcttctttccttttatcatatagattccactgatataccttgaggtaagtatcagaaaaagtatcttataaggaaattagtgcttttagagrgtaggaggttctgataatactctagacagatgaactactttaaaaattttcagatctgaattcctcctactcccagttgtcaggttgattgtattttctc

SEQ ID NO: 51666 - DNA, 201 bp, Homo sapiens
tttcatcatatattttgctttaacatcttaggataaatcacaaagatcatgatatttttctgtacatgcagtagtatgtacctctaaaatacagagacatygtccacttctgcgacaacacgatcacttaacaaaattggaagtaattttccaaaactaattgcaagtttacagtcaagtatcttcaattgtcctaaaaat

SEQ ID NO: 51667 - DNA, 201 bp, Homo sapiens
aattataaatttactttgcctcagcacttttgtaatattactcctttgacttctctttatttaacgacttactattaaaattttcaaatacataaaagaayagaaacacacttaattatgatttaacaataaacatctttccgtattgtttcatcatatattttgctttaacatcttaggataaatcacaaagatcatgat

SEQ ID NO: 51668 - DNA, 201 bp, Homo sapiens
agataatcagtatcatggatgaaaaagtgaacataacagtctgtggagagtgagttacattgtttttatctaaaattttatattttgcctcaattttgagkgattatgtaggtacaaaattataaatttactttgcctcagcacttttgtaatattactcctttgacttctctttatttaacgacttactattaaaatttt

SEQ ID NO: 51669 - DNA, 201 bp, Homo sapiens
aatctcctccagatgccatatggctgtggagaacagaacatggtcctatttgctcctaacatctatgtcttgaactatctgaatgaaacccagcagctgaygcaggagatcaaggccaaggccgttggctatctcatcactggtaagtgagacagagaaaaatttactttgttactctaatgaaacttttcccaattaagc

SEQ ID NO: 51670 - DNA, 201 bp, Homo sapiens
cttgaggtaagtatcagaaaaagtatcttataaggaaattagtgcttttagagagtaggaggttctgataatactctagacagatgaactactttaaaaawtttcagatctgaattcctcctactcccagttgtcaggttgattgtattttctcttccttctgtatttgtctttccagaggcaatgctaattatcaccttc

SEQ ID NO: 51671 - DNA, 201 bp, Homo sapiens
tttcaacttaccttcaatattagtgcaaaggaacaaagctgcttttaataggtagaaaatagacaatgttgaaattagaagaaatattcttggtttacttkcaaccaaatgattctgggaattctatttctgttaggtctaaatcataatgacatataactctattaatatctatttcccaacttatgaaagtaagcagta

SEQ ID NO: 51672 - DNA, 201 bp, Homo sapiens
catatagtatagaaatatattatacacaaagacttttttatgctaattgaatttcccttttttcaacttaccttcaatattagtgcaaaggaacaaagctrcttttaataggtagaaaatagacaatgttgaaattagaagaaatattcttggtttactttcaaccaaatgattctgggaattctatttctgttaggtcta

SEQ ID NO: 51673 - DNA, 201 bp, Homo sapiens
tcttgcctcagcctcctgagtaactgctactacagccatgtgccacctggctaaattttttattttaatttttgtagagatgggggacctcacaatgttgygcaggctgttctcaaactcctggcctcaagtgactctcctgcctcagcctcccaaagtgccgggaactaggtataagccacttctcccagcctgaacctg

SEQ ID NO: 51674 - DNA, 201 bp, Homo sapiens
aattatctcgtgttcttaattgtgacaagcaggaggtctgtgaggaattcagtcaacaggttagtaggcggtattctccctcagtgctatcactgtttacraccagtgagactccattttactaactagaaagagggcatcaggacaagcttgtcgcaaaatatcccccaccaaaaaacgaatttctgttcttagtcaaca

SEQ ID NO: 51675 - DNA, 201 bp, Homo sapiens
cccaggacttgcaactgtgagcctgtgtagaaaattatctcgtgttcttaattgtgacaagcaggaggtctgtgaggaattcagtcaacaggttagtaggyggtattctccctcagtgctatcactgtttacaaccagtgagactccattttactaactagaaagagggcatcaggacaagcttgtcgcaaaatatccccc

SEQ ID NO: 51676 - DNA, 201 bp, Homo sapiens
gtaggcaactctaaagagggacagttctgtggaggagtggtagtggaaaatgcaaacagccattctcaattcctgatttatttctcatgtaccagatacayttatgggaagcctgtcccaggacttgcaactgtgagcctgtgtagaaaattatctcgtgttcttaattgtgacaagcaggaggtctgtgaggaattcagt

SEQ ID NO: 51677 - DNA, 201 bp, Homo sapiens
atgtattaattaaacacagatgcaagttacgtcttctttctatatttggtctatttttacctctagactctacaatgaagttttaattaatccttcataayttaagattttgttaatctttggaagcattttcccaagtaggtttcatttctttataacaaaacaacactgttaaatataaggaaaatcttcaactatctc

SEQ ID NO: 51678 - DNA, 201 bp, Homo sapiens
catgcttcttaaagcatggatgaatctatgtgacatacatttttcttacaaatcccaatttactgcagcatctcacacttggccccaattctatgtgttcrtgtcgttccatattctgatcatttctgtctctgcctcacatggggtgataggtcagtgtgcagctgaaagcctctccagccttcctagcttcccaaaata

SEQ ID NO: 51679 - DNA, 201 bp, Homo sapiens
aatcttgatttgtatcattgccattgccatgcttcttaaagcatggatgaatctatgtgacatacatttttcttacaaatcccaatttactgcagcatctyacacttggccccaattctatgtgttcatgtcgttccatattctgatcatttctgtctctgcctcacatggggtgataggtcagtgtgcagctgaaagcct

SEQ ID NO: 51680 - DNA, 201 bp, Homo sapiens
atgccaaatcctcctaatacacaaccaatcttgatttgtatcattgccattgccatgcttcttaaagcatggatgaatctatgtgacatacatttttcttmcaaatcccaatttactgcagcatctcacacttggccccaattctatgtgttcatgtcgttccatattctgatcatttctgtctctgcctcacatggggtg

SEQ ID NO: 51681 - DNA, 201 bp, Homo sapiens
ctgtggaaatgaggttgttgaggtccctgagattaaaagaaaagacacagtcatcaaaaccctgttggtggaggtaacatatttttgggagtccctaacamctgtaagaatgcaacaccgggcggtcactcttgagacaacaaagaaccattaatatcatgctcacacaatacatcctgtaagactaatggaatttcctgc

SEQ ID NO: 51682 - DNA, 201 bp, Homo sapiens
cgagtagctgggactacaggcgcccgccaccacgcccggctaatttttttgtatttttagtagagacggggtttcaccgtgttcaccaggatggtctcgayatcctgacctcatgatccgcccgcctcggcctcccaaagtgctgggattacaggcgatagctgctattcttattaggattctggaagtcacactctgtgt

SEQ ID NO: 51683 - DNA, 201 bp, Homo sapiens
gtacagtgacgtgatctcggctcactgcaagctccgcctcccgggttcacgccattctcctgcctcagcctcccgagtagctgggactacaggcgcccgcyaccacgcccggctaatttttttgtatttttagtagagacggggtttcaccgtgttcaccaggatggtctcgatatcctgacctcatgatccgcccgcctc

SEQ ID NO: 51684 - DNA, 201 bp, Homo sapiens
tgactgacattaccaacatagtcatatgaactgaatataagggtggcttaggaaatgcaggtgactgcaagatcacagaagtagggaaaacactggttgaygtttccttcatttcccacaggtggatttgagcttcagcccagcacaaagtcccccagcctcacatgcccacctgcaagtagcagctgctccgcagtccct

SEQ ID NO: 51685 - DNA, 201 bp, Homo sapiens
tcactctgtcactctgaaagcactggtgcaatcatagctcactgtagcctcaacctcgtgggcttaagtgatccttcttgcctcagcctcctgagtaactrctactacagccatgtgccacctggctaaattttttattttaatttttgtagagatgggggacctcacaatgttgtgcaggctgttctcaaactcctggcc

SEQ ID NO: 51686 - DNA, 201 bp, Homo sapiens
ggaaagtaagggtagtaaaataatataagaaaataatagtttttacttgcaaatttactctataaatggcctaaccctgcagatattgaatcatgaatcaytgaatcattaaagctttgaagagttacattttagtcacaatttactgattttactgatttggcatgggggcagggattttatccatctgttatggattca

SEQ ID NO: 51687 - DNA, 201 bp, Homo sapiens
aatgcaaacattcatgattgagtaaacatatattaaaacattttagcagctcactaccaatgacatcttgggcaagtttgtcaacctggatttgttctgayttcaatatctgttaaaaaaatattaactgaactcatataaaatagttctttagaatatcaaatatatgtggaattaatttttaatcgtgatatcttttag

SEQ ID NO: 51688 - DNA, 201 bp, Homo sapiens
ttttggatggaaggcactgaatatagagatattcgaaatatatagtgaagtgcaacttaacatgtattgtaggccatatatatatatacagaaagtatagytcctttatttttcaatcatgtatcaagtcttcaccaacagcccccagtgggggaccaaagcagggaaaataattttaaccctatccagttgtaagttggt

SEQ ID NO: 51689 - DNA, 201 bp, Homo sapiens
tcctcacctggatcacctgtattctccaaagccagcaggttggagtggcagagtcaaccaaactgcagagatggcagacacccctgccccccaggagctcrgtcccagggagagatcaaagctctgtctttagaaccctggctggagtacctgaagcccccacagaaaggtcccactcgatgaggaggaatggatcagggt

SEQ ID NO: 51690 - DNA, 201 bp, Homo sapiens
agcctgagtagacatagatgtttaacaggtggcaataataatatgtagctaaattcctcagggcattatgtattaattaaacacagatgcaagttacgtcktctttctatatttggtctatttttacctctagactctacaatgaagttttaattaatccttcataacttaagattttgttaatctttggaagcattttcc

SEQ ID NO: 51691 - DNA, 201 bp, Homo sapiens
tgatgagttacaattatctcctttttctcacccttaagacaacctcgtccattgggagcgccctcagagacccaaggcaccagtggggcatctttaccaamcccaggctccctctgctgaggtggagatgacatcctatgtgctcctcgcttatctcacggcccagccagcccccacctcaggggacctgacctctgcaac

SEQ ID NO: 51692 - DNA, 201 bp, Homo sapiens
gaagatgctggacttggtatctcttccactgcctctctccgagccttccagcccttctttgtggagctcacaatgccttactctgtgattcgtggagaggycttcacactcaaggccacggtcctaaactaccttcccaaatgcatccgggtaaggaaaatgagggtgaacaggaaaggtgggtagaacaaaagattcctt

SEQ ID NO: 51693 - DNA, 201 bp, Homo sapiens
ttctttctaaacagggaaaataatgttacaaaagcatcttttttgttatttgtttgcatccctcccccacaccctggtgttttaaaatgaagaaaaaaaaccatcactttttgtacaaaaactcttaatgattaaaaaacaaacaaaacatattggccttgtcatttgtgtgaaagtgggcaaagactggaatagagtaag

SEQ ID NO: 51694 - DNA, 201 bp, Homo sapiens
tgagaacaacccacctgtcccagaaaacattgagagttaagttagcctgatccccttctgcttctctatagctttccccaacatttccccatcaattatgyctctgcttggatctctgagttaatgaccaagtctggttcagagagaatcactttcaatacggtaatcaagagtagtaactggtctctatacaatgtttgg

SEQ ID NO: 51695 - DNA, 201 bp, Homo sapiens
ttagaccaccatctgagtcttgagagtcagcacctgtcagctctgacctaactcagtttcctccactgtaaactgggagtgacaaactctacttctccatrttgtaccagattgtccagagatcaaagcatgtgatgataaagcaatttagaaatagaactgctagagtatataaataccaagtatagtaataactaactc

SEQ ID NO: 51696 - DNA, 201 bp, Homo sapiens
ctgctagagtatataaataccaagtatagtaataactaactcttaatttttttgtgagtaaattatctaaatacatcaacaactaaggtactagaaacaaraaaaggcaaaaatcaacatgaccaaataagatacacacatctaactacatcttacccgcagtctgaaagcaagtataaactatcagagtcttgccctgtc

SEQ ID NO: 51697 - DNA, 201 bp, Homo sapiens
tgtgggggttttgagtcacccatttgtctagacaccatggctagtgtaggaggcggtactgaaggggcgggggtcaaggctactagttcactgcttggagyattagcattcacattagccactgattcagctttttctggaaaacaaacacagattaagcaacagacatgagatgacatattgatccatctattagttgag

SEQ ID NO: 51698 - DNA, 201 bp, Homo sapiens
ttgctgaatcagtgaatggggctggatctgtgtgtaggtggctataggaacaatcccagaatacaacagagagaaaaaagagcagagaataataatcattytaaattaaaagtaaattcatttttccaaggtataacctagttttggaattatgcggtgaaaagaaatctagtcagtatgaaacttggacatcacttcgtc

SEQ ID NO: 51699 - DNA, 201 bp, Homo sapiens
ttttattcattttcacatccctaaaacacagcccagggcctgacactgcagaagcacttaatattcactgaaagaagagatacccacagagttaaagatgycaacgtcatcccacaaatgacttggattttacaaatcatcagcttagaccaccatctgagtcttgagagtcagcacctgtcagctctgacctaactcagt

SEQ ID NO: 51700 - DNA, 201 bp, Homo sapiens
atttactcctggtaaataatacaataaaaaagtaacaaaagggtttggggctggggatcatgtgaccaggttctcctcctgtttcctaatcctgtgactgraaagtcgtatcaccttttgaccttgttttctcatatgcaaaactaggagcagaatctttaccttattcacctcacaattactgaatcaaatgatattttg

SEQ ID NO: 51701 - DNA, 201 bp, Homo sapiens
aataaaaaagtaacaaaagggtttggggctggggatcatgtgaccaggttctcctcctgtttcctaatcctgtgactggaaagtcgtatcaccttttgacsttgttttctcatatgcaaaactaggagcagaatctttaccttattcacctcacaattactgaatcaaatgatattttgcaaaagaactgaacacagtaaa

SEQ ID NO: 51702 - DNA, 201 bp, Homo sapiens
ggtatagatttgcatttggaggtgcttttttcccctactgcaggactaggcaatttttatattatttcattagattatgagaacttctagagaaatggaakcatatacttaatggtgattattcttggccatagaatcacacgctgtcacattttgtctgggcctttgcttctcttggactgacagcactctaactggttt

SEQ ID NO: 51703 - DNA, 201 bp, Homo sapiens
gccacaggggttccagaaaagggaagtcactttaccttgcggtggtgggatcctgatgtctttcatccatttgtagtaaaagctggtaaagcttttcttaytcctggttccctaccagtatttctaaacatgtcgcactttctccacaggcatgtggttttgacctttttttcaatcttctagaaagggaacggaagcaga

SEQ ID NO: 51704 - DNA, 201 bp, Homo sapiens
atcctctgatgcttccatcttcctgtttaggccatgtgcccagaaacctggactgatctttctttaatagtgaacccctgggccactgaagagtaacatgrctccactggacacaaaagagggatggaatcaacaggcagggggccttttataagccttaggaaaagaaaatgaaactatttcatctttggacttttcaat

SEQ ID NO: 51705 - DNA, 201 bp, Homo sapiens
aaacctggactgatctttctttaatagtgaacccctgggccactgaagagtaacatggctccactggacacaaaagagggatggaatcaacaggcaggggsccttttataagccttaggaaaagaaaatgaaactatttcatctttggacttttcaatactattggagtgattttttttctttctaaacagggaaaataat

SEQ ID NO: 51706 - DNA, 201 bp, Homo sapiens
ctttctaaacagggaaaataatgttacaaaagcatcttttttgttatttgtttgcatccctcccccacaccctggtgttttaaaatgaagaaaaaaaaccatcactttttgtacaaaaactcttaatgattaaaaaacaaacaaaacatattggccttgtcatttgtgtgaaagtgggcaaagactggaatagagtaagac

SEQ ID NO: 51707 - DNA, 201 bp, Homo sapiens
tttctaaacagggaaaataatgttacaaaagcatcttttttgttatttgtttgcatccctcccccacaccctggtgttttaaaatgaagaaaaaaaaccatcactttttgtacaaaaactcttaatgattaaaaaacaaacaaaacatattggccttgtcatttgtgtgaaagtgggcaaagactggaatagagtaagaca

SEQ ID NO: 51708 - DNA, 201 bp, Homo sapiens
gaaaaaaatatttaatatttttgttatataaggaatagtgcctaaggcaggtacttatactcctgacctcagccccacacactctggttttataaagctayaggacagagcagagatggaactgaaaaacagggtagaaaataacataaattggaggggaacagtgggatgcagaaagaatgacaacagccacatgtgccc

SEQ ID NO: 51709 - DNA, 201 bp, Homo sapiens
atcgacacaccctagcggtgaggcaccctgtgttgtataagccgagggaggagactgaaaggactgacctgaggttggggagaatatccagaggggacacratacgttgggatggacattagaaaactaggagctcagtttctctctgtgtcagacacgcatcttccatggaaaataggctgctgaaccaggaaggagcag

SEQ ID NO: 51710 - DNA, 201 bp, Homo sapiens
attcctctgcaatctcttggcagcctagaagaaatggtgagaacatgtaggtaatgccagatgataggagaagggaagctaaatgaaactgaggtctagcaatgattaattccaaagtacctgtcctaaattcagtaatatgaagtcagatggcaagctttaaaagcaaaatgaaattagaaagcaactggtatttaaaaa

SEQ ID NO: 51711 - DNA, 201 bp, Homo sapiens
atactggcaaaaagattctttgtgatatttttgtttaagggcccagaattcagacaaatagcaagaagggtagggtgattttcatttccgaaaaaaactctgtcaaaattgcatataggctgagtgcagtggctcacacctataatcccagcactttgggaagccaaggcagaaggatatcttgagcccaggactccaaga

SEQ ID NO: 51712 - DNA, 201 bp, Homo sapiens
ctgacctcaggtgatatgcctgccttggcctcccaaagtgctgggattacaggcatgagccactgtgccaggcctcatttctactttaaataaataggtaactactattttacaccgagtcctcaaacacatctccacgagtctccttcccccaaatgagtctctaaataaatgctcaccagcagatgggctgtccactcc

SEQ ID NO: 51713 - DNA, 201 bp, Homo sapiens
ggcttcttgaaactctttcatttttttcctcttcagccggaactgatggctacagctcacattgtacctacaggacagggcatatataggatgtcaatagygccacagaagaccaccctgctctaaatgtgaatttctgcttatgagctgatttggggaagggaataaaagcaaggagggagacataaaatatcagctatg

SEQ ID NO: 51714 - DNA, 201 bp, Homo sapiens
tgacctcaggtgatatgcctgccttggcctcccaaagtgctgggattacaggcatgagccactgtgccaggcctcatttctactttaaataaataggtaactactattttacaccgagtcctcaaacacatctccacgagtctccttcccccaaatgagtctctaaataaatgctcaccagcagatgggctgtccactccc

SEQ ID NO: 51715 - DNA, 201 bp, Homo sapiens
gacctcaggtgatatgcctgccttggcctcccaaagtgctgggattacaggcatgagccactgtgccaggcctcatttctactttaaataaataggtaactactattttacaccgagtcctcaaacacatctccacgagtctccttcccccaaatgagtctctaaataaatgctcaccagcagatgggctgtccactccca

SEQ ID NO: 51716 - DNA, 201 bp, Homo sapiens
ttctttcattaaatagttctgtgccttttacttttactggagtttgaaaagacaacaatcagaccaagtccccacttcaaagtcccaccttatggccctgycctcaccgggaaaggttctgctccttcctggataacaaagccttcaatgatgtgggtgagaatctggggcttcacgatggcctgtgggggttttgagtca

SEQ ID NO: 51717 - DNA, 201 bp, Homo sapiens
attttcacatccctaaaacacagcccagggcctgacactgcagaagcacttaatattcactgaaagaagagatacccacagagttaaagatgccaacgtcwtcccacaaatgacttggattttacaaatcatcagcttagaccaccatctgagtcttgagagtcagcacctgtcagctctgacctaactcagtttcctcca

SEQ ID NO: 51718 - DNA, 201 bp, Homo sapiens
ctagtcagtatgaaacttggacatcacttcgtccatactcttcccactcaatcagacattaccaactactactagtcttaaagatctcagagaaagaactyccttgctcagtcatttcagatcctgagtaatttcttgtgtctcttatctttgccatacttaaatattgtattcttttactctgtactcagcaaagaagaa

SEQ ID NO: 51719 - DNA, 201 bp, Homo sapiens
gcgcgagccgagaggccctggaagcgggactctgggaccccattgaaagaaaggcaaccagaaaaggcgaaacgacaacctcgatagtgattggagctgayggaacgagggcggagctaaagtcccagaatactggccaatcagagtttaagattatcagggagcccgggaaggggaaaggggcgaaatggttctatggtc

SEQ ID NO: 51720 - DNA, 201 bp, Homo sapiens
cagcctcttcctcagtcccccaaaccaaagctacacagccagatttctcaagcagtctcaactccagtccctcatctcacccttactattgctcttgcttyccagtttgcttttgatttgcatcttctcactagtaaaactgccttccctttgttccttattttctgttttttctctagagaggtacagttgtaagtcaga

SEQ ID NO: 51721 - DNA, 201 bp, Homo sapiens
ccttctaccacaaagatttccaaaagcagtgggaaaatcagtaagagtccttaagatagattataaaatctagaataaggagaactggaaattaaagatayaaatgtcctattttagatcatcttttggaaaaaaaaatttttttgagacagtctcactctgtcacccgggctggagtgccgtggtgctatcttggatcgc

SEQ ID NO: 51722 - DNA, 201 bp, Homo sapiens
ctaaaattattctcagggttcacccccaaaaacctacacaacctagttgagaatccctaaaacgcaaagttcaaaacctaaaatcacgaagacttgtcccktgagaactttatgacgtcttcctaaccttaagccgaactctctccattttagatgtcttactaattttatcctaattcatactcttagatttcagatatg

SEQ ID NO: 51723 - DNA, 201 bp, Homo sapiens
aaagctacacagccagatttctcaagcagtctcaactccagtccctcatctcacccttactattgctcttgctttccagtttgcttttgatttgcatcttytcactagtaaaactgccttccctttgttccttattttctgttttttctctagagaggtacagttgtaagtcagagttaatataatagggcctgtgaaaac

SEQ ID NO: 51724 - DNA, 201 bp, Homo sapiens
attaaaaaaaaaatgccaagaaacattatttatacagggttgattgctttcatgttgttattctgtaccctatagtagcctccatgagaatctggtatttyttgctgcttggaactactttgcagtgattacttggttgcagtccaagtactctcgtttagtctgagcctggagatgttctagacttgcttctcccacctc

SEQ ID NO: 51725 - DNA, 201 bp, Homo sapiens
ttatttatacagggttgattgctttcatgttgttattctgtaccctatagtagcctccatgagaatctggtatttcttgctgcttggaactactttgcagkgattacttggttgcagtccaagtactctcgtttagtctgagcctggagatgttctagacttgcttctcccacctctgagattaggacaggaaaaatgtga

SEQ ID NO: 51726 - DNA, 201 bp, Homo sapiens
ccgtttgttttttaaacacattttcacaagtttttgagacactggatttctttaattaaaaaaaaaatgccaagaaacattatttatacagggttgattgytttcatgttgttattctgtaccctatagtagcctccatgagaatctggtatttcttgctgcttggaactactttgcagtgattacttggttgcagtccaa

SEQ ID NO: 51727 - DNA, 201 bp, Homo sapiens
ctgtgtcagacacgcatcttccatggaaaataggctgctgaaccaggaaggagcagatgttttttgggttttttattttgttggacaggagtcaaaacacytaaccacctgaatgtgttatgccatctcatcatcaggacaattttaaccctgtgtctgaggagcgtggcaaagtccaagattgtttctacctctttgaga

SEQ ID NO: 51728 - DNA, 201 bp, Homo sapiens
catctttggacttttcaatactattggagtgattttttttctttctaaacagggaaaataatgttacaaaagcatcttttttgttatttgtttgcatcccycccccacaccctggtgttttaaaatgaagaaaaaaaaccatcactttttgtacaaaaactcttaatgattaaaaaacaaacaaaacatattggccttgtc

SEQ ID NO: 51729 - DNA, 201 bp, Homo sapiens
taaaaaacaaggtattgctggacagtcaccatgggtttctgctgcccctcaggcaatcattaggctcagagctggattctaaaattattctcagggttcacccccaaaaacctacacaacctagttgagaatccctaaaacgcaaagttcaaaacctaaaatcacgaagacttgtcccttgagaactttatgacgtcttcc

SEQ ID NO: 51730 - DNA, 201 bp, Homo sapiens
taaacagggaaaataatgttacaaaagcatcttttttgttatttgtttgcatccctcccccacaccctggtgttttaaaatgaagaaaaaaaaccatcacyttttgtacaaaaactcttaatgattaaaaaacaaacaaaacatattggccttgtcatttgtgtgaaagtgggcaaagactggaatagagtaagacaactg

SEQ ID NO: 51731 - DNA, 201 bp, Homo sapiens
ttttctcattatccctatagaaaaccaattcttgccacattcctagaccataagtacactttctcatatcctaaagttagatgctgcgaattatttccttyttttttctccccctacaggatggctgtgactttgtctgccgttctaaacctcgaaatgtgcctgcagcatatcgtggtgtgggggatgaccagctggggg

SEQ ID NO: 51732 - DNA, 201 bp, Homo sapiens
attatccctatagaaaaccaattcttgccacattcctagaccataagtacactttctcatatcctaaagttagatgctgcgaattatttccttcttttttytccccctacaggatggctgtgactttgtctgccgttctaaacctcgaaatgtgcctgcagcatatcgtggtgtgggggatgaccagctgggggaggagtc

SEQ ID NO: 51733 - DNA, 201 bp, Homo sapiens
gaggggaacagtgggatgcagaaagaatgacaacagccacatgtgccccagtcaaatacttttagtccctgcagcagaagatgccaaccaagtctctataytggctggggatcctgccatggatgcaggagaaaaaattcaatcacaagggagtaagtgacaacaaaaagaaaaaactctgagccacagctacactgggag

SEQ ID NO: 51734 - DNA, 201 bp, Homo sapiens
tgcagcagaagatgccaaccaagtctctatactggctggggatcctgccatggatgcaggagaaaaaattcaatcacaagggagtaagtgacaacaaaaaraaaaaactctgagccacagctacactgggaggggggaggaccagattttgctacttctgtcacacaagctagaaaaaccctacctctcccattgggcagg

SEQ ID NO: 51735 - DNA, 201 bp, Homo sapiens
cataataatctatgtccacccttgacaattcacctggattccctgtttttggatctattcatttgtccaccaacttctggcccattttctactcaaccagwtttatcttttagctcactcagaacattcctctactctgtgtgctctccaacagcattagaagtcagttactcacctccaagactgctcttctcgtccatg

SEQ ID NO: 51736 - DNA, 201 bp, Homo sapiens
tctactctgtgtgctctccaacagcattagaagtcagttactcacctccaagactgctcttctcgtccatgacttttgggctttctgctactggagatgcyttggcaggaagcattgaacccaatgtggagacatcatctctctcctcctcagagtcagccttgcgtttgacagccaatgtctggggtttaccctataccg

SEQ ID NO: 51737 - DNA, 201 bp, Homo sapiens
aagcgcttggaaagtcgggacactagacagagcgagaatttctggcaccctgggagagctttgagggggatgcgactgtggtgtggataagaatggctgayggacggattatcttgtgttcctcgttgtggggagcttccgctcttgggacatagccgctacttgtctgaggctccttctctcttgagttctttcagcatt

SEQ ID NO: 51738 - DNA, 201 bp, Homo sapiens
acagaagtgtagctatttccaagactggatccaagagaccagcttgtagaaatttaaggattatttgacacctacatataataggactttagaaatatcarataaacatatttaggccgacacatgtcattataagtgtcaggaaccttcagatatataaatctgaagttggtccctaagaaacgagactatccgatgaac

SEQ ID NO: 51739 - DNA, 201 bp, Homo sapiens
gtcacatgccgcggggtctggtgggaggagcggttgcccagcggcctcttggcgcttcctgtttccggttcccagagtggggcacagcgaggcgctagggrgaacgctggcctctgaaactagctctgggaccggggtctgcggccggcccctagctggccccgtctcccatccccagaagggtattcactggggattctg

SEQ ID NO: 51740 - DNA, 201 bp, Homo sapiens
aattgagagaaattgagtacaattgagtacaattaacaattgtactcaagtacagtgtaaggattaatggaaacatgaaccagtagttgggtaagaggtcyggagacaaagggggtcaggatctcttggaatttgtagtaatgcaatcaatgtgaaaccagagttctcatctcacaccctcttacctgggcaaatgaattg

SEQ ID NO: 51741 - DNA, 201 bp, Homo sapiens
tctgccaggacacagggctcacgcctgtaatcccagcactttgggaagccaaggcagatggatcacctaaggtcaggagtttgagaccaacctgaccaacrtgatgaaactccgtctctactaaaaatacaaaattagccagcacagtggcacatgcctgtaatcccagctacttgggaggctgaggcagtagaatcactt

SEQ ID NO: 51742 - DNA, 201 bp, Homo sapiens
cagcgaggcgctagggggaacgctggcctctgaaactagctctgggaccggggtctgcggccggcccctagctggccccgtctcccatccccagaagggtrttcactggggattctgagctttggctactccagtttcccacgacacgtgagtgtgaggggcgtggaggaggaggcgggctgggttgcgctcacacttaag

SEQ ID NO: 51743 - DNA, 201 bp, Homo sapiens
tgcatatgccagagaatcttgtactttctggataattaaaataccatcgatttattacacattcatacgctttatctctttcctctctctcctgatcctayctgccctccccaacacacactctctcccaaaggatgttccctttctacagctgctggaggactggactgctactactactcctggctgtggcagtgagag

SEQ ID NO: 51744 - DNA, 201 bp, Homo sapiens
tggggatcctgccatggatgcaggagaaaaaattcaatcacaagggagtaagtgacaacaaaaagaaaaaactctgagccacagctacactgggagggggraggaccagattttgctacttctgtcacacaagctagaaaaaccctacctctcccattgggcaggcaacctgacattccacccagttccttgccttaccat

SEQ ID NO: 51745 - DNA, 201 bp, Homo sapiens
tgccatcatgcccagctaatttttgtatttttagcagagacagggtttcacaatgttggccatgatggtcttgatctttgacctcgtgatctgcccacctyggcctcccaaggtgctgggattacaggcatgaaccaccgcgcccagccaactctagccagaattctgtagcctagagtccttttattcacccaaatactt

SEQ ID NO: 51746 - DNA, 201 bp, Homo sapiens
aggcatgaaccaccgcgcccagccaactctagccagaattctgtagcctagagtccttttattcacccaaatacttttaatgagtttcacactagacttamaaataccaaccaccaccaccacttttcatcaaattaatcaaagtttaccagttaaattttaagagctcaaacttttttttgcaaactactcagtctgcaa

SEQ ID NO: 51747 - DNA, 201 bp, Homo sapiens
aaaagagggatggaatcaacaggcagggggccttttataagccttaggaaaagaaaatgaaactatttcatctttggacttttcaatactattggagtgattttttttctttctaaacagggaaaataatgttacaaaagcatcttttttgttatttgtttgcatccctcccccacaccctggtgttttaaaatgaagaaa

SEQ ID NO: 51748 - DNA, 201 bp, Homo sapiens
ttagtttctaataccctgctccactgaaaaaaaaaattttttccccatgggaggtatcatagttaattacacaaaaacattttatccaaaaatttagtgaraaatgcagctacatcataagatgagaatcaaatactgtaaaattgctgacattacagaagataatgtcaacccagaaaaaaattaggaagtcaacttgaa

SEQ ID NO: 51749 - DNA, 201 bp, Homo sapiens
tagcattcaagctcctactgcttaaaagtcaattactttccctcttatcaaggcccctgtgggatgatgttaaggaaaacaacctgggttctgttgaagaragggtcagtaccttggagagaagcaataaactcgtacacctcctctacactccaacggctgggattactggacaggaacacagggttgatgccatgtaat

SEQ ID NO: 51750 - DNA, 201 bp, Homo sapiens
agaactgttgttttttcaaagactgatttggttaaggctatcttgatctaacttattacatacccaaaaacccagaatagtatcagcaacaaatttaggartataaagttcagatattatataatgtgtcactctcttacagaagaagcagataaataccaatattaaccctcttaactctttattcccctattcaattaa

SEQ ID NO: 51751 - DNA, 201 bp, Homo sapiens
ccaaccccaaagcctgtgcctgggctgtacctggctgtcgagtgcctacaacttgcacagggatatggggtggtggttgctgggcagctgacatcttagcrgcccctaactgaggcggcttgataggtgctacaggtggtttggattggatgggaattggtggcttaggggctgcatcaggtggaagagacaagggtgaag

SEQ ID NO: 51752 - DNA, 201 bp, Homo sapiens
gatttttcaagatcataaaatcctgctccttatttccaaagtatatagacaaactcttgtaccttgagaatctaattgtagcatattaaaagggggctacygggcccttccatttcattctcttcctgattgttgcacccctatgtttataagttttccagcagttatctttatgccacgaatcgtctaaattgccccagt

SEQ ID NO: 51753 - DNA, 201 bp, Homo sapiens
atgtgcccagaaacctggactgatctttctttaatagtgaacccctgggccactgaagagtaacatggctccactggacacaaaagagggatggaatcaayaggcagggggccttttataagccttaggaaaagaaaatgaaactatttcatctttggacttttcaatactattggagtgattttttttctttctaaacag

SEQ ID NO: 51754 - DNA, 201 bp, Homo sapiens
aaattttttccccatgggaggtatcatagttaattacacaaaaacattttatccaaaaatttagtgaaaaatgcagctacatcataagatgagaatcaaayactgtaaaattgctgacattacagaagataatgtcaacccagaaaaaaattaggaagtcaacttgaatattaggagtagagcctctatattagcattcaa

SEQ ID NO: 51755 - DNA, 201 bp, Homo sapiens
ctcctctacactccaacggctgggattactggacaggaacacagggttgatgccatgtaattccggtgtaggtggagctgtattgggattccccaggtcaygttctccatgcccagctcttactgataaaggcccaggagatgttggagagagtgcttcatcataactggaattatctgaaccccggctagagtcttcttg

SEQ ID NO: 51756 - DNA, 201 bp, Homo sapiens
tcttttttgttatttgtttgcatccctcccccacaccctggtgttttaaaatgaagaaaaaaaaccatcactttttgtacaaaaactcttaatgattaaamaacaaacaaaacatattggccttgtcatttgtgtgaaagtgggcaaagactggaatagagtaagacaactgaaaccaattttcatccttttactgaggaa

SEQ ID NO: 51757 - DNA, 201 bp, Homo sapiens
ccccttcctaccatcgattgactaactgatcccaagtcaatccctctgacaatcctgtatgtcttggccgtttctagtgtcttcagcatatcatacgtgtsgttcggcacacctgagactgtaatataccacaggatgcctaattccacagctcctctgtaagccacagctcaggacagttgtgcattaaaatcagtgaaa

SEQ ID NO: 51758 - DNA, 201 bp, Homo sapiens
cattgggcaggcaacctgacattccacccagttccttgccttaccatactatgtattcctcctcttggagaattaagacctgggctaaatgctccactccrggataaggctgagcagtcctagttctctagactgcctcttttataaagattggattaaggtacgtgaaatggtgagaactgtaaagattttaaaaaataa

SEQ ID NO: 51759 - DNA, 201 bp, Homo sapiens
gaatcacacgctgtcacattttgtctgggcctttgcttctcttggactgacagcactctaactggttttctaagagttaccagccccctttttcatttagwatcactactcatttttccttttcagggaatgtatcttaggaaacagctgacaataaatgcagaggttatcctatctgagtttttactatttcccagttct

SEQ ID NO: 51760 - DNA, 201 bp, Homo sapiens
cacacctgagactgtaatataccacaggatgcctaattccacagctcctctgtaagccacagctcaggacagttgtgcattaaaatcagtgaaaaacttaygcaaaatgaagactctagccagaattgttttgttttgttttgagacggagtctctctctgtcacccagcctggagtgcagtggcacaatctcggctcact

SEQ ID NO: 51761 - DNA, 201 bp, Homo sapiens
tggactgacagcactctaactggttttctaagagttaccagccccctttttcatttagtatcactactcatttttccttttcagggaatgtatcttaggaracagctgacaataaatgcagaggttatcctatctgagtttttactatttcccagttcttaagtatagatgtctttctctctctacaggtttgcatcactg

SEQ ID NO: 51762 - DNA, 201 bp, Homo sapiens
agctcaaacttttttttgcaaactactcagtctgcaaaactttacccactgatttttgtgctatggtggtgatatttcttaaaagtcatattgctggagakgaccatgtaagcacctatggtccaattccctcccatacagataaataagttatacaaggtagctatttactcctggtaaataatacaataaaaaagtaac

SEQ ID NO: 51763 - DNA, 201 bp, Homo sapiens
ggtttggattggatgggaattggtggcttaggggctgcatcaggtggaagagacaagggtgaagactgaagcatgggctgaacgaccagggtttgggcttkctgctgggactgggaaggtgggacctgctgagtaggtgggacctgtggtggctgaggggcagtgagggtggtggcttgcggctgctgctgttgctgctgt

SEQ ID NO: 51764 - DNA, 201 bp, Homo sapiens
gtgccacagaagaccaccctgctctaaatgtgaatttctgcttatgagctgatttggggaagggaataaaagcaaggagggagacataaaatatcagctakgagacgatcctggggaaggggtgtaacattagatggagataccagtgctgagggcaaggaggagggtgcccagagtacctcttagcgcaagtcatggagc

SEQ ID NO: 51765 - DNA, 201 bp, Homo sapiens
gactcacatcttcaacggaagtaagaaaactccccttcctaccatcgattgactaactgatcccaagtcaatccctctgacaatcctgtatgtcttggccktttctagtgtcttcagcatatcatacgtgtggttcggcacacctgagactgtaatataccacaggatgcctaattccacagctcctctgtaagccacagc

SEQ ID NO: 51766 - DNA, 201 bp, Homo sapiens
gggtatgaagatggataagagaaaagaaaatgttaggttttggtggggtttttttgccaaaaccacaatgacctttgcaccagtctagtaagtttgggaargagagctgtctgtgtgttttcattcctagagcagtacaagcagcaggtgcattgaatttactcaattgtaaagtggcttggtgatccccaatttgttgtc

SEQ ID NO: 51767 - DNA, 201 bp, Homo sapiens
ctgagctaataagtgtctggctgggcgcaggtgtggctgtccgtgtcaggttcatgcccacattctgctggccactcccatctgcttctgccttcttggcwgctgcactttctgcctctgtctggctgccctggctcacagtcactgtttgggctgcaggcaagggctgcaccactcctgtacccttcctgggacagctcc

SEQ ID NO: 51768 - DNA, 201 bp, Homo sapiens
gtaaagtgttttgcaagggtaagtcagtctgtcctgggtatgaagatggataagagaaaagaaaatgttaggttttggtggggtttttttgccaaaaccayaatgacctttgcaccagtctagtaagtttgggaaagagagctgtctgtgtgttttcattcctagagcagtacaagcagcaggtgcattgaatttactcaa

SEQ ID NO: 51769 - DNA, 201 bp, Homo sapiens
tgagctaataagtgtctggctgggcgcaggtgtggctgtccgtgtcaggttcatgcccacattctgctggccactcccatctgcttctgccttcttggctkctgcactttctgcctctgtctggctgccctggctcacagtcactgtttgggctgcaggcaagggctgcaccactcctgtacccttcctgggacagctccc

SEQ ID NO: 51770 - DNA, 201 bp, Homo sapiens
aggtcagtgtcaaaggtttattcctctctctttcttcccaaaccaccctgggttgggcgtagaagaaaaactcatcttatcatatgtgaaataagcagcaytttatttgcaaattcccaaaatctactctcaaagtctttcaaatagaaactgtatcacttccttgattctccccatgacctaacaattgatctagatttt

SEQ ID NO: 51771 - DNA, 201 bp, Homo sapiens
aaactctttcatttttttcctcttcagccggaactgatggctacagctcacattgtacctacaggacagggcatatataggatgtcaatagtgccacagargaccaccctgctctaaatgtgaatttctgcttatgagctgatttggggaagggaataaaagcaaggagggagacataaaatatcagctatgagacgatcc

SEQ ID NO: 51772 - DNA, 201 bp, Homo sapiens
gtgtgaggggcgtggaggaggaggcgggctgggttgcgctcacacttaagcgtctgtgacaggagccggaatcgcattctcccttgaccatggttctagcyaaagatctggctgaggagccctaagggtagaatggaggcggaggcatgagagcggagagtcacggagttccgaaaggtgtgagggagaaaggacttccaa

SEQ ID NO: 51773 - DNA, 201 bp, Homo sapiens; identical to SEQ ID NO: 18235

SEQ ID NO: 51774 - DNA, 201 bp, Homo sapiens; identical to SEQ ID NO: 18237

SEQ ID NO: 51775 - DNA, 201 bp, Homo sapiens; identical to SEQ ID NO: 18239

SEQ ID NO: 51776 - DNA, 201 bp, Homo sapiens; identical to SEQ ID NO: 20115

SEQ ID NO: 51777 - DNA, 201 bp, Homo sapiens; identical to SEQ ID NO: 20118

SEQ ID NO: 51778 - DNA, 201 bp, Homo sapiens; identical to SEQ ID NO: 20284

SEQ ID NO: 51779 - DNA, 201 bp, Homo sapiens; identical to SEQ ID NO: 20285

SEQ ID NO: 51780 - DNA, 201 bp, Homo sapiens; identical to SEQ ID NO: 20286

SEQ ID NO: 51781 - DNA, 201 bp, Homo sapiens; identical to SEQ ID NO: 20287

SEQ ID NO: 51782 - DNA, 201 bp, Homo sapiens; identical to SEQ ID NO: 20290

SEQ ID NO: 51783 - DNA, 201 bp, Homo sapiens; identical to SEQ ID NO: 21418

SEQ ID NO: 51784 - DNA, 201 bp, Homo sapiens; identical to SEQ ID NO: 19572

SEQ ID NO: 51785 - DNA, 201 bp, Homo sapiens; identical to SEQ ID NO: 20291

SEQ ID NO: 51786 - DNA, 201 bp, Homo sapiens; identical to SEQ ID NO: 21422

SEQ ID NO: 51787 - DNA, 201 bp, Homo sapiens; identical to SEQ ID NO: 19573

SEQ ID NO: 51788 - DNA, 201 bp, Homo sapiens; identical to SEQ ID NO: 20292

SEQ ID NO: 51789 - DNA, 201 bp, Homo sapiens; identical to SEQ ID NO: 19574

SEQ ID NO: 51790 - DNA, 201 bp, Homo sapiens; identical to SEQ ID NO: 21426

SEQ ID NO: 51791 - DNA, 201 bp, Homo sapiens; identical to SEQ ID NO: 20293

SEQ ID NO: 51792 - DNA, 201 bp, Homo sapiens; identical to SEQ ID NO: 19575

SEQ ID NO: 51793 - DNA, 201 bp, Homo sapiens; identical to SEQ ID NO: 20294

SEQ ID NO: 51794 - DNA, 201 bp, Homo sapiens; identical to SEQ ID NO: 21179

SEQ ID NO: 51795 - DNA, 201 bp, Homo sapiens; identical to SEQ ID NO: 21347

SEQ ID NO: 51796 - DNA, 201 bp, Homo sapiens; identical to SEQ ID NO: 18257

SEQ ID NO: 51797 - DNA, 201 bp, Homo sapiens; identical to SEQ ID NO: 20306

SEQ ID NO: 51798 - DNA, 201 bp, Homo sapiens; identical to SEQ ID NO: 20267

SEQ ID NO: 51799 - DNA, 201 bp, Homo sapiens; identical to SEQ ID NO: 20307

SEQ ID NO: 51800 - DNA, 201 bp, Homo sapiens; identical to SEQ ID NO: 20268

SEQ ID NO: 51801 - DNA, 201 bp, Homo sapiens; identical to SEQ ID NO: 21375

SEQ ID NO: 51802 - DNA, 201 bp, Homo sapiens; identical to SEQ ID NO: 20269

SEQ ID NO: 51803 - DNA, 201 bp, Homo sapiens; identical to SEQ ID NO: 21378

SEQ ID NO: 51804 - DNA, 201 bp, Homo sapiens; identical to SEQ ID NO: 20308

SEQ ID NO: 51805 - DNA, 201 bp, Homo sapiens; identical to SEQ ID NO: 20270

SEQ ID NO: 51806 - DNA, 201 bp, Homo sapiens; identical to SEQ ID NO: 20271

SEQ ID NO: 51807 - DNA, 201 bp, Homo sapiens; identical to SEQ ID NO: 20309

SEQ ID NO: 51808 - DNA, 201 bp, Homo sapiens; identical to SEQ ID NO: 20272

SEQ ID NO: 51809 - DNA, 201 bp, Homo sapiens; identical to SEQ ID NO: 21475

SEQ ID NO: 51810 - DNA, 201 bp, Homo sapiens; identical to SEQ ID NO: 21476

SEQ ID NO: 51811 - DNA, 201 bp, Homo sapiens; identical to SEQ ID NO: 21479

SEQ ID NO: 51812 - DNA, 201 bp, Homo sapiens
agcacataatttctggttctatttctttgtgaagttagcagccattgatagttattgcctagctcaaataattcattagtggttataatattctaattctrttgttccttttatatttgttagctggaatacttccataaggataaccttcctttcatcaaccagttggtagccttggggtatagttcatacataggagaa

SEQ ID NO: 51813 - DNA, 201 bp, Homo sapiens
ccacccatcttggcctcccaaagtgctgcgattacaggtacgagccaccacacccggcctgatgttgcatttatgaatagtttgttctttgtattgcccartagtattcaattgcatggttataccataatttatccatttgcccagtaatttactagttttttgctattgtaaatcaagttactgtatttatgtgcaagt

SEQ ID NO: 51814 - DNA, 201 bp, Homo sapiens
cactggctaaaacctgcagtataatgttgaatagaagtgtcaagagcagacatcctttctttgttcccaatcttggcaggaaggcatttagttttatgccrttaattaaaataatagctattttttttgtagatgcccttcatcagcttgttaaagttcccttctatttgtagttcgctgcaagttttttttcttttaatt

SEQ ID NO: 51815 - DNA, 201 bp, Homo sapiens
cattttctctgtaattcttatttgaaattagagttctggtaaactaagggaaaaatatataggtctttattacaatgtgttaaggtttatgagtcttgtagttattaagaaagtaaaagcaaaaattgagatggaatttatcactccccatatttacgacatatgtatagttcataacataatgcttaaactatcttaaaa

SEQ ID NO: 51816 - DNA, 201 bp, Homo sapiens
tggtagttggttaattgaaaaagttggctcatgtaagataattattttaaaagatacatacataatattttaagacaagtaaatgtacgtccactgatttttttttttttaaatatagagccatggtcttttttttcattgaaattttttcatttttttcctttgacattggtaatacagatcctgtgttttccagccttt

SEQ ID NO: 51817 - DNA, 201 bp, Homo sapiens
atttgaaggacaacagaacattcttggaaaagcagctccagttggtttttcagctgtcaaacttgaatgtgtaagtccccacagagcatggacagtcggtrcagagttccaaggaaacaattattgcctgatgaccacttccattttgtatacactctttggttcgtataggccatattccaactggctttttagtaatag

SEQ ID NO: 51818 - DNA, 201 bp, Homo sapiens
tgtaggatagaaaagagtgtgggctttgaggctggcagatctgagttgaaattttggtctggctctccactagctatgcaattatgggaagttacttatcsttctctgagtctcctttccttcatttgcaaaataagaaaataacacatataaagctcttagtgcattttatgagctcaaaaagcatagccagataagtaa

SEQ ID NO: 51819 - DNA, 201 bp, Homo sapiens
taatggagaagagctatggaatagttaatgccaatttatgaataatccaaaatcatttatgttggacttgattaaattatttataatgcaaagcacagccrgctgtcatggccaatatgtttgatcacatttttctctaattgtttctttcttttgtctctggaaatctgctgttatgtataatgaatgtttcttctaatg

SEQ ID NO: 51820 - DNA, 201 bp, Homo sapiens
aatcttaagtttgagcctaagaagttcattttactatttcctttaacctacattgttaagagtaataataaattatacccttattccactttctgaatatygtgccatttagagttaagtcaaatgcttttctatggtgtagaagtgggtgtgaactaaagctgcagttttactaatctgcaggccaaatctggcctgctg

SEQ ID NO: 51821 - DNA, 201 bp, Homo sapiens
gaggtttgccttttaatcttcctgcttatgaatagtcactgggtgttttcatagaatctgtggcttccagtaacttgtctttccaagaatgttaaaatcartgtttatctcagagagatcttatagctacaaatggttatctctgtttatgaccatattcttgagcttttgtatatattaaataaaaactttgttatgtgt

SEQ ID NO: 51822 - DNA, 201 bp, Homo sapiens
ggtggctcatggcctgtaatcccagcactttgggaagccgaggcgggtggatcacttgaggtcaggagttcgagaccagcttggccaacatggtgaaaccstgtctctaccaaaaaaatacaaaaattagccggggacctgtaataatcccagctacccgggaagccgaggcaggagaattgcttgaatccaggaggcaga

SEQ ID NO: 51823 - DNA, 201 bp, Homo sapiens
cccttattccactttctgaatatcgtgccatttagagttaagtcaaatgcttttctatggtgtagaagtgggtgtgaactaaagctgcagttttactaatctgcaggccaaatctggcctgctgcctgtttttatctataaagttttgttggaactcagccatgcccatttgtttacatattctctgtggctgcttttata

SEQ ID NO: 51824 - DNA, 201 bp, Homo sapiens
caactgttcacagcaaatgcttggattttatgcagtaggcattactacagtacatggctaatcttcccaaaaactagctcattaaagatgaaatagaccakctctcttcagtgaagaggacaaatagtttatttaaagcatttgttccaataaaataaatagagggaaacttggatgctaaaattacatgaataggaatct

SEQ ID NO: 51825 - DNA, 201 bp, Homo sapiens
actttgccaagtgctgctgaattagaggtagactgtttctcattttccaaatgtaatgttatcaaaagagaaagtaaacaaagtatggcatactgtgttcktagagaactcatgaataattaccactttcttttctcagtgctttcactgcctattcaattgttagcctggagttttattgggaactgatggtagattatt

SEQ ID NO: 51826 - DNA, 201 bp, Homo sapiens
agaagtgggtgtgaactaaagctgcagttttactaatctgcaggccaaatctggcctgctgcctgtttttatctataaagttttgttggaactcagccatrcccatttgtttacatattctctgtggctgcttttatagtacagcatcagagctggcagatcagtaatgtcagagatactatcacatgcagaacctgaaat

SEQ ID NO: 51827 - DNA, 201 bp, Homo sapiens
tctgttaagggaactgagaggttcatggaagttaaataacttgctttttattcacatagctactagatactagagctcagaataaacctcacctttctgcycatttctctataactttttatatattgatttctttgaagagagactttgccaagtgctgctgaattagaggtagactgtttctcattttccaaatgtaat

SEQ ID NO: 51828 - DNA, 201 bp, Homo sapiens
ccaaagtgctgggattacaggcgtaagccaccacgcccagcctgtagtttattttttaaagtaattttttttttgtaaatcagtatgttaggacccatcartatccttactgggaagggtaagtttaaaggaaaagcatagtcagaagtcacaaaagttcctctaagtcactagggccagtgaaggagaggtctggtgaga

SEQ ID NO: 51829 - DNA, 201 bp, Homo sapiens
atttgaagatcgatttgacaaatatcttgatccgtccttttttcaacatcgggtaggtaaatagtgtattttaagacattgattatgtgcaccaattcgtwcaacaaacattgagtatctgtcatttgcagggcactgtgttgaggactgtggattaaaagatttagctaatggtgatttaaagtatgagcttgaaatcat

SEQ ID NO: 51830 - DNA, 201 bp, Homo sapiens
aacccatttatgtacatatttaatattttaatacagttccctttgtgtttagtcctacatctgtccccctagcttttgaggtctgtagtgcctccaagtcstgagtgtctcttgggttctgtgacaccagttccctcccttacaggcatcactctcctgttatgttttctcctgctttattagtagtttgtcatcttacaa

SEQ ID NO: 51831 - DNA, 201 bp, Homo sapiens
gttattagtttaggatcttttttgtgccaggtattgtgctaggcactggaaatacctagatgaatagcttctgcctgccagggtttataatctagtgaggttttttatatatatgtacacacatgtatttggaattggacagttacagtatagcgtggtaagtactgtggtggaggtattttcaagaggcagtggaagaat

SEQ ID NO: 51832 - DNA, 201 bp, Homo sapiens
tggatcaacaaataaaggttacagttttgtaagagaagtgatttgaatacatttttctggaactattcataatatgaagttttcctagaaccactgagtttctagtttaatagtttgctatgcaaatgaccacctaaaacaatactttatattgttatttttagaaagactcaaaacacctgtatttaaaccttaatatga

SEQ ID NO: 51833 - DNA, 201 bp, Homo sapiens
tgtttacttcaggtaatcccccatgctgttttcagtccctagcttctgctattcctgctgtccctgattctggagcccctctggtttaagttctctagagraaggtgccactggtctactacagggataagttgagggtacagtatgtgtctagctgtatgaagggtagaggaggggacctggccatctaacccatttatg

SEQ ID NO: 51834 - DNA, 201 bp, Homo sapiens
tatgtacctatatattgatggactctacatcctatattgtgacatgtaagtcctttaaaaggtgaaaagtatgatttcttaccacttaagtatgattgatatgatccaacaaatttgatcagaagctgtaggtaaatcctcttctgaagccaaaatggtatattaaatataatttattggtacttccattttctcttcctt

SEQ ID NO: 51835 - DNA, 201 bp, Homo sapiens
tttgtatttacgattatgaaatgttagtttattgattacagactttgatttatccccaagctgctgtactagcctgttatagtagcactcttattcaccaytgcacccttagctgttaagacatagtatgcttttaataaattgtctagcatccagacggtttgtgcctacttgttgttacgataattggttcattatgga

SEQ ID NO: 51836 - DNA, 201 bp, Homo sapiens
tggtttattggaacatgtaataaataggagtagtgatgtattaaaacacaagtattcattaatgttttatatcttcactaaaattctatagttatgaaactattttatcaatcaaggtgttatatttcagtcagaagtgaaaatttatgaagagtatttggaagtgtgtacagaaataaactagacttacaggtaggctag

SEQ ID NO: 51837 - DNA, 201 bp, Homo sapiens
ggtttattggaacatgtaataaataggagtagtgatgtattaaaacacaagtattcattaatgttttatatcttcactaaaattctatagttatgaaactattttatcaatcaaggtgttatatttcagtcagaagtgaaaatttatgaagagtatttggaagtgtgtacagaaataaactagacttacaggtaggctaga

SEQ ID NO: 51838 - DNA, 201 bp, Homo sapiens
ttcttaatctttcatctcttgaatatttgacttttaaagattcttctgaaggcatattcaaataaaattttggaaatgtgaaaccagagaaaactatacgyacacatacatacatgtttacatatgcatacacacacatctttttttaacctattagactgtgtcaggctccatggattggtatcgttttgtaaaatgatg

SEQ ID NO: 51839 - DNA, 201 bp, Homo sapiens
ggtcttaccaagtttccacctccagcatggatatgctgctaaagaagctgctaaattaagtggtccagatgaaatagtagatgctgattagatttatcttygccctctactgtagctctttgcttgctgtgttcaaagataaagtcgatcatgctttgaaaagtgttgtaggttgtcacttagccaaacattaaaaaaata

SEQ ID NO: 51840 - DNA, 201 bp, Homo sapiens
acggcggcggcagaggaggcagcggctgggccgggccccgtgcgtctgtccgcgccccgtggatgcgaatcggccgcggcggaggcggcggcggcggaggmggcggcggcgggaggaggagtcggtgagccggctccgggccggaggggcgcggaggatgaggccgctgcctggcgctcttggcgtggcggcggccgccgc

SEQ ID NO: 51841 - DNA, 201 bp, Homo sapiens
tatggtcactggtaatagggaatctgacaaaattcaagattgagctttctaattcttagatgttttccttgttgataaatttgaataccatgtctatgcayttgttttttaaataagttttaaaggactttaaaggatgttttattaaattctttgctttaaaatctttgttttagtgccattcattcaaaagagatttat

SEQ ID NO: 51842 - DNA, 201 bp, Homo sapiens
gcatttccgtgcgctcccgggacagggctccgctcccgagtgacagggtctccttcccccggtctgggcctcagtggcgccgcaccccagggtctcggggktcctgggaccctggggccaggaaggagcctgggaagggttgaggttcatccaccgcgggagcggggcaacgggcaggctgggctcggggcttttgccccc

SEQ ID NO: 51843 - DNA, 201 bp, Homo sapiens
gaagatcgatttgacaaatatcttgatccgtccttttttcaacatcgggtaggtaaatagtgtattttaagacattgattatgtgcaccaattcgttcaasaaacattgagtatctgtcatttgcagggcactgtgttgaggactgtggattaaaagatttagctaatggtgatttaaagtatgagcttgaaatcataagg

SEQ ID NO: 51844 - DNA, 201 bp, Homo sapiens
tggggtaagtattgtatgttgtatttaagatttgggaaaatttgcataatcagaatttataaaatgactctgttaaggtgattgtgtactggatcatggtrtaaatgtgttttcactgttttttacagaatgattttaataccagttttatggtcacctgttgcttgaagaatttttgacattgccatgccttacatgaaa

SEQ ID NO: 51845 - DNA, 201 bp, Homo sapiens
gaataactttccagagcatagagtatttagtgtttttaaatgatggatactgctctgtatgtatttgtttcaaaacatcttattttatctttgcaggagcrattggttacatgggaacaagtgcctttgtccgaaaaatctatactaatgtgaaaattgactagagacccaagaaaacctggaactttggatcaatttctt

SEQ ID NO: 51846 - DNA, 201 bp, Homo sapiens
gttacttgccattggctatttatgtatgtatgtgtgtatttgataattccacctttggctatataagatatatataagatatggtaatcttattaaaagckaagtcttggtatgacatttatggacacctttggggtaccaagattgctttgtttctccatcaaaagagcctgttcagttcatatacactatgtatgtgat

SEQ ID NO: 51847 - DNA, 201 bp, Homo sapiens
ggtgttttaagatgataggtgagtgcagtggtagaaagtaaagcttttccatgacacatttttttgtattaacatacttttcttagaaagtcactaagcaytggccaggcgcggtggctcacacctttaatcccagcactttgggaggctgaggtgggtggatcacgaggtcaggagattgagaccatcctggctaacacg

SEQ ID NO: 51848 - DNA, 201 bp, Homo sapiens
agtcttggtatgacatttatggacacctttggggtaccaagattgctttgtttctccatcaaaagagcctgttcagttcatatacactatgtatgtgatcwtgtgtgtgcgcacacacaaatgagattgtccgtaaagtagtgaatgaaacattccacaaggaaagatcattctctatgttatagtcacatgttttattta

SEQ ID NO: 51849 - DNA, 201 bp, Homo sapiens
ttgttccaatgctggctatcagttagaaaggagaggttcttgaaacttagctggaaaagaaatgaaacaggagagaaaactcaggattaaggagtttttckggaggaacgttatgattttaggtaataattctgtaacagatgttttaaaagaactttatatagcagaaagcaaaaattagagtattgcttatttttctat

SEQ ID NO: 51850 - DNA, 201 bp, Homo sapiens
aatgcttgttgaactgaagtgaatatgtattaaccaacaaagctatttctctgtagcattggttgtatttctttaatataacctttctaattcatttaccrcatgagctttaaaataacccaaatctaaacttcagagttctggcgagtagttcatattttcgggcataatgtatttcagataagctggaccctaaatata

SEQ ID NO: 51851 - DNA, 201 bp, Homo sapiens
ttgtatttctttagctataaatttggagggaggaaacttacaactgtaatttttacatactatgttttagtttgattctgaatgatttgcttttctctctmtatatatatatttgtatataggatagagacctaggagatgaatatggatggaaacaggtgcatggagatgtatttagaccatcaagtcacccactgatat

SEQ ID NO: 51852 - DNA, 201 bp, Homo sapiens
acaagagtgaaactccgtctcaaaaaaaaaaaaaaaaaaggctttatacagataaatgccatactgtatatatcttagagcttcctacttaaatctaccayattgttaatgaccattatcaatgaatatttgtttctaacggcaaggaattcaatggctttgcagaggtagctgtgaggtaccctactgccactgtggcca

SEQ ID NO: 51853 - DNA, 201 bp, Homo sapiens
gccactagaagataatctcttctagaatccaagtttttgctgcttccttttcaaaatgttagtgttacaattcggcagctctttttttttttttttttttwaaatgcagaagctcttctacttaaagaccttcaacttttataaataagaaaccactcactaatgtataatattagcaggcaagtcatgcattgttatttt

SEQ ID NO: 51854 - DNA, 201 bp, Homo sapiens
aatttgtttttacatctaagtttatgagagatattggcctgtaggccagtctggaagcaaagatagaataagtaatagccaaattcttggtttatgtctgrgattgagaagatgtgatcagtatgtagatctttggggtattaagcaccaataggcagtacttgattctaacttgttattgttgtagataagggaggccct

SEQ ID NO: 51855 - DNA, 201 bp, Homo sapiens
gacattggtaatacagatcctgtgttttccagcctttttaaagtgaagcaagaacataaagtcctatctgaagcattctaagtgcagaatccttctagatktgtacatttgtcccccagtctatagccgtctcaatcacatcgaattttataactttttaaaagggactcaccttattgaatctttccaaagcattcaaca

SEQ ID NO: 51856 - DNA, 201 bp, Homo sapiens
cctaattttatacattattgctctaacttatttttctacttattattttattttctatttaataaaatacaaactacattgcttgaattgtgttgtatctrcaaaacaatatggatacaaatacggattttttagctattttcatttgttcttttctacattatacttcttgaagcttctgttttattcagtttgtgtaga

SEQ ID NO: 51857 - DNA, 201 bp, Homo sapiens
tgaatgccctactgaagaatctgtttttcaaagattatccaagaaaatattttttgagagaattctagtggatttaattgatgaagacatggtaagagaarctgttggaagatacttgaaagaaagtcattaagtgagaaaaaaatgagaactaaaatgtgagactcacgaagagcagagtgagctttaagaataaagact

SEQ ID NO: 51858 - DNA, 201 bp, Homo sapiens
ttaaataagaggggcccaacattggtgacttcttgagaataaaggtcattccttttgagattagagtgcaaatagcttcttagaaggttttttttctttcrggcagattaaaggctcacatagaaaagttattcagtgttcaggactgtctttagttgctttgtacacctggcactgttttcatatttccttgatttagtt

SEQ ID NO: 51859 - DNA, 201 bp, Homo sapiens
tgtctatggcttcatgatgctggtgctggttatcctgtgcattgtgactgtctgtgtgactattgtgtgcacatattttctactaaatgcagaagattacmggtggtaagtacctatttgtggatagaaatttggggaaccataatattttaaaataagatttcctttgaaatctatcaagtggagtaaagagctgtatag

SEQ ID NO: 51860 - DNA, 201 bp, Homo sapiens
tggcccagtgtacttctggtaatcttgagacttctaatgttggacagactggatgcctactagaatcgtttagtcagcctctgcctcataaataatttgtrttatatcacggagtgatttcagaaatgttttgtttgatttactttggcaaatggaaaccttttgtctttgtctctgttgggagtataggaactcttaaaa

SEQ ID NO: 51861 - DNA, 201 bp, Homo sapiens
ttttaaaggactttaaaggatgttttattaaattctttgctttaaaatctttgttttagtgccattcattcaaaagagatttatcttctttccccctcccsccaccaggcaatggacaagttttctctctgctgcatcaactgcaatctatgtttacatgtattccttttactactattttttcaaaacaaagtaagtgga

SEQ ID NO: 51862 - DNA, 201 bp, Homo sapiens
acctaggctaaaattccctatttctctgtggcccagtgtacttctggtaatcttgagacttctaatgttggacagactggatgcctactagaatcgtttastcagcctctgcctcataaataatttgtgttatatcacggagtgatttcagaaatgttttgtttgatttactttggcaaatggaaaccttttgtctttgtc

SEQ ID NO: 51863 - DNA, 201 bp, Homo sapiens
atggacaagttttctctctgctgcatcaactgcaatctatgtttacatgtattccttttactactattttttcaaaacaaagtaagtggagacattttttyaccttttatttaggaaactaaatttgtcctttaaatactaatatttaaggccttatgttgaaagtaaaactggatatcctatatatattttgttttattt

SEQ ID NO: 51864 - DNA, 201 bp, Homo sapiens
tcaaggatgactaggcatttgtgtgtgcacttaatattactaattaatggaaggttttcttttaagctttcaataatattgggctacatcataaattcctraggccaatggagatttcttctctgacagttcaataaccaactgcattgtcctaaagagcccttagtaggttggtacaaaagtaattgtaaagctgcaaat

SEQ ID NO: 51865 - DNA, 201 bp, Homo sapiens
ttttgagatgttagggagtggtattagtccattctaacaccactataaagaagtacctaagactatgtaatttaaaaagaaaagaggtttaattggctcayggttctgcaggctatattggaagcatagcggcatctgcttggcttctggggagacctcaggaaacttacaatcatggcagaaggtgaagggagagtcaag

SEQ ID NO: 51866 - DNA, 201 bp, Homo sapiens
cttttgtagtaaaatgggctatgcactgtttttttttgtttgttttgttttgtttttttgaggcatagttttgctcttgtcacccaggctggagtacagtggcacaatgtccactcactgcaatctctgcctcctgggttcaagcaattctcctgcctcagcctccctagtagctgtgattacaggtgcttgccaccatgc

SEQ ID NO: 51867 - DNA, 201 bp, Homo sapiens
aagttctagctgtaccatatgtatgctttccaccttgatctagttccccaagctctctaagcttctgtaaagtggggataaaaccactatttatggatctrtcataatcatctattaaaaggaagaggtaatagttttcaccatgtgatagaatctctagaatgtgtgaaatagctagaaaataaagaacttttggaaaca

SEQ ID NO: 51868 - DNA, 201 bp, Homo sapiens
ccatgttttttccatgtaatgctgaatagcataggttatatggccaaattgtactttttgtttttaacaataaatttgattttgaaaatttatataaatgrtagcatgttttcaacatatgggtgcttattgtaaagaaagccaatccccttggcataatgaatactcatcctcaaagtgtctgaaatttggatttttgtc

SEQ ID NO: 51869 - DNA, 201 bp, Homo sapiens
gtagtgttgggactgttattaggtagtaacgatagccatttacatggtgagatatggaaagagctggccttttggggtcagtctgttctgggtgtgaactscccacttaatagccatgttactctggccaaattatttaacctttcttcctcaactttactcatttgcaaaatagaaataatacctacctcatagggctat

SEQ ID NO: 51870 - DNA, 201 bp, Homo sapiens
gttccgtgatacaggcatataagctcaaaagtgtactgtattctactttttaatcttgtaatcttgtgacttacactgctgtgattagggaaaccattaarattttacaaattgggtgtatataaaggctttagaataatttacaaattaaaagtgtaatttcaatgcagttttattgctaggactatttcagttttttat

SEQ ID NO: 51871 - DNA, 201 bp, Homo sapiens
catcagataagctgtctcaaagtttaagaactgctattgtttcacatagtatacagggaccatgtatagatttgggtctttgagtatttttaaattttcartgggcatccatccttctgtttaatgatattattactaatatatttccaattaaaaaaacacttaggaaaagttaccatatgaaactcagaactctcaatg

SEQ ID NO: 51872 - DNA, 201 bp, Homo sapiens
cagtaaagggtcttgacgtttcccagtcttcaggtcagggccagaaacagtcccttttgcatttggcctaaaggtgattggcagtttgtttaattggtatkctcacatcaaaacgtgcatgtgaacgactcttcaaatggctttcacttagggctgtaactgtggttttcagagtggtagacttgagcaaggcaggaaggt

SEQ ID NO: 51873 - DNA, 201 bp, Homo sapiens
gaccggattaaaaccctggggtggggcagcattaataaacttgaattgaagagcagtttatacttacttgtaagtgcacccaacctacacgcgttcaattyctaggcctttcttgtaactttctcctcaccttccagcccctaagtgagacccccatcccgatagtctctaactaaggcagcttctgacagtaaagggtct

SEQ ID NO: 51874 - DNA, 201 bp, Homo sapiens
atttttagaaagactcaaaacacctgtatttaaaccttaatatgaaaatcatgcaattaatagttacacaagatgttttcattacaaaatatgtacctatmtattgatggactctacatcctatattgtgacatgtaagtcctttaaaaggtgaaaagtatgatttcttaccacttaagtatgattgatatgatccaacaa

SEQ ID NO: 51875 - DNA, 201 bp, Homo sapiens
ggtgatttgcaaagcaaatgatacagttttagtaagttcagagagaatactaacataaggatattttctttaaaaaagaataactttccagagcatagagyatttagtgtttttaaatgatggatactgctctgtatgtatttgtttcaaaacatcttattttatctttgcaggagcgattggttacatgggaacaagtgc

SEQ ID NO: 51876 - DNA, 201 bp, Homo sapiens
aaagttaatatttagttgcctatattatgtaaccttttaactatatataaagtacttttttggtttctttctcaccacttttattcaaaagtacttttaamataccaatacatagtctgtctgatgggagtataaattggacagtaaggttttgtcttaataaaatgaaatttgtttctcatgatatgaatcttgcaggta

SEQ ID NO: 51877 - DNA, 201 bp, Homo sapiens
cccaggctggtcttgagctcctggcctcaaacgatcttcctgccttggcctcccaaagtgctgttattataggtgtgagccaccgtgcctggcttgggaartagtttcaaattttaaattttaatatactagggtatattgtgaagtatcagagggtggataaagcatttggtacctcttaactgtatctgattaggattc

SEQ ID NO: 51878 - DNA, 201 bp, Homo sapiens
gcatctgcttggcttctggggagacctcaggaaacttacaatcatggcagaaggtgaagggagagtcaagagtggccagggagggagagagggcggaggtaaaaaaaaaaaaaaaaaaaacttaatgagcatttagcttgtaggatattttaaatattaagtggtattaccttgtataaagtgttttttcttttgtaggta

SEQ ID NO: 51879 - DNA, 201 bp, Homo sapiens
cccttggcataatgaatactcatcctcaaagtgtctgaaatttggatttttgtctaaaggatttaattaaagacttttttttttctttgcattaacatccrgttgtcctcatggaacctatgaattttgtggctgatattgcaggttggtaacattttattttctgttattttagattcattggttttcaattttcaactc

SEQ ID NO: 51880 - DNA, 201 bp, Homo sapiens
tcaagagtggccagggagggagagagggcggaggtaaaaaaaaaaaaaaaaaaaacttaatgagcatttagcttgtaggatattttaaatattaagtggtwttaccttgtataaagtgttttttcttttgtaggtattgttggtgaggctgatgaaaatggagaagattactatctttggacctataaaaaacttgaaata

SEQ ID NO: 51881 - DNA, 201 bp, Homo sapiens
attggggccttgaagagaggagagaaatttggggactatccctaaagatcttttgggaattaaaatgtaaataaagaaataactgggcagtgccacagacytagttcaaatcagatatgctacattttgagtagtaccttgtgattatgaatcagaatctagatgtaatattgaaacaaatatgtggataaaatcaaagcc

SEQ ID NO: 51882 - DNA, 201 bp, Homo sapiens
cagaatggatagatacaagtcattttgaagaaaaatacatgcttaatattacctatgaagaattaaggagaaggaagagccagagataattgtaaaatttsaaagccacatgttagtaccattagcagaagttagagaatcagaaacaagtgttatatatgaggtggaagattatgagtgtactttagggcagtctgagtc

SEQ ID NO: 51883 - DNA, 201 bp, Homo sapiens
taaggggagtagaagtagatctatgtgagaagaaattataagaaaaatacagaggtggaagtgagtatgctgtgcttgtggattcttgaagagggataagscttattggaatatagaatataatggaaagaaaagttgactagataaggtgagatggccatattacaggaagtatagaatattggagaaaatagtttagat

SEQ ID NO: 51884 - DNA, 201 bp, Homo sapiens
tttactactattttttcaaaacaaagtaagtggagacatttttttaccttttatttaggaaactaaatttgtcctttaaatactaatatttaaggccttawgttgaaagtaaaactggatatcctatatatattttgttttatttcaggatgtatggcttatttcaaacatcattttactttggatatatggcggtattta

SEQ ID NO: 51885 - DNA, 201 bp, Homo sapiens
tctccagttgcattctaaaatttatgacaaattgagggtgcagcttcaggattagtgacactagagggtgctggcatgcagcattagtagggttagtaaasccctttgtgacaccaggtttctttatttttaagaagtattttccctggtataataatttcacaattatacaacatctcataatttttagaataaaggaat

SEQ ID NO: 51886 - DNA, 201 bp, Homo sapiens
ttttggaacaatggtgagttgcttgaatcttacttttaaactgaaaaagtatacacattctaactgagacctactcaccctccaaaatacttcttattagmtgttttgatggtttcagtcagttcatactcagtcctggaaagttagatgaggagaatactactgttgttagcctccataaaattttggttaagtttaaac

SEQ ID NO: 51887 - DNA, 201 bp, Homo sapiens
gtatttctttagctataaatttggagggaggaaacttacaactgtaatttttacatactatgttttagtttgattctgaatgatttgcttttctctctctmtatatatatttgtatataggatagagacctaggagatgaatatggatggaaacaggtgcatggagatgtatttagaccatcaagtcacccactgatattt

SEQ ID NO: 51888 - DNA, 201 bp, Homo sapiens
gaatagcgcattggccttctaatgaggtgaatattggagaatgtggcttatatctatctgtgatcaagtgggcttcttactactgaaactcagaattagasttaacacactcagagagtatattataggcttccctacatgggcacttgcccttatacaacttacggtgtgagaaagaacagaatgtatgcatcagaagga

SEQ ID NO: 51889 - DNA, 201 bp, Homo sapiens
gtgaattttaattctaagtgtgtgtaaatctatattttgctcagagttttgtcatcagattattaatttgtttactggcctttattttcaaatgaaaaaawtttttttaggtaaaatggaaaaagtcagatgtgaaatttgaagatcgatttgacaaatatcttgatccgtccttttttcaacatcgggtaggtaaatagt

SEQ ID NO: 51890 - DNA, 201 bp, Homo sapiens
atcgaatcttccatggggtggcagcacgcatttaggtgggaaagaaggcagacggagataaatgacttctgctcaagagaacagccacgcaggacagaatyacaccaggcagatgtacagattcttattttaattgatttagacacttgtgatatgagcttatactaattcagttcatatcacatttatcaggtcataata

SEQ ID NO: 51891 - DNA, 201 bp, Homo sapiens
cgaatgccatttttaaaagtatgctataaactatgctactctcatacaggggacccgtattttaaaatctccagacttgcttacatctagattatccagcmcaatcataaagtgaatgacaaaccctttgaatgaaattgtggcacaaaatctgttcaggttggtgtaccgtgtaaagtggggatggggtaaaagtggtta

SEQ ID NO: 51892 - DNA, 201 bp, Homo sapiens
aactggcaatgtttgactccagagcccatgttttttccatgtaatgctgaatagcataggttatatggccaaattgtactttttgtttttaacaataaatktgattttgaaaatttatataaatgatagcatgttttcaacatatgggtgcttattgtaaagaaagccaatccccttggcataatgaatactcatcctcaa

SEQ ID NO: 51893 - DNA, 201 bp, Homo sapiens
tcaatcaaggtgttatatttcagtcagaagtgaaaatttatgaagagtatttggaagtgtgtacagaaataaactagacttacaggtaggctagatcagamcgttaacatatgaacctgcagaaatctggtaagacttaaattcagtgtgaggaataactctagttctctcctatgagcatttcctaaaagccatctgatt

SEQ ID NO: 51894 - DNA, 201 bp, Homo sapiens
gtaacttaagggaaactcatacaagtaactcacttttttttgggctcagtgttttacttgataaatgagactggtcccttaattactttgtaggaatgatrtgttttacttgataaatgagactgatcccttggttactttgtaggaatgatgtaaggctgcgggactaatcatggtggaaacatttccagagagtggata

SEQ ID NO: 51895 - DNA, 201 bp, Homo sapiens
ggttccttattatttgccatcctttcttcagagtattgttcactggactcctctttattttatctgagatttttcttgattatcaccagcattcagtgagktatagaatcgattatgcagagagttaaaaaaatttttcttgacttgactttttctatatgtgatcttaggaagacccagagaggtaacatcttgacattt

SEQ ID NO: 51896 - DNA, 201 bp, Homo sapiens
cattcagtgaggtatagaatcgattatgcagagagttaaaaaaatttttcttgacttgactttttctatatgtgatcttaggaagacccagagaggtaacrtcttgacatttacaaagaaaatggaatgaatctagctaaattttttgagtgcttttcctgctgaaatttcatcttgctgcctgaaaaccttggcacattt

SEQ ID NO: 51897 - DNA, 201 bp, Homo sapiens
accttggcagatggtgatgtaagcacttctctgaaattttgagatgttagggagtggtattagtccattctaacaccactataaagaagtacctaagactrtgtaatttaaaaagaaaagaggtttaattggctcacggttctgcaggctatattggaagcatagcggcatctgcttggcttctggggagacctcaggaaa

SEQ ID NO: 51898 - DNA, 201 bp, Homo sapiens
attaaaattttatacatcttttcgtgtcgtaaggattcaggtatattttcacaaaattgaatgatttttctcttatcctgtaaagaattgtattgtaactrttctaaaatgcattatcaatattttaaaatgtaatattgttatttcctattataaaagaaatgtcattgcaaaaataagtggaaatagtgttgctttgtc

SEQ ID NO: 51899 - DNA, 201 bp, Homo sapiens
gtttgcaatttgaagatatctttctgtccagaaggcaaaattaccgaatgccatttttaaaagtatgctataaactatgctactctcatacaggggacccrtattttaaaatctccagacttgcttacatctagattatccagcacaatcataaagtgaatgacaaaccctttgaatgaaattgtggcacaaaatctgttc

SEQ ID NO: 51900 - DNA, 201 bp, Homo sapiens
atgtgtttaagctttttttgtttttaaaatcaatttattttgaagttactttataaattttcttgtataatttgctttgtataagggatgatttcacttargtaatgtttgaaaataaagatgattaaaattttttcattataaaaagtcttaaagatacacaaaaaaagggaggaatagtacactgaacccacacttatt

SEQ ID NO: 51901 - DNA, 201 bp, Homo sapiens
ctttctgtccagaaggcaaaattaccgaatgccatttttaaaagtatgctataaactatgctactctcatacaggggacccgtattttaaaatctccagasttgcttacatctagattatccagcacaatcataaagtgaatgacaaaccctttgaatgaaattgtggcacaaaatctgttcaggttggtgtaccgtgtaa

SEQ ID NO: 51902 - DNA, 201 bp, Homo sapiens
cttttccattctgatttgacttttgtgcatttttggctggattatctcatgtagatttcttcactggtggtttttctttagtttcctcatcaaaatcgtcrtcatcatcatcatcatcttcatcagcagcaagttttacttttttctgtggaaccttgctaccacctccagggacagatcactttccagatatccttaaga

SEQ ID NO: 51903 - DNA, 201 bp, Homo sapiens
tttaactacattagtagttgacatttgtatacatatatcctaatacaagagtaggataaggtggaaatgtaatggcctgagggatggtgaagcattctttyagtatttttcatcatgttgggctcctagattgtactggggttgcccataaatcaaaccccatactcttagaattcattatattatggtgatatccgaacc

SEQ ID NO: 51904 - DNA, 201 bp, Homo sapiens
gtaatggcctgagggatggtgaagcattctttcagtatttttcatcatgttgggctcctagattgtactggggttgcccataaatcaaaccccatactctwagaattcattatattatggtgatatccgaacctagtgaatggtatgcttgggtgttttccattgagagtggatggacctctttataaagttggttgctgc

SEQ ID NO: 51905 - DNA, 201 bp, Homo sapiens
atggggagggaatgcccatagaatatttgtgaacaaagaagtgaaggacctatagacttttttaaaatcgtatgtctgattttaatttttacatttttacttttttttttttttttttttttgagatggagtcttgctttgacatccaggctggagtgcagtgacgcgttcttggctcactgccacctctgcctcccaggt

SEQ ID NO: 51906 - DNA, 201 bp, Homo sapiens
caatgcagatacttgggttactggttgtacccagtggaatgtgtacaggattctttttgactgttagaaggaaagggagaaatagagagttggataaggagattgattgattgattgattgattgattttgagatggagtttcgctcttgtctcccaggctggagtgcaatggcacgatctcagcttactgcaacctccac

SEQ ID NO: 51907 - DNA, 201 bp, Homo sapiens
ttgaggaattgccacactgtcttccacaatggttgaactaatttacactcccaccaacagtgtaaaagcattcctgtttctcccatcctctccagcatctrttgtttcctgattttttaatgatcgccattctaactggtataaggtagtagctcattgtagttttgattcgcatttctctagtgaccggtgatgatgagc

SEQ ID NO: 51908 - DNA, 201 bp, Homo sapiens
tacaggggacccgtattttaaaatctccagacttgcttacatctagattatccagcacaatcataaagtgaatgacaaaccctttgaatgaaattgtggcmcaaaatctgttcaggttggtgtaccgtgtaaagtggggatggggtaaaagtggttaacgtactgttggatcaacaaataaaggttacagttttgtaagag

SEQ ID NO: 51909 - DNA, 201 bp, Homo sapiens
aataccttttagttaggaatattttgaaacttgtttcagaatggaaatttttttttttcaagccaaagtaagtgataatgcttagaaaagggaaaggtaaytaattacaccagacagggaaataatttgctttgtaatagttccaggccatcagaaagtacatagagtgagtcaggttacttctcaaagaacatctgctga

SEQ ID NO: 51910 - DNA, 201 bp, Homo sapiens
aatgtatagaattttggcaatacacagaggtacagagaaatagtaaaacttataaatctgtagttctgattgctgagagagagcttatgaaacacattggttttttttcttttcaaacgtagaaatgctcttaaatacatatttataattataattttagagctaaggacaaacttagaggctgtctaactcagggttttt

SEQ ID NO: 51911 - DNA, 201 bp, Homo sapiens
tagttccaggccatcagaaagtacatagagtgagtcaggttacttctcaaagaacatctgctgaattgattattttcatagtgctttaaaaattaaaattytgattctgttaaaatttttctcagaaagttttgaatttgatattggtaaaaatggtatttcaaagttgctttgtctcgctaaaattgtaaatttttacca

SEQ ID NO: 51912 - DNA, 201 bp, Homo sapiens
gggtgatcttcactctagttctctgttctatgaaagtttccacatctggctgggcatgatggctcacgcctgtaattccagcatgggaggctgaggtgggyggatcacttgaggtcaggagtttgagatcagcatggccaacatggtgaaaccctatctctactgaaaaagcaaaaattagctgggcatggtagtgcaggc

SEQ ID NO: 51913 - DNA, 201 bp, Homo sapiens
ggggttgcccataaatcaaaccccatactcttagaattcattatattatggtgatatccgaacctagtgaatggtatgcttgggtgttttccattgagagyggatggacctctttataaagttggttgctgcaaaatccagttcttccaaaagccactttatttagggtttattcacaagtcatatccattttggtacagt

SEQ ID NO: 51914 - DNA, 201 bp, Homo sapiens; identical to SEQ ID NO: 27762

SEQ ID NO: 51915 - DNA, 201 bp, Homo sapiens
tagaagacttcagtctggattgttgatgatactcagtatggactatatttgtctctccttttcttttctccccatctttgggcttaatttaccagtagtgscctgaactgttcaatgcactttttgtatacttgcttgcatttttgctttaatgttttctacagaactaggtccttttggtgttttaggaattttttttcc

SEQ ID NO: 51916 - DNA, 201 bp, Homo sapiens
aatgcagatacttgggttactggttgtacccagtggaatgtgtacaggattctttttgactgttagaaggaaagggagaaatagagagttggataaggagattgattgattgattgattgattgattttgagatggagtttcgctcttgtctcccaggctggagtgcaatggcacgatctcagcttactgcaacctccacc

SEQ ID NO: 51917 - DNA, 201 bp, Homo sapiens
taaagatttacagattttttttattattcattcaaatatttattgagcagctaaggagatacgaaggtgattcagaacatggtcagaggagaggcgaatgygcaagtaatagaaagcaaagggcaaggttcactgaatcacagcaatcagaagaaactgctttagggaaccaagagtgagattgtttccagcctaaagagg

SEQ ID NO: 51918 - DNA, 201 bp, Homo sapiens
atgcagatacttgggttactggttgtacccagtggaatgtgtacaggattctttttgactgttagaaggaaagggagaaatagagagttggataaggagattgattgattgattgattgattgattttgagatggagtttcgctcttgtctcccaggctggagtgcaatggcacgatctcagcttactgcaacctccacct

SEQ ID NO: 51919 - DNA, 201 bp, Homo sapiens
ttgaaagatataagagcttaaggcaagaaagaaataacatggaattctatttgaaggacaacagaacattcttggaaaagcagctccagttggtttttcarctgtcaaacttgaatgtgtaagtccccacagagcatggacagtcggtgcagagttccaaggaaacaattattgcctgatgaccacttccattttgtatac

SEQ ID NO: 51920 - DNA, 201 bp, Homo sapiens
tgcagatacttgggttactggttgtacccagtggaatgtgtacaggattctttttgactgttagaaggaaagggagaaatagagagttggataaggagattgattgattgattgattgattgattttgagatggagtttcgctcttgtctcccaggctggagtgcaatggcacgatctcagcttactgcaacctccacctc

SEQ ID NO: 51921 - DNA, 201 bp, Homo sapiens
aaacaaaactatactccttgaatttgtaccaattagaatcactttggttaataaataatattttataaatatgattatatttttccctaatacttactaamgcgtagggggaaggccctaaggagtaacttacagagcataaagctattgggaactgtttaggcttgggtggggaacattggacaaatagctggcagtctg

SEQ ID NO: 51922 - DNA, 201 bp, Homo sapiens
aagaactcataataccttaattgtataatttgtaggaaaaggaattatagaaccaaggagagagtgagcaaagagatggcaaggccacaatttgggaaacattatttcaaatggaggtctctagactcttcgtttctttccctttggctttttgtgaataaatgcctgtagagttctaagaagttatgggagtctagtaga

SEQ ID NO: 51923 - DNA, 201 bp, Homo sapiens
agaactcataataccttaattgtataatttgtaggaaaaggaattatagaaccaaggagagagtgagcaaagagatggcaaggccacaatttgggaaacattatttcaaatggaggtctctagactcttcgtttctttccctttggctttttgtgaataaatgcctgtagagttctaagaagttatgggagtctagtagaa

SEQ ID NO: 51924 - DNA, 201 bp, Homo sapiens
gaactcataataccttaattgtataatttgtaggaaaaggaattatagaaccaaggagagagtgagcaaagagatggcaaggccacaatttgggaaacattatttcaaatggaggtctctagactcttcgtttctttccctttggctttttgtgaataaatgcctgtagagttctaagaagttatgggagtctagtagaac

SEQ ID NO: 51925 - DNA, 201 bp, Homo sapiens
ataacccaaatctaaacttcagagttctggcgagtagttcatattttcgggcataatgtatttcagataagctggaccctaaatataagaaaacatttcamatctaccaagaagttgtgctttacattaaacactggattaagttaatcactatcgaattgacactagctgtactgtcacagtcttaagagccactagaag

SEQ ID NO: 51926 - DNA, 201 bp, Homo sapiens
tttcaccatgtgatagaatctctagaatgtgtgaaatagctagaaaataaagaacttttggaaacagtatgataaatgggaaaggcataagcatgagagcytgaaagcactggaataaatgtccatgctgttgctcagctttttttatggccatggaggtcacattaacctttctaagtctcatttttatctgtaaaatgg

SEQ ID NO: 51927 - DNA, 201 bp, Homo sapiens
ggattctacaccttgtgttttcatctcagaacaactttatgactctaagttctggcagaggtaacttaagggaaactcatacaagtaactcactttttttygggctcagtgttttacttgataaatgagactggtcccttaattactttgtaggaatgatgtgttttacttgataaatgagactgatcccttggttacttt

SEQ ID NO: 51928 - DNA, 201 bp, Homo sapiens
gttggatcaacaaataaaggttacagttttgtaagagaagtgatttgaatacatttttctggaactattcataatatgaagttttcctagaaccactgagtttctagtttaatagtttgctatgcaaatgaccacctaaaacaatactttatattgttatttttagaaagactcaaaacacctgtatttaaaccttaatat

SEQ ID NO: 51929 - DNA, 201 bp, Homo sapiens
ttggatcaacaaataaaggttacagttttgtaagagaagtgatttgaatacatttttctggaactattcataatatgaagttttcctagaaccactgagtttctagtttaatagtttgctatgcaaatgaccacctaaaacaatactttatattgttatttttagaaagactcaaaacacctgtatttaaaccttaatatg

SEQ ID NO: 51930 - DNA, 201 bp, Homo sapiens
ccttagcctcccaaagtgctgagattacaggcgtgagccaccgcgccctgcctggattgtctttactgaaggatttagcatactactcttggagctaaaatttttcccctacctcaatccccacctcaaccccacctgctgtgtgttctcctcgagtataatgctcaggcaatcttcaatagggtatggacacagataatt

SEQ ID NO: 51931 - DNA, 201 bp, Homo sapiens
cccggctggtcttgaactcaaaacgactggcctcaagtgatctgcctgccttggccccacaaagtgctgggattacaggcatgagccaccacgcctggccraatatgtattgtaaaaagcaaaacaaaaacaaaaacagttatgggaagaatagcatctaaaaataagcataaaattcaaatgtcatttatattatttttt

SEQ ID NO: 51932 - DNA, 201 bp, Homo sapiens
ttctttatagtcagtgaaaggtatgtttatgcttatttggttttctaaaactcaaagcacttggaagcatctagagttagattactatgtctcctaagatkccgaaggactccattaaaaacaatttcagattgagaatcatagaattttagaactagaaagactcaataatttaatccaaaactcttcattttcctaatg

SEQ ID NO: 51933 - DNA, 201 bp, Homo sapiens
agttaacagagtctgggaaagttgagtttgagctgaactttggaagaacgaacaggaatttaataggccaagagggatggggtggatgggatgaggaaaarcgagcggtgcattccaactagagagaacagcatgtggaaagccaaatggcaggaggagcacaggccagtttgaggcagtgcgaggaggccagtatgggca

SEQ ID NO: 51934 - DNA, 201 bp, Homo sapiens
cccaggctggagtgcagtggctcaatcacggctcactgcaacctctgcctcctggattcaagtgattctcatgcctcagcctcccaagtagctgggattaragatgcccaccgtcacactaggctaattttcatatttttaatagagatggaggtctcgccatgttggccaggctggtcttgaactcctggccttgagtga

SEQ ID NO: 51935 - DNA, 201 bp, Homo sapiens
tatgagcccttccaaatattagtaaacatctatagtctcaatgtcctgggacattaccattcttccaatattaaaacatttggggccgggtgcggtggctyacgcctgtaatcccagcactttgggaggcagaggcgggtgagtctcctgagataaggagtttgagatcagcctggcccatatggtgaaaccctgtctctg

SEQ ID NO: 51936 - DNA, 201 bp, Homo sapiens
ctgggattacaggtttcaccatgttggccaggctggtcttgaactcctggcttcaagtgagccacccgcctcggcctcccaaagtgctagaattacaggcrtgagccaccgtgcctggccctaatttttgtatttttagtagagatggggttttgccaggctgccaaggctggtcttgaactcctggccttgagtgatcca

SEQ ID NO: 51937 - DNA, 201 bp, Homo sapiens
ctggccctaatttttgtatttttagtagagatggggttttgccaggctgccaaggctggtcttgaactcctggccttgagtgatccacctgccttccagartgctggattacaggcatgggccaccgcacccagccaactaattacacatttatttaattacagttggataagtgctttaaaaaggtggctagaatacctt

SEQ ID NO: 51938 - DNA, 201 bp, Homo sapiens; identical to SEQ ID NO: 15248

SEQ ID NO: 51939 - DNA, 201 bp, Homo sapiens; identical to SEQ ID NO: 15247

SEQ ID NO: 51940 - DNA, 201 bp, Homo sapiens
tcaaggatgtaacagactggttttgagatacatgaagctgtgtcttaagttactctgagtttacacatgaaaaggtgaacatcatcaaaaaccctggacayagttccctgagaactgcctgccgaatggtgagaaccagattgctttttttgtaatacagttgtaactcttgagttcatgcatggaaagacagttggagat

SEQ ID NO: 51941 - DNA, 201 bp, Homo sapiens
agctcttccagcaaaggcaaaaagagtgaggagggggcggggctgtgagaggtggggcgaggactgaaagggagaagaagtcagctcttcatctggtgggragtttggcaccaggttggaaagggggagagaagaggacttaacccatctttctgtctccctgccttctggctttctccctcttccctagaaggccggact

SEQ ID NO: 51942 - DNA, 201 bp, Homo sapiens; identical to SEQ ID NO: 15241

SEQ ID NO: 51943 - DNA, 201 bp, Homo sapiens; identical to SEQ ID NO: 15242

SEQ ID NO: 51944 - DNA, 201 bp, Homo sapiens
tgagatacatgaagctgtgtcttaagttactctgagtttacacatgaaaaggtgaacatcatcaaaaaccctggacacagttccctgagaactgcctgccraatggtgagaaccagattgctttttttgtaatacagttgtaactcttgagttcatgcatggaaagacagttggagattatggaactatatgctttttcag

SEQ ID NO: 51945 - DNA, 201 bp, Homo sapiens
acacggtgaaaccccgtctccactaaaaatacaaaaattagccaggcatgatagcctgtgcctgtaatctcagctgcttgggaggctgaggcaggagaatrgcttgaactcgggaggcgggggttgcagtgagctgagatcatgtcattgcattccagcctgggcaacagagtgagactctgcctcaaaaagaaaaaaaga

SEQ ID NO: 51946 - DNA, 201 bp, Homo sapiens
tgtatttaaggactggggcatagcatgggggcagtcccccagacctcttcattccccctcctgtggtgagggctaggtgtgatcaacacttttcttctccrttcccttcctgcttttttcatggtgggggatccaccaggtcatctaggctctggccctagttgaaggggcaccccttcctctgtgccaagaggattcatc

SEQ ID NO: 51947 - DNA, 201 bp, Homo sapiens; identical to SEQ ID NO: 32120

SEQ ID NO: 51948 - DNA, 201 bp, Homo sapiens
ccaaagtgctgggattacaggcttaagccaccacacccggcctccctatgagtattgaaagagatacaaaacagatattaaagaaaatgagggacattgargacatccagggaggggtctgatgcatggaaagcccaatgttggttctccagagtaagaatttcacaaaaaggacaattagacaaggcaaacctttggttt

SEQ ID NO: 51949 - DNA, 201 bp, Homo sapiens
tttttttgagacaggatcttgctttgttgcccaggctgtagtgcggtggtgcaatcaccactcactgtagcctccacctccctggatcaagacctccctgkctcaagtgatcctcccaccttagcctcctaagtaactgggactacaggcatgcacaaccatgcccagctaattttttttatttttcttttgtagagacag

SEQ ID NO: 51950 - DNA, 201 bp, Homo sapiens
aggccagacgtggtagctcacacctgtaatcccagaactttgggaggccgaggtgggaggagcgcttgagccgaggagttcaagaccagcctgggtatcayagggagaccccgtctctacaaaataaaaaaataattcactgggtgtggttgtgcacatttgtagtctcaggcactcaagaagctgaggcagaagaatcac

SEQ ID NO: 51951 - DNA, 201 bp, Homo sapiens
cgaacctcttcgggatcccaagtgggacgctggcgtgcttactcaccagcttcccagccgtcactggttgggggctgctttgggagcactaactcactggyccctgttgtttgtcctcgggcagagtcctaggtgtttgaagtaaaacctacatgctgcaagcccagatcctagaggtttcatctcatgtgctaactccta

SEQ ID NO: 51952 - DNA, 201 bp, Homo sapiens
ttttctttttttgttttccttttgagacagagtctccctttgttgcccaggctggagtgcagtggtgcgatctcagctcactgcaacctccacctcctgtrttcaagagattctcccacttcagccttccgagtagctgggactacaggcatacgccaccacacccggctaatttttgcattttttggtagagataggttt

SEQ ID NO: 51953 - DNA, 201 bp, Homo sapiens
cacgtccctggggatgctggggacccctgtcctccttatccctagcccatgctgatgacatctcagaataccccatcccacctagctgtctacaccccacygcaccactgccttgagtagaatgagtctagtaataatagctcacatttgggggctcactggactaacctcttaacatacactatctctaattcttgcact

SEQ ID NO: 51954 - DNA, 201 bp, Homo sapiens
tggagaaggtataagagacaggatctgattttagcaaggaagagagtgctgggatgtctcagtgatgtgtaccatggaactggttcctggttctccctatragtttatatatatatatattttttgagacggagtctcgctctgtcgcccaggctggagtgcagtgccgtgatctcggctcactgcaacctccacctccag

SEQ ID NO: 51955 - DNA, 201 bp, Homo sapiens
atcgcttgaacccgggagctgggggctgcagtgagctgagatcgtgccattgcactccagcctggacagcaagagggaaactctgcctcaaaaaaaaaagraaaaaagaaaaaaaaaagacaccaccctcactctcagagaactcaccctatgttgtcaggaagcaaatccatgaaacaaacttacacaaaactgctagaa

SEQ ID NO: 51956 - DNA, 201 bp, Homo sapiens
aatcgcttgaacccgggagctgggggctgcagtgagctgagatcgtgccattgcactccagcctggacagcaagagggaaactctgcctcaaaaaaaaaaraaaaaaagaaaaaaaaaagacaccaccctcactctcagagaactcaccctatgttgtcaggaagcaaatccatgaaacaaacttacacaaaactgctaga

SEQ ID NO: 51957 - DNA, 201 bp, Homo sapiens
aatcttggagactcaagtttaaatcccagctcagccattttcctactgctatgagcctcaatcccttatccataagacaggagtaaactggaacctacgayataggattgatgtaagggttggagaaaatctgtgttaaggatccacaatatctagcatctggcagatgctgagtaaatgcttatattggagcatgtgctg

SEQ ID NO: 51958 - DNA, 201 bp, Homo sapiens
agttgagctgggtattttttttatctattcactaaggcttacatcttacagattacaggcatcctacattttatatatcatctaagttttaagaatgtaayatttcactaatattgaagaaaataagttatattaccatgagtttaaatttctaacaaaattataatgttattagttatggtttacaaaattgagtgttaa

SEQ ID NO: 51959 - DNA, 201 bp, Homo sapiens
ccacgttggccaggctggtcttgaactcctgacctcaagtgatcctcccgcctcagcctcccaaagtgctgggattacaggcgtgagccactgtgcctggsccagataggaattcttggaaatagcattgtctccatcctgttactctcctgcggtgttttggggccctcttgaacatccccgggatgtggatatcacaat

SEQ ID NO: 51960 - DNA, 201 bp, Homo sapiens
atgttctgaggctgatatggaaaaccatgtggcaaagccaggacctgctggacctcgggctcgaggacctgaggatggagcagagagtccccgatgctctygtcttcaccatccagaccagggggactgcggagcccatcacggtcaccattgtgcctgcctacagagccctgggtaaggggaggggaagctcacccgact

SEQ ID NO: 51961 - DNA, 201 bp, Homo sapiens
gtggcgggtgcctgtagtcccagctactcgggaggctgaggcaggagaatggtgtgaacccaggaggcggagcttgcagtgagccgagatcgcgccactgyactccagcctgggcaagagagcaagactctgtctcaaaaaataaaataaaatataacagggatttaaagaaaaaacaattaccggccaaatgtggtagct

SEQ ID NO: 51962 - DNA, 201 bp, Homo sapiens; identical to SEQ ID NO: 32115

SEQ ID NO: 51963 - DNA, 201 bp, Homo sapiens
accatgttggccagcctggtcttgaactcctgacctcaagtgatctgcccacctcggccccacaaaatgctgggattataggcgtgagccactgcgccccrctcaaagagctggtgttaatcatggacttgcagtcaccccaagttaataagcaagcccaagatccccttcaagccaatattctttaaaatatttattcaa

SEQ ID NO: 51964 - DNA, 201 bp, Homo sapiens
gggcagatcatgagatcaggagatcgagaccatcctggctaacacagtgaaaccccatctctactaaaaatacaaaaaaatagccaggcgtggtggcgggygcctgtagtcccagctactcgggaggctgaggcaggagaatggtgtgaacccaggaggcggagcttgcagtgagccgagatcgcgccactgtactccagc

SEQ ID NO: 51965 - DNA, 201 bp, Homo sapiens
tttgtagagacagggtctcactatgttgaccagcctggtttcgaagtggtctcaagcgatcctcccaccttggcctcccaaagtgctgggattacaggcaygagccaccacacccaccccacatgttcttgttacccttcaattacagtctaggcctggcagatgtcagcttcgccgggtactgtggccattcgtcacagc

SEQ ID NO: 51966 - DNA, 201 bp, Homo sapiens
caagctcctcactgcctcagtcttctcatctgtacattggagataattctcctagtacccacctcaatacaggaagtgaaggcgtttttttttgttgtttkgttttgttttgttttgtttagatggagtctcgctgtgtcgcccaggctggagtgtagtggcgagatctcagctcaccacaacctctgcctcctgggttca

SEQ ID NO: 51967 - DNA, 201 bp, Homo sapiens
ccgggaggtggaagttgcagtgagccgagattgcaccactgcccttcagcctgggcgacagagcgagactctgtctcaaaaaaaaaaaaaaaaaaaaaaaaggaacttagggaggtctgtaaaaaggggacaaccacaacaataaacaataaaaataacagtccctaccttatagaattgctgtaagattaaaataggtta

SEQ ID NO: 51968 - DNA, 201 bp, Homo sapiens
accacacccggcctccctatgagtattgaaagagatacaaaacagatattaaagaaaatgagggacattgaggacatccagggaggggtctgatgcatggmaagcccaatgttggttctccagagtaagaatttcacaaaaaggacaattagacaaggcaaacctttggtttctgaagatatgaggtctcaagtgtccctg

SEQ ID NO: 51969 - DNA, 201 bp, Homo sapiens
tacttaccaccctctggcttcctcaatccccaatctcttcctttgctccttcactcctcagggccttctcttcccaactcccagccaccccctgaggtctrtgtgagcctgatcaaggcctgcggtggtcctggaaatttctgcccatccttcagcgagctgcagagaaatttcgtgaaacatcggccaactaagctgaag

SEQ ID NO: 51970 - DNA, 201 bp, Homo sapiens
gaccccaccctcaacgtggcagaagggtacagatgggacatcgttgctcagagggcctcccagtgcctgaaacaggactgttgctatgacaacagggagawccccatctccagctggaacgtgaaggtaatggctcctctctgggctgtcaagggcttgaaggtcagaacgacagataaactactcagtatttactcattc

SEQ ID NO: 51971 - DNA, 201 bp, Homo sapiens
tgatatggaaaaccatgtggcaaagccaggacctgctggacctcgggctcgaggacctgaggatggagcagagagtccccgatgctctcgtcttcaccatycagaccagggggactgcggagcccatcacggtcaccattgtgcctgcctacagagccctgggtaaggggaggggaagctcacccgactcacacacttgcc

SEQ ID NO: 51972 - DNA, 201 bp, Homo sapiens
tcgggctcgaggacctgaggatggagcagagagtccccgatgctctcgtcttcaccatccagaccagggggactgcggagcccatcacggtcaccattgtrcctgcctacagagccctgggtaaggggaggggaagctcacccgactcacacacttgcccaccccaggagacttcccagtgtctcacctttactcatggcc

SEQ ID NO: 51973 - DNA, 201 bp, Homo sapiens
ggggactgcggagcccatcacggtcaccattgtgcctgcctacagagccctgggtaaggggaggggaagctcacccgactcacacacttgcccaccccagsagacttcccagtgtctcacctttactcatggccacgtgcacacacccacatttattcatttcatctgtgtcctatgcttggggctgggttattgcagtgc

SEQ ID NO: 51974 - DNA, 201 bp, Homo sapiens
gagcatttccaggggaagcgtgggctggaccaggatgtgcgggtgctgaaggtagtcaaggtaagactgggctcctccagcccccacgcaagacaaaaccyagtatcagagtccacgtccctggggatgctggggacccctgtcctccttatccctagcccatgctgatgacatctcagaataccccatcccacctagctg

SEQ ID NO: 51975 - DNA, 201 bp, Homo sapiens
cgcccaccttggcctcccaaagtgctgagattacaggcatgagccatcatgcctggctgggaagtaaagattaaaaggaataatatgtatacagggctctyatgggtgccagacacagggcgtgctcatgtcatccagcatccgtgctcatgtcacacagggcatgttatatcatccggcaacagctggaatctgattctt

SEQ ID NO: 51976 - DNA, 201 bp, Homo sapiens
cttaaaaaaggaggtgtgtgccagggagctgggtaggagcctggctatatatctgcccagcagcggtactctcgggacagagatggcactgatgcaggaastgtatagcacaccagcctccaggctggactccttcgtggctcagtggctgcagccccaccgggagtggaaggaagaggtgctagacgctgtgcggaccgt

SEQ ID NO: 51977 - DNA, 201 bp, Homo sapiens
cccctttttgtggagaacagggtctccctatgttgcccaggcaggtctccaattcctgggctcaagctatacctttgtttccctaagtgcttggcttgcargcacgagcccccgttctgtaagcccagtacttagggaggcaaaggcatagcttttttttttttagacaaaatctcgctctgttgcccaggctggagtgca

SEQ ID NO: 51978 - DNA, 201 bp, Homo sapiens
ggctctaagcatttcataattagcttctgttgctgctgctgctgttattttggataggagctctttgtttcaccactattcctagtgcttagcacagtagkgagacataggatgtctcctatgtctcactaacagtaataatcataacagcttcttatactgctagtggtgtggtctgaatgtatgtctccaaaaattgat

SEQ ID NO: 51979 - DNA, 201 bp, Homo sapiens
caaaaattgatatgttgaaacctaatcactagagtgatggaatgaggaggtgaatcgtctccgagatgattagctcatgagggaggaaccctcatgaatgrgattagtgctcttacaaaagaggccccagaaagctgccttgccccttccaccatgtgagggcacagctagaaggtgtcatgtatgaaccagaaagtgggt

SEQ ID NO: 51980 - DNA, 201 bp, Homo sapiens
taataataatatatgtacaatagatttgaccatcttccaccattagcatagcctgctttcaggtggaaagggatggcgttagtatttaaagggaatggccracagatattggattcatcagcaccagagattggtgctgtgttgccacttcctgcagctcataccacctgtgtaagtgttgttgtaggtctttgggccact

SEQ ID NO: 51981 - DNA, 201 bp, Homo sapiens
cctcacaagtagtaagtggtagagctgggatccaaacccagatttatttgatgctagagtcttaattccatctgccttaaacttaattgttgctatcctgytactcctacccataaataatatcagtaacagaggtaaagtaattttacatttgtttaatgttggagagagagttataaaataatatatataccttcccca

SEQ ID NO: 51982 - DNA, 201 bp, Homo sapiens
ttttagttttaaaataatcattagtgtcaactattttttttccataaaacaccaagttaactttactttctgttctatagaaatctgattatcaagctgaragaatacattaactttttttgagacaaggggttgttctgttgcccaggctgggagtggcacaatcacagctcagtgcagcctcaacctcctgggctcaaa

SEQ ID NO: 51983 - DNA, 201 bp, Homo sapiens
ggaggcagaggatgcagtaagctgagatctcaccactgcaaaccaacctgggcaacagagtgagactctgtgtcaaaaaacaaacaacaacgacgaaagartagacacataaaatatatatctggacttgctaaacagatgtaagaactttaaagttctacataggccatgcacgatggctcatatctatcaacactttga

SEQ ID NO: 51984 - DNA, 201 bp, Homo sapiens
caatagcatccttcagtcattgacatccagcccttcccctcacatcacagaaccaccccctattcggcagtgccatccaccctaccctcatctttcagaawtgctgatctcaagtgagacagagccttacaacataattacagtacagtaagattttgtcaatagaggtcttagctaagtattatcatacttacagatacc

SEQ ID NO: 51985 - DNA, 201 bp, Homo sapiens
aagccagtgacatacagaataagagagaataacagattactctggccgttaggagactgagagggtcttccacttaggaagcttttgcagttgttcgaccrtaagatgatggaggctttgacaagtgtggtggtgaagataataatgggtagacaaatgtaagaactattgaagagattgacagacttactaatgtaatag

SEQ ID NO: 51986 - DNA, 201 bp, Homo sapiens
agccgagattgcaccattgcactccaacctgggcaacaagagtgaaactccatcttaaaaaaaaaagaaggagaagaagaagaaaaagacaaaaatgagtsgggcatggtggtgtgtgcctgtaatagctcccctagagcctgaggcaggagaatcacttgaacccaggaggcggaggttgcagtgagctgagatcgtgtc

SEQ ID NO: 51987 - DNA, 201 bp, Homo sapiens
gtgggagacataggctccacttctaaatcctggcctgggtgctgaggccagaggccggaagccgggaacggaatccacccatcgctcctgggtcctgccawagggtagggtagctgctggggcagttcccttaagcctgccaggcccccgaggatgcaggggaagaaagaacctatcattgctgccaaacttcagagtgcc

SEQ ID NO: 51988 - DNA, 201 bp, Homo sapiens
gatgtcagggagtatggcttggtaactgttcccgtagtccacatgaggtgtagagggcctgaagtaaatcagccagcctggagaaggagatcgcatatcartatgttgcacaagaggcataagtggaacttggccactgattctttttctgtccctaactttgcctaacacagtgacctgtgtaagatgtgttgttttggt

SEQ ID NO: 51989 - DNA, 201 bp, Homo sapiens
ttggcacttgctgagccttccgtttggaagtgcctttccctggtcatcctcactttctttatgccaccctgaccagcctcaccaccagaaccccaccctccctcaccatgctgcctcttctccatgcctcttcataccctctgatacactgtggatttgattattgatttcttttttttttttttttgagacagagtctcc

SEQ ID NO: 51990 - DNA, 201 bp, Homo sapiens
cttggcacttgctgagccttccgtttggaagtgcctttccctggtcatcctcactttctttatgccaccctgaccagcctcaccaccagaaccccaccctccctcaccatgctgcctcttctccatgcctcttcataccctctgatacactgtggatttgattattgatttcttttttttttttttttgagacagagtctc

SEQ ID NO: 51991 - DNA, 201 bp, Homo sapiens
ccttggcacttgctgagccttccgtttggaagtgcctttccctggtcatcctcactttctttatgccaccctgaccagcctcaccaccagaaccccaccctccctcaccatgctgcctcttctccatgcctcttcataccctctgatacactgtggatttgattattgatttcttttttttttttttttgagacagagtct

SEQ ID NO: 51992 - DNA, 201 bp, Homo sapiens
caggcacgtgccaccatgcctggctaatttttgtatttttggtagagacagggtttcaccatactggccaggctggtctcgaactcctgacctcaagtgayccacctgcgttggcctcccaaagtgctgggattacaggcgtgagccaccatgccctgcctgagatggagcttttaggacttaggaatgagaaaaaaatag

SEQ ID NO: 51993 - DNA, 201 bp, Homo sapiens
ctggtgtgtagtggaacgatcttggcctactgttacctcaacctcctgggttcaagcagttctcatgccccacctcccaagtagctgggactacaggcacrtgccaccatgcctggctaatttttgtatttttggtagagacagggtttcaccatactggccaggctggtctcgaactcctgacctcaagtgatccacctg

SEQ ID NO: 51994 - DNA, 201 bp, Homo sapiens
aaggctgagggaggagaatgacgtgaacccaggaggcggagcttgcagtgagtggagatcatgccactgcactccagcctgggcgacagagcaagactccrtctcaaaaaaaaaaaaaaaaaaatactgtgtgaagatgttaattgctgcattcttttagatgggaaaaacagaaagcctaagtaggcagcacagtaggca

SEQ ID NO: 51995 - DNA, 201 bp, Homo sapiens
gaggttacagtgagccaagattgcactactgcacgccagcctgggcaacagagtgagactccatctcaaaaaaaaaaaaaaaatagctgggcgtggtggcrtgcgcttgtagtcctagctacccaggaggctgaggcaggagaatcgcttgaacccagcaggcggaggttgcagtgagctgagatcacgccactgcactcc

SEQ ID NO: 51996 - DNA, 201 bp, Homo sapiens
gaggctgaggcaggagaatggcgtgaacccgggaggtggagcttgcagtgagccgagatcatgccactgcactccagcctgggcgacagagcgagactccrtctcaaaaataataataataataataaagctccccaaggccagaccttattcagtaaataagaaggctttctaagagaaattcatagatgtagcttgaat

SEQ ID NO: 51997 - DNA, 201 bp, Homo sapiens
atgtcactccctcctcaagcctacctggaggtgcttccttcccaggtggggccctttttgccctacgatagtgatcatagtttggaccaggtgaacctccygtgtgattttttccacctgtctcagagggttcggtgtagcatctttcccactggtttttcagaaaatcagacccgataatgagctcttcgaagtccggga

SEQ ID NO: 51998 - DNA, 201 bp, Homo sapiens
tagtagactcaggactcagggaatgcagtcagctgcgtgggcccctgtgctctctaggaagctgggagacaaatgttataaagaaactcttaccccatagkatgcccttttctgatttttcaactataattacctggaaagtggtccatgtccacgggcctagtgggctctaattctgtgaggtgacctatcattgcccac

SEQ ID NO: 51999 - DNA, 201 bp, Homo sapiens
tgcatccttggagaagagactagaacagaacttatcaggagaagaacacgtgcaagaactcctgaaagaggtaacttctgttctctttgggctggctggtrttggaaaggcagggttgattctggtgacttcacaattcctagagtttcagagctgtagggccagcaaacagcatggtaacaaaagaagtgtctccaactt

SEQ ID NO: 52000 - DNA, 201 bp, Homo sapiens
ttggcttgtcctgcttacatcagaaagagccttatgtcccctgtgggtgacatgcttttctcagggaaagggagagctgtattcagagatacatacaaacrgatagcatctcatcaccaataaaccacacctagtgatttccgccacttgggctgccttgtctttctgcactgccctcttccccaccattttgtactctgc

SEQ ID NO: 52001 - DNA, 201 bp, Homo sapiens
aagatgtggtcaggatgtttcttcccccacctttctccatgtgggctctcttcagcttagttgcatcccatggccaaagtcacagcttcagttggaccttyggtttgccttcttgacatagtttttgtctctctgggtttcctataacctcttcatctttttgcctctttatggccaactgttgccagcacattatctttt

SEQ ID NO: 52002 - DNA, 201 bp, Homo sapiens
ggcctacccagcatcagtctctcttccttcactctctgacacagtctcccacgctcactgccaaactgatcctcctaatcagcactggtgaccatatcackctcttaaacatcttctacaattcccttcaacagtctacaggaagtgtaatgtgggttctagggaataaattgatttctagaatcagaatgtccatgcttg

SEQ ID NO: 52003 - DNA, 201 bp, Homo sapiens
atgtttaatgtgcatagaaattacttgggaagtttgtttaaagtatatatctctaggccaggcgtggtggctcacgcctgtaatcccagcactttgggtakccgaggcgggcagatcacctgaggtcaggagttcaagaccagcctggccaacatggcaaaaccccgcctctattaaaaatacaaaaattaggccaggcgc

SEQ ID NO: 52004 - DNA, 201 bp, Homo sapiens
atgccactgcactcctgcctggtgacagagcgagactctgtctcaaaaaaataaataaataaataaattagctgggcatggtggcgggtgcctgtaattcyagctactcaggaggctgaagcaagagaatcacttgaacccaggaggcggaggttgcagtgagccaagatcgcaccactactttccagcctgagcgacaag

SEQ ID NO: 52005 - DNA, 201 bp, Homo sapiens
agcgagactctgtctcaaaaaaataaataaataaataaattagctgggcatggtggcgggtgcctgtaattctagctactcaggaggctgaagcaagagartcacttgaacccaggaggcggaggttgcagtgagccaagatcgcaccactactttccagcctgagcgacaagagtgaaattccatctcaaaaataataaa

SEQ ID NO: 52006 - DNA, 201 bp, Homo sapiens
tagccgttggtcatccccctgcctgggaggctccctgaaccctaacgactttgtgagttctaaagctgcctacctgccctgtggcagggagtatctcccaycctgtgcttcttcctctttgtggacacttactgtactctattgtgtaattttttattagtcttttgttccagcctcaaggtcaagggactatttcaaatt

SEQ ID NO: 52007 - DNA, 201 bp, Homo sapiens
ataaaacctaaagagactaagtactataggagaagattgttcccagcaagcctgcacctggctctcctcctccagcatgcatgagcgttcctatatatgcmtttctgacttttccagcattggcatttccaagcctttacaatttttgccagtttactgagtgtggagtggtatttcattgctttaatttgcattgctatg

SEQ ID NO: 52008 - DNA, 201 bp, Homo sapiens
aatctctaattcacttacaaactgtctttctgtatggtcttaggtagggatctaaatatggagaaattctgcatatttctcaaaatcatttactaaacagyctgtcctttctgaattgattcctcttgctaactttatcacgtattgtttccgtctgcacatgggtttgtctctgcattctctgtccattggtctgattgt

SEQ ID NO: 52009 - DNA, 201 bp, Homo sapiens
tgtttgtccttttgtgtctggcttatttgacttagtatatacatcttcagtgttcatctatgttgtagcatatgtcagactttcattccttttttttttttaacagaattttttttttttttagaatttttttgagatggagtcttgctccgtcatcaggctggagtgcagtggcacgatctcggctcactgcaacctccg

SEQ ID NO: 52010 - DNA, 201 bp, Homo sapiens
acaacctccgcctcccaggcacaagcgattctcctgcctcaacctcccaaagagctggaattatgggtgtgtaccaccacacccggctcatttttttttttgtatttttttaatttattttattttatttatttttttttttttgagacagagtctggctctgtagcctgggttggcgtccagtggtgcaatcttggctca

SEQ ID NO: 52011 - DNA, 201 bp, Homo sapiens
cctgacctcaagtgatccacccatctcagcctcccaaagtactgggaatacagcaccatatatttatttatttatttatttttattttattttattattawttttttgagatggactcccgctgtatcacccaagctgtagtgtagtgtcctgatctcagcctaccacaacctccgcctcccaggcacaagcgattctcct

SEQ ID NO: 52012 - DNA, 201 bp, Homo sapiens
cttaggtgatccgcctgccttggcctcccaaagtgctaggattataggcatgacccactgcgccaggcccttatttatttatttatttatttatttatttatttatttatttattttttggagacacagtctcactctatcccccaggctagagtgcaatagtgccatctcggctccctgcaacctccgcctcccaggttg

SEQ ID NO: 52013 - DNA, 201 bp, Homo sapiens
cgcctgccttggcctcccaaagtgctgggtttataggcgtgagccaccgcgcccggcctgtgatggtatcttatttttaatctttctttttttttgagatrgagtctcactctgtcgcccaggctggagtgcagtggcactatcttggctcactgcagcctctgcctcctgggttccagcgattctcctgcctcagcctcc

SEQ ID NO: 52014 - DNA, 201 bp, Homo sapiens
acttaacacaatattttcatggaattcaccttacttttttttttttacttaaataagtatatttatgtatttatttatttatttatttatttatttatttagagatacagtcttgctctgttgcccaggctggagtgcagtggtgtgatcttggctcactgcagcctccacctcccaggttcaagtgattctcctgcctca

SEQ ID NO: 52015 - DNA, 201 bp, Homo sapiens
tacttaacacaatattttcatggaattcaccttacttttttttttttacttaaataagtatatttatgtatttatttatttatttatttatttatttatttagagatacagtcttgctctgttgcccaggctggagtgcagtggtgtgatcttggctcactgcagcctccacctcccaggttcaagtgattctcctgcctc

SEQ ID NO: 52016 - DNA, 201 bp, Homo sapiens
gtacttaacacaatattttcatggaattcaccttacttttttttttttacttaaataagtatatttatgtatttatttatttatttatttatttatttatttagagatacagtcttgctctgttgcccaggctggagtgcagtggtgtgatcttggctcactgcagcctccacctcccaggttcaagtgattctcctgcct

SEQ ID NO: 52017 - DNA, 201 bp, Homo sapiens
tgtacttaacacaatattttcatggaattcaccttacttttttttttttacttaaataagtatatttatgtatttatttatttatttatttatttatttatttagagatacagtcttgctctgttgcccaggctggagtgcagtggtgtgatcttggctcactgcagcctccacctcccaggttcaagtgattctcctgcc

SEQ ID NO: 52018 - DNA, 201 bp, Homo sapiens
ctcaattatatagtaatatagtagggacataccaaaattttaatttttgtcgatggtgggttttttttttgttttcgtttttttttttttttttttttttktgggtgtcagggtctcactctgtcacccaggctggagtgcaatggtgcaatcatggctcactgcagcctcaaattcctgggtgtaagtgatcctcctact

SEQ ID NO: 52019 - DNA, 201 bp, Homo sapiens
tctccaggcctttgcagatgctccaaactcattccgaacttcggcaacggtacctggacctgcccatagatacagttcttgtgctggatgtgagcaggccrgcagcagggggtggagggagtcaggacctaatggtcggcctgagttacctgggaggtgcaccagcagctcctttccaccttacatcccaccttctggtcc

SEQ ID NO: 52020 - DNA, 201 bp, Homo sapiens
aagggccggtgtggatgaatgagaaaatgcacctttctgacagtatctccactttacttaagaaaactagcaaatatatgaaaagacccttagtaccaaawacactcaattgcctttttaatgaatgtacttgtcttggataggttgctggtaaaccattttaaactattttttatagctgaagttcttcactactataaa

SEQ ID NO: 52021 - DNA, 201 bp, Homo sapiens
ccaaatgtctgtgctgtacttgaccaacaggccacgtatttttcaaagcattttcattgatagcgctttatcgagagccccaggtctggctcagcactcarattccaaaagcgtctgcataaatgctctaataggaaaaaatacctgcagttccactaccttgttcctgtcaactcagtgtttttctctcatttccctcct

SEQ ID NO: 52022 - DNA, 201 bp, Homo sapiens
tggcacaatctcggctcactgcaacctccacctctcgggttcaagcgattctcctgcttcagcctgccgagtagctgggattacaggtgtccagcatcacrcccagctaatttttttatatttttagtagagacagggtttcatcatgttggccaggctggtctcaaactcctgacctcagatgatccgcctgccttggcc

SEQ ID NO: 52023 - DNA, 201 bp, Homo sapiens
caaaacttactgtgtttcaggcttttcatcttataaaagctgtgtcagtgttgctgaacttttcccaagaggaggagaacatgctcaaggaaactctggartataaggtagggttctctggtctactgttccagcttccaagatacgttgtcagttatcccagcagtagcagtgtaagaccccttagacccacacccgagt

SEQ ID NO: 52024 - DNA, 201 bp, Homo sapiens
tcagaatgccctctggcatccggttgggttcagccagtggggaaccctgaaagaaccatgtgtgaaagaagatgtggtcaggatgtttcttcccccacctytctccatgtgggctctcttcagcttagttgcatcccatggccaaagtcacagcttcagttggacctttggtttgccttcttgacatagtttttgtctctc

SEQ ID NO: 52025 - DNA, 201 bp, Homo sapiens
actttctttatgccaccctgaccagcctcaccaccagaaccccaccctccctcaccatgctgcctcttctccatgcctcttcataccctctgatacactgyggatttgattattgatttcttttttttttttttttgagacagagtctccccctgtcacccagactggagtgcaatggcgtgatcttggctcactgcgacc

SEQ ID NO: 52026 - DNA, 201 bp, Homo sapiens
tattttctgtctctttgagtttggacactctagatacctcctgttggtggaatcatacaatgtttgtccttttgtgtctggcttatttgacttagtatatrcatcttcagtgttcatctatgttgtagcatatgtcagactttcattccttttttttttttaacagaattttttttttttttagaatttttttgagatgga

SEQ ID NO: 52027 - DNA, 201 bp, Homo sapiens
aggaggcctgatctgattctcccagttaatccctcttgcatctcatatctcatagcacggtgtgtgtccctctgttgaagcacagttgttttgtaattagktgtgtgtctgtctccaccaccagcctccatgctggaattaatgttgattgtatcctcagaaaacaacagatagagttcaggcttgatgaaagtttattga

SEQ ID NO: 52028 - DNA, 201 bp, Homo sapiens
gctgttagcagattccttcagcacccccttcacacatttcccagaatccaccacttcacatcgctgccacctgcttcaggttaccattgtctcttctctgraagatggtatcagacttctaactggtttccctggcactcttgtcttagccctctgatgaaagcctgtctctgttgatctcttatgaaagcctgagtcctt

SEQ ID NO: 52029 - DNA, 201 bp, Homo sapiens
tgctgaaactcaagagaaagaagacgttatcacacatttgcaagagaaggttgcatccttggagaagagactagaacagaacttatcaggagaagaacacktgcaagaactcctgaaagaggtaacttctgttctctttgggctggctggtgttggaaaggcagggttgattctggtgacttcacaattcctagagtttca

SEQ ID NO: 52030 - DNA, 201 bp, Homo sapiens
gcctagcacaagtcacaatatgttgtagataatctgtaaatatttattcaactgaggaatgatagtcttcttttactcttctttcaacttacagaaaacayttgctgagcagaatttggaggataccagacaacagctcttggcagccagaagcagccaggctaaggccattaacaccctggagactcgggtactgacctt

SEQ ID NO: 52031 - DNA, 201 bp, Homo sapiens
tgtcctggccaacatggtgaaaccccgtctctattaaaaatacaaaaattagcaaccaggtgcggtggctcatgcctgtaattgcagcactttgggaggcsgaggtgggcggatcacgaggtcagcagatcgagaccatcctggctaacatggtgaaaccctgtctgtactaaaaatacaaaacattagctgggtgtggtg

SEQ ID NO: 52032 - DNA, 201 bp, Homo sapiens
ctcaggtgagagaactggagcagaccttgcaggcctctgaggagcagctccaacagagcaagggcattgtggctgcccaggaaactcagatacaggagctsgtaagtgcttattggagctgctgcattccaggcccttaatgctttctctccaggcctttgcagatgctccaaactcattccgaacttcggcaacggtacc

SEQ ID NO: 52033 - DNA, 201 bp, Homo sapiens
gtgtcttttgggtattgaggccccgccctacagtctgtcctgcagggacccctgcccagcccctttctctcttttcctcgtacatcctggtttgacgcccytgtggtcacccagtcatttctcctgctggcgttggcctgcggagtgagcggctggcgggagaggccgtgcaggaactggctcctggtgggagacataggc

SEQ ID NO: 52034 - DNA, 201 bp, Homo sapiens
tctgctgggcttcttgcgtggcatacagctaaaaaactgtgaactaagttttggggctcagtggttttctgcattgtaggaagaatggagccaaagagaarttgtgagcgtggccatggctcaagccctggaggaggtgcggaagcaaagggaagagttccagcaacaggtgggccctgtttcacgctgaggggcgatgtc

SEQ ID NO: 52035 - DNA, 201 bp, Homo sapiens
atcacttgaacccaggaggcggaggttgcagtgagctgagatcgtgtcattgcactccagcctgggcaacagagtgagactccatctcaaaaaaaaaaaaattattttccaaattatttatctaaaactggatgttgatgagttgtgcagaaaaaccatgatctttttagggtgttcaaaataagcattgcagattattaa

SEQ ID NO: 52036 - DNA, 201 bp, Homo sapiens
aacttcggcaacggtacctggacctgcccatagatacagttcttgtgctggatgtgagcaggccagcagcagggggtggagggagtcaggacctaatggtsggcctgagttacctgggaggtgcaccagcagctcctttccaccttacatcccaccttctggtccagcctggtcctggggctgtcagaggtggcagctccg

SEQ ID NO: 52037 - DNA, 201 bp, Homo sapiens
ttcctccaccactccacagaaaaacactcttgtcaagctcatcagtaacatctgcactgctaaatccagaaggcagttcctaattttccctctgattggcctgttggcagccttggacaggcgtctcttcctcctcctgaagctcccatccatggcctgctccttctccgtctcctctgacaggccagtctccttcccact

SEQ ID NO: 52038 - DNA, 201 bp, Homo sapiens
ttctcaattatatagtaatatagtagggacataccaaaattttaatttttgtcgatggtgggttttttttttgttttcgtttttttttttttttttttttktttgggtgtcagggtctcactctgtcacccaggctggagtgcaatggtgcaatcatggctcactgcagcctcaaattcctgggtgtaagtgatcctccta

SEQ ID NO: 52039 - DNA, 201 bp, Homo sapiens
ttatagctgtacaagagcctgtacatctgattcttcttactctgaggtacctttttgttaatgtttggtttgtaaatgttaaggtactctattttttttccttatttttctgtgagttcctctccatattctctccagtgtcctcttgtactgtttttccgtctatataccttatacatcttcttttgcatttcatttctg

SEQ ID NO: 52040 - DNA, 201 bp, Homo sapiens
aatcatagaagtaattcatttggaggatataattactcgattttctagtggtgtgaaatactttttaacaattgtgcttgtctgtaactgaaatgttataraattttaacactatagggattatagagttatattagctctcctcaagagactgaagcacaatatttttcatgtaacaattcttatccaagtgctgctaat

SEQ ID NO: 52041 - DNA, 201 bp, Homo sapiens
gggttctagggaataaattgatttctagaatcagaatgtccatgcttgcattttgcctcttctgcttaccagctttgacttggagcagcagttcccaaccsttttggcaccagggactggtttcgtggaagacagtttttccacagatggggtcaggttgggtcgggtgagggggtggtttcagaataaaactgttccacc

SEQ ID NO: 52042 - DNA, 201 bp, Homo sapiens
agactccgtctcaataaataaataaatagataaataaataaagtagggcactcatatggctaggaggccatgagtcctgaagagcccatcacagatggcasccctgtcggtaggcaggggagagcaagccccttcatcccagcaaagactagtcgtgtgattagttgtgggcattgggcattggatcttctccaggaattg

SEQ ID NO: 52043 - DNA, 201 bp, Homo sapiens
tgagttatatgtttatttatacccttttatccccattggcctccctcccataggataccattccgttgtggttcatatagatgctctttttgttgggttgycttaaaatatgtagcactgggtttttaatttctgtaaatgatgcagctatgggtatgttttctctattacttttagctgcctcaacttctgtctgtaccc

SEQ ID NO: 52044 - DNA, 201 bp, Homo sapiens
tttcatggtttatagctgtacaagagcctgtacatctgattcttcttactctgaggtacctttttgttaatgtttggtttgtaaatgttaaggtactctattttttttccttatttttctgtgagttcctctccatattctctccagtgtcctcttgtactgtttttccgtctatataccttatacatcttcttttgcatt

SEQ ID NO: 52045 - DNA, 201 bp, Homo sapiens
ggcagcagtggggacacatggtggacacgacgctcccctgcatgtagggtcctttctttgaagtagggcacttggccaggcgcagtggctcacgcctgtawtcccagcactttgggaggccgaggcgggtggatcacgagttcaggagatcgagaccatcctggctaacacggtgaaacccagtctctactaaaaatacaa

SEQ ID NO: 52046 - DNA, 201 bp, Homo sapiens
gagttatatgtttatttatacccttttatccccattggcctccctcccataggataccattccgttgtggttcatatagatgctctttttgttgggttgcyttaaaatatgtagcactgggtttttaatttctgtaaatgatgcagctatgggtatgttttctctattacttttagctgcctcaacttctgtctgtaccca

SEQ ID NO: 52047 - DNA, 201 bp, Homo sapiens
cccaggaggtggaggttgcggtgagccgagatagtgccattgcattccagcttaggcaacaagagcgaaactccatctcaaaaaaaaaaaaaaaaaaaaaraaaaaaagaaagaaagaaaataaactcattggaggtaattttatcaaactcaaaaccacacagcgtctctagaaaatgttcaaggatatcagatacttat

SEQ ID NO: 52048 - DNA, 201 bp, Homo sapiens
atggctcaagccctggaggaggtgcggaagcaaagggaagagttccagcaacaggtgggccctgtttcacgctgaggggcgatgtccccctgcagtcccayaggcagcaggcccatcctgccgtgagactgttggagagggcctgtctctccagggtagggtagtagactcaggactcagggaatgcagtcagctgcgtgg

SEQ ID NO: 52049 - DNA, 201 bp, Homo sapiens
aaatacaaaaaaaaaaaaaaaaaaaaaaaaattagccaggcatggtggtgtgcgcctgtaatcccagctacttgggaggctgaggcaggagaactgcttgtaacctgggaggcggaggttgcagtgagccgagatcgtgccattgcactccagtctgggtgacagagcaagactcattctcaaaaaaaaaaaaaaaaggaa

SEQ ID NO: 52050 - DNA, 201 bp, Homo sapiens
tcatcgcagaggcagccgtgcatgggtggcctggtggcttctgcaagctgcaggccctgctttgtgccacagtgaacctgagcaggcactgtcaaccccasctcccacagtgctggatcttacgtggctctgaggcgctagggcagactttggagccacagagactcagttctgtcttgtcagcctagcccctcactagct

SEQ ID NO: 52051 - DNA, 201 bp, Homo sapiens
caccagcagctcctttccaccttacatcccaccttctggtccagcctggtcctggggctgtcagaggtggcagctccgctaggagtcaagcctcaacttgmaatcaggggcggggagaacaagtccagactctggggaggatggcctgtgatgacaggccaagcgtggtgtggagttagaagatagggaaatcaaaccagc

SEQ ID NO: 52052 - DNA, 201 bp, Homo sapiens
ctaaatatggagaaattctgcatatttctcaaaatcatttactaaacagtctgtcctttctgaattgattcctcttgctaactttatcacgtattgtttcygtctgcacatgggtttgtctctgcattctctgtccattggtctgattgtctgctcttgtgtaaacactacaatgtttttattactatagtgatatctgta

SEQ ID NO: 52053 - DNA, 201 bp, Homo sapiens
gccactgtggccggcctaaaaaaaattctttttaatagttatcagactactttaaccagtgccatgtttaaacatacttggacaatagactcagtttttttaatagtttgaagtacattatattaaaactacaaactcacttattcaagcctaaatttcatcatagactataaattgggtatcaatttcctattttggtgg

SEQ ID NO: 52054 - DNA, 201 bp, Homo sapiens
actgtcatcctcatcctgtagacgaggcaagctcagaaagattggctcagtagcccacaggctcgcagccagtaaatggcagaatccacatctttctcctstcaaagccctgttcttcattgctgtattatactgcctccccagtataatttctccccagggaaagccgcagccactgaggcaacactgagtagtgtgaag

SEQ ID NO: 52055 - DNA, 201 bp, Homo sapiens
ataatattccattatatgtatagaccacattttgtttctccattcattcattgatgaacacttgaattccatttgtcttttttttttttttttttttttgktctttttctcccctttttgtggagaacagggtctccctatgttgcccaggcaggtctccaattcctgggctcaagctatacctttgtttccctaagtgct

SEQ ID NO: 52056 - DNA, 201 bp, Homo sapiens
caggagagcagccatgtgcagcagcaggcccttgctctggagcagcagttcttggagcgcacccaggcgctagaagcccagatagtggccctggagagaaygcgggcagctgaccagaccaccgcagagcaagggatggtgagtgaagagctaagagagggtgggcccaggagcaccagggtcccccacagcgaagtcagc

SEQ ID NO: 52057 - DNA, 201 bp, Homo sapiens
ggatgcctctttcattccctaaacataactggataaaaaggaggaaagattctgtcactttcttatatgcccccagactcccgtggcccctttcaaagcamcttggataatgggacattgtagtacttgcccagcttggtcatgactcaaagatcttattgatcccttggcagcagtcttctctgagagtgtccatagatg

SEQ ID NO: 52058 - DNA, 201 bp, Homo sapiens
gcagggttgattctggtgacttcacaattcctagagtttcagagctgtagggccagcaaacagcatggtaacaaaagaagtgtctccaactttggcttgtyctgcttacatcagaaagagccttatgtcccctgtgggtgacatgcttttctcagggaaagggagagctgtattcagagatacatacaaacggatagcatc

SEQ ID NO: 52059 - DNA, 201 bp, Homo sapiens
caccgcagagcaagggatggtgagtgaagagctaagagagggtgggcccaggagcaccagggtcccccacagcgaagtcagcctcgtgcttgacagtgtgkcaccgcctctgcactaggaaaccactttagaaggcagctttttttttgtttgagacagggtctcactctgtcacccaggctggagcacagtggcatgatt

SEQ ID NO: 52060 - DNA, 201 bp, Homo sapiens
cagagcaagggatggtgagtgaagagctaagagagggtgggcccaggagcaccagggtcccccacagcgaagtcagcctcgtgcttgacagtgtggcaccrcctctgcactaggaaaccactttagaaggcagctttttttttgtttgagacagggtctcactctgtcacccaggctggagcacagtggcatgattacaac

SEQ ID NO: 52061 - DNA, 201 bp, Homo sapiens
atggcagggaggggccaggctgggagcctgggaagtggggagcatgttggtctggctctgcaaagccatgccctgtctgctgggcttcttgcgtggcatayagctaaaaaactgtgaactaagttttggggctcagtggttttctgcattgtaggaagaatggagccaaagagaaattgtgagcgtggccatggctcaagc

SEQ ID NO: 52062 - DNA, 201 bp, Homo sapiens
agccaatggggaggtgggagaggagaggtctcttttccatatggagttagggaaggctttgatgctggcagaagggcctacaatgtgaatatttgaggagraatattctagactgaagaaataacaaatacaaaggctctgaggcaggaaaaagcctagtctgttcaaagaatagcacagaggccagtgtggctgcagcta

SEQ ID NO: 52063 - DNA, 201 bp, Homo sapiens
ggcagtgggaggcgactgcccctgtgcagggcccctaccaaggagaatagatttgtgcatgttcataggagcagagcttagctgggggtttgctctgggtmgtggacttcagggagggattcgtggtgtaccctggagagcggggaagtggagatttctgtgggaagatggagtcactgctcacaaccttccctcttgttg

SEQ ID NO: 52064 - DNA, 201 bp, Homo sapiens
tttcaaagtaggatttcctttttcaactgttccaggaaagaatctctaagactgggtagctcacagccagccaaaggcagctacatttccacagaagcccrtccgctgcctccgtggcttctccagccattgaactggtcccacacgcaccccaggccccactcctcggcagtttcaggtgtagctgtggggcccgttcct

SEQ ID NO: 52065 - DNA, 201 bp, Homo sapiens
tgcaggccgagctggaggccctgaggaccctcaaggcggaggaggctgcagtggtcgcggagcaggaggacctgctgaggctgcggggcccattgcaggcygaagcactctcagtcaatgagtcgcacgtaagtcccagctgcacctgcatgggtgctacagcaagatgcagggcaggtgccgagagtgcccctaaggagg

SEQ ID NO: 52066 - DNA, 201 bp, Homo sapiens
ggagcttgcagtgtgcaagatcgtaccactgcactccagcctggatgacagagcaagaacctatttcaaacacacacacacacacacacacacacacacamaaaactttaaattaggaaaccatcaatcagcatagctcataggcaaaattacagccaaatggctatcaatgagtgcagatagaaaagaggccaaaatgaa

SEQ ID NO: 52067 - DNA, 201 bp, Homo sapiens
gttctttgttgtgggtggttctctgttgtggatggttctttgttgtgggtggttctctgttgtgaatggttctttgttgtggatgggtctctgttgtggakggttctctgttgtggatgggtctctgttgtggatgggtctctgttgtggagggtctctgttgtggatggttctctgttttggatgggtctctgttgtgga

SEQ ID NO: 52068 - DNA, 201 bp, Homo sapiens
tgaaagagtgtaggagatgtttaatatacacttaaatacattcactgcagaaattaagtagaggttatttttgcatgataaaatataactgcaaagcaacwttttacaccgtattctttggaagattaaatctatctgatccaatattatcttaaaatagagaaattatctcaggagtctgttttaccacccaaaaaaatg

SEQ ID NO: 52069 - DNA, 201 bp, Homo sapiens
tttatagctgtacaagagcctgtacatctgattcttcttactctgaggtacctttttgttaatgtttggtttgtaaatgttaaggtactctattttttttscttatttttctgtgagttcctctccatattctctccagtgtcctcttgtactgtttttccgtctatataccttatacatcttcttttgcatttcatttct

SEQ ID NO: 52070 - DNA, 201 bp, Homo sapiens
acttgaacccaggaggtggaggttacagtgagccaagattgcactactgcacgccagcctgggcaacagagtgagactccatctcaaaaaaaaaaaaaaaatagctgggcgtggtggcgtgcgcttgtagtcctagctacccaggaggctgaggcaggagaatcgcttgaacccagcaggcggaggttgcagtgagctgag

SEQ ID NO: 52071 - DNA, 201 bp, Homo sapiens
agggattatagagttatattagctctcctcaagagactgaagcacaatatttttcatgtaacaattcttatccaagtgctgctaatctgtcgtgcaaatartgaagctatttggttgcctatttagctattcacaaatcactgtaatctttgaaacaatcttgtcgttcatttgtattaatatttggatattgtgagttaa

SEQ ID NO: 52072 - DNA, 201 bp, Homo sapiens
aggctttgatgctggcagaagggcctacaatgtgaatatttgaggaggaatattctagactgaagaaataacaaatacaaaggctctgaggcaggaaaaarcctagtctgttcaaagaatagcacagaggccagtgtggctgcagctagtggccaggggagagcatggctggtggtgaggcgggacacaggcattaaaaag

SEQ ID NO: 52073 - DNA, 201 bp, Homo sapiens
aaatatgcatgataagatgcttaggagcatctacccactagatgtcagtagcagccccacttaggacaaccacagtgtctccagacattgccaaatgtctygtgggggcaaaagcactgctggcagagaaccactggggtaactgaatgaatagggtacgtaccattcactgagatgggggtcctgggaggtatgtcaaga

SEQ ID NO: 52074 - DNA, 201 bp, Homo sapiens
attggtcaagtataactaaagcagtgcatggaaggaaatttcagtctcagtggcatctcttaggaagaaagcctgaaaattgagccatgtatgcatctcaraaagtcagaagaaggcacaaatcaaactcaaggaagaaataacaaatataagcacagaaattaatgaaatagaaaataaaatgggcccggcgtggtggct

SEQ ID NO: 52075 - DNA, 201 bp, Homo sapiens
tttctccacctcagcgctattgacgtttgaggccggatggttctctgttgtagaggttctctgttgtggatggttctctgttgtggatggttctctgttayagagggtctctgttgtggagggtctctgttgtggatggttctctgttgtgggtgggtctctgttgtgggtgggtctctgttgtggagggttctctgttgt

SEQ ID NO: 52076 - DNA, 201 bp, Homo sapiens
tctcagtcaatgagtcgcacgtaagtcccagctgcacctgcatgggtgctacagcaagatgcagggcaggtgccgagagtgcccctaaggaggcagcagtrgggacacatggtggacacgacgctcccctgcatgtagggtcctttctttgaagtagggcacttggccaggcgcagtggctcacgcctgtattcccagcac

SEQ ID NO: 52077 - DNA, 201 bp, Homo sapiens
tgaatgtacttgtcttggataggttgctggtaaaccattttaaactattttttatagctgaagttcttcactactataaacatgtcttctgtactataaawtccatttaactggtgttcttaaaatcagagcgtccagaggaaattcttcctaaaactaggattcctgttcctttgtcttctcactcgcactctggcactg

SEQ ID NO: 52078 - DNA, 201 bp, Homo sapiens
tggctcagcttcacctgacctgtcctggctctcaatttgctgctgccaccttgtaggtgacctcgagggccatgcaggaccctgtgttccagcttccaackgcaggaagaacaccaaatggtgaggttggggccatggatctcacacagctacagaaggagaaacaggacttggagcagcaacttctggagaaaaataagg

SEQ ID NO: 52079 - DNA, 201 bp, Homo sapiens
tgcgctgccgctgggcgatgcagaccacctgtcttctactgaaggacagtccgctgtctccagtgggggcagcagctgtcccccagcctcgatggagacaytggggcagtctgccttgtctgtggagctgctctctctccctcatcccaccccaaatacttaaaatgacactacacccagacggcgcccagctggctgcag

SEQ ID NO: 52080 - DNA, 201 bp, Homo sapiens
taagaggaagagtggaataaatattctaagtgatttaatgcactttgacttgtataaaactttctgtgttagcgacggtatctatagccctttatacgagygatggatcttgagctctccttccatgttgtaaatagggattgtattcttgaaaactgctgtagcaaattcatctgtggtgcaatacactttttgattaaa

SEQ ID NO: 52081 - DNA, 201 bp, Homo sapiens
gtactcgcatgggagctggccccacttcccagcactccccctgctgcctgtgcccggtcctcctgaggtccctcgccgcctgactatgctccctccacccmctaattaattgcaagggatcgctgggcaatccaacgttagctggtgggacagcctgccagcctgcatgcacctctgaagcagctccgtggctacagccct

SEQ ID NO: 52082 - DNA, 201 bp, Homo sapiens
gctccctccaccccctaattaattgcaagggatcgctgggcaatccaacgttagctggtgggacagcctgccagcctgcatgcacctctgaagcagctccrtggctacagccctgttcctgccttctctgagcctgcatcctcatctggaagtggggttgcctgccacgccagcgcagtgatgctctaacagtgtgtgtgt

SEQ ID NO: 52083 - DNA, 201 bp, Homo sapiens
tcctcctccagcatgcatgagcgttcctatatatgcctttctgacttttccagcattggcatttccaagcctttacaatttttgccagtttactgagtgtsgagtggtatttcattgctttaatttgcattgctatggtgattaatgagtttggccttgtcttcatgtgcctgttaattcctgggggtttctgcttttgga

SEQ ID NO: 52084 - DNA, 201 bp, Homo sapiens
ggctcagcactcagattccaaaagcgtctgcataaatgctctaataggaaaaaatacctgcagttccactaccttgttcctgtcaactcagtgtttttctstcatttccctcctgtactgagcacgggcctgcagactggttactggcaccatcttcttgctctgctcagagccagaggcaggatgtgtggggggcaggag

SEQ ID NO: 52085 - DNA, 201 bp, Homo sapiens
tcagatgagttagaagctttttatcccttcctctcaagaaaatattctttcaccctgtctctcaaaccacctagaactttagaggatccatctttaagggycggtgtggatgaatgagaaaatgcacctttctgacagtatctccactttacttaagaaaactagcaaatatatgaaaagacccttagtaccaaatacact

SEQ ID NO: 52086 - DNA, 201 bp, Homo sapiens
ctttgtgcccaaatgtctgtgctgtacttgaccaacaggccacgtatttttcaaagcattttcattgatagcgctttatcgagagccccaggtctggctcrgcactcagattccaaaagcgtctgcataaatgctctaataggaaaaaatacctgcagttccactaccttgttcctgtcaactcagtgtttttctctcatt

SEQ ID NO: 52087 - DNA, 201 bp, Homo sapiens
ggttgcctgccacgccagcgcagtgatgctctaacagtgtgtgtgtgtggcagagtgcttggcctgatgcgggatgcgagcagcttcaggccccagggacrtgtgttcttgccatggaaaacggaatgtctgaatttacccaaacgatgtcactccctcctcaagcctacctggaggtgcttccttcccaggtggggccct

SEQ ID NO: 52088 - DNA, 201 bp, Homo sapiens
gcgggatgcgagcagcttcaggccccagggacgtgtgttcttgccatggaaaacggaatgtctgaatttacccaaacgatgtcactccctcctcaagcctmcctggaggtgcttccttcccaggtggggccctttttgccctacgatagtgatcatagtttggaccaggtgaacctcccgtgtgattttttccacctgtct

SEQ ID NO: 52089 - DNA, 201 bp, Homo sapiens
gcctctcaggatgacttctcagggcagaggctcctcacaggtgtacaggggatcccgtgggatcttcgggtctgtttcctttggtgaaacatgcatctaaygattggctttctgtggggtggggcttgtcgcagaccataaagcagatgcagcagcggatgctggagctccggaagactctgcagaaggagctggtgagta

SEQ ID NO: 52090 - DNA, 201 bp, Homo sapiens
cttcttgctctgctcagagccagaggcaggatgtgtggggggcaggagtgacaggctcacgggaggggaggggcggttcagtttccctggcaccaagtccygatttgcatctcagaagccttttctgtttcaaatgcagatgtcatggtttgggtccaaaccagctcccaagggcagcatccggccgtctatctcaaaccc

SEQ ID NO: 52091 - DNA, 201 bp, Homo sapiens
aaagagaagcttgaaattgcattagaaaaacaccaggattgtacgtatttttttcctgcttttttcaatcttttcaaggtttagtttttgaaatgaaacartagtgtatggttaagtttgtccttcttcaaagcacaaatctttattttataagtagtgtacttcttaatcaggttgatataacatttggatgatatttat

SEQ ID NO: 52092 - DNA, 201 bp, Homo sapiens
tcgcttgaacccaggaggtggaggttgcagtgagccgagattgcaccattgcactccagcctgggcaaaaagagcgaaactccgtctcaaaaaaaaaatawatatatatatcagatcagatccagttggagccgtagaacacttaaggaagtaacactcgatacagtgctcaggctggagagaaagggatgatgggagaga

SEQ ID NO: 52093 - DNA, 201 bp, Homo sapiens
aatcgcttgaacccaggaggtggaggttgcagtgagccgagattgcaccattgcactccagcctgggcaaaaagagcgaaactccgtctcaaaaaaaaaawatatatatatatcagatcagatccagttggagccgtagaacacttaaggaagtaacactcgatacagtgctcaggctggagagaaagggatgatgggaga

SEQ ID NO: 52094 - DNA, 201 bp, Homo sapiens
acagtcgtgagccactgtgcctggcaacagttttatataaggaaagaattatagaaaagtcaagtcccaaggaaacctgtgcttgaaaaaaaaaaaaaaaatcctcaaccatatgctattaatgacagtcttcttaaatatggagatatgggttgggttaaggttttcttgctgtaaaagaaactcttaagattatggcaa

SEQ ID NO: 52095 - DNA, 201 bp, Homo sapiens; identical to SEQ ID NO: 18029

SEQ ID NO: 52096 - DNA, 201 bp, Homo sapiens
ctttttgtttgagatagagtttcgctcttgttgcccaggctggagtgcaatggcgcgatcttgactcactgcaacctacacctcccgggttcaagcgattmtcctgcctcagcctcccaagtaattgggattacaggcatgggccaccatgcccggctaattttgtatttttagtagagacgaggtttcgctatgttaggc

SEQ ID NO: 52097 - DNA, 201 bp, Homo sapiens
ggcgggctgccccggcctgggagtctggagcctagggttccgggattcctccctgcgcgaccttggacaagtcgctcctcctctctagggctcagtttccytgctgtcaaatgggagagatgttggatccttcctttctttgacagtccaaagcacgggcggggctggaggtagcctgagggagtgagatccaaactgccg

SEQ ID NO: 52098 - DNA, 201 bp, Homo sapiens
ctcaagcaattctcgtgcctcagcctcccgagtagctgggactacaggtgtgttccaccatgcctggctaattttttgtattttagtagagacaggttttyaccatgttgcccagggtggtctcaaactcctgagctcaggcgatccgcccaccttggcctcccaaagtgctgggattacaggcgtgagccaccatgccca

SEQ ID NO: 52099 - DNA, 201 bp, Homo sapiens
agtagagacagagtttcactgtgttggccaggctggtctggaactcctgacctcgtgatcctcccgcgtcggtctcccaaagtgctaggattacaggggtragccaccacacttggcaataaatttctttaaaactcatttataatgctggatatatatataaaagaatgtatgtaatatatatgtaaagtataaagcata

SEQ ID NO: 52100 - DNA, 201 bp, Homo sapiens
ctgacctcgtgatcctcccgcgtcggtctcccaaagtgctaggattacaggggtgagccaccacacttggcaataaatttctttaaaactcatttataatrctggatatatatataaaagaatgtatgtaatatatatgtaaagtataaagcataaagtaaatctatcactcatctgaagagatagaacactatcaattct

SEQ ID NO: 52101 - DNA, 201 bp, Homo sapiens
aattattttccaaattatttatctaaaactggatgttgatgagttgtgcagaaaaaccatgatctttttagggtgttcaaaataagcattgcagattattmatgtatttcaagagagcagtagtgatgagaaccgtaagtcctcgcctaagtatcctacttggggatcacagcataaaaatcgaattttgagggcaaaatc

SEQ ID NO: 52102 - DNA, 201 bp, Homo sapiens
agaaattttcacattgataaatgttctctaggaatgtgtctacattcatcaggtgtgaactcttgtacatgaattttgtaccttgaatccacatatatatwaagtgtatcatcaatataaaaataaacattatttgcttaaagtttttggtactttttcggtattgacagctgaactgttagggtttgcttcattcaaata

SEQ ID NO: 52103 - DNA, 201 bp, Homo sapiens
ataagcattgcagattattaatgtatttcaagagagcagtagtgatgagaaccgtaagtcctcgcctaagtatcctacttggggatcacagcataaaaatygaattttgagggcaaaatctatggtccagagccttttccagctgggctgtgtgtggtggaccaagcccccgggaagggataggcagcgctggggcactca

SEQ ID NO: 52104 - DNA, 201 bp, Homo sapiens
ggcaaccatgacccctctcacccaaaggccttcctcctgatcttccgttcctcctgcactgtcctcctccacaccctccccagccctcttctccccacccsctggagaactggacaagtgtcaggcttgggcagctgcaagcctgcatgttccctgccagctctgctgtccccagccaggccatagcgacagtcctctttc

SEQ ID NO: 52105 - DNA, 201 bp, Homo sapiens
cattcacgtggcctgcgagtctgacttcttgttcttggctactgtccttagaccagctcttcaggataggcccctagccttggtgtgggtcctggcggggrtgctcgtggggcaatcgatcctcagtggtgtgccatttccagagaagtcggtgggttgcctgccaggatagctctgagagggatactgagggcatggcag

SEQ ID NO: 52106 - DNA, 201 bp, Homo sapiens
tgggtggcctggtggcttctgcaagctgcaggccctgctttgtgccacagtgaacctgagcaggcactgtcaaccccagctcccacagtgctggatcttasgtggctctgaggcgctagggcagactttggagccacagagactcagttctgtcttgtcagcctagcccctcactagctgatgcttgaaggaatccatttt

SEQ ID NO: 52107 - DNA, 201 bp, Homo sapiens
cagatactcttcactggaaaccatacttttttattgttttgttttaggaatggtcagaaaagatggatcagcttgaaaaggttagttcatctttatttttrtctcatttttgttggtctcgtctctggggtatggaaaacgttttatccggtaaccaacatactgattgctataccacctcttggaagcaggacagtttat

SEQ ID NO: 52108 - DNA, 201 bp, Homo sapiens
atgagggaaatgtcatgcttaaaaaataaagtgtggcttttgcatatgacaggatcctcttaagttagataaatttcttttctcttcttttttttttttttgagacagagtctcactctgtcagccaggccggagtgcagtggcatgatctcagctcattgcatcctccacctcccgggttcaagcagttctcctgcctca

SEQ ID NO: 52109 - DNA, 201 bp, Homo sapiens
gtttatagctgtacaagagcctgtacatctgattcttcttactctgaggtacctttttgttaatgtttggtttgtaaatgttaaggtactctatttttttkccttatttttctgtgagttcctctccatattctctccagtgtcctcttgtactgtttttccgtctatataccttatacatcttcttttgcatttcatttc

SEQ ID NO: 52110 - DNA, 201 bp, Homo sapiens
tgtctctaaagacaaaaattttaaaaaagaaaagattttcactttcgtaatacagatttctaatgctttcgttgcctgagttgatgtcttcttctttcaartaggagaaaaatattctgacagcccagttacaggaaatgaagaaccagagtatgaatcttttccaaaggagagatgaaatggatgaattagaggggttcc

SEQ ID NO: 52111 - DNA, 201 bp, Homo sapiens
ttcatggtttatagctgtacaagagcctgtacatctgattcttcttactctgaggtacctttttgttaatgtttggtttgtaaatgttaaggtactctatwttttttccttatttttctgtgagttcctctccatattctctccagtgtcctcttgtactgtttttccgtctatataccttatacatcttcttttgcattt

SEQ ID NO: 52112 - DNA, 201 bp, Homo sapiens
cagcttttaaaaaaagaagaaagtctagggaaaatggaacaagaattggaggcacgaaccagagaacttagtcgtacccaggaggagttgatgaactccartcagatgtcatcagacttaagccagaagctagaagaattgcagagacactactcaacgctggaagagcagaggttcttgcttggtctgtggggcccttgg

SEQ ID NO: 52113 - DNA, 201 bp, Homo sapiens
gttcttctaaagaaccagattgccatttatgaactcctttttaaggagggagtcatggtggccaagaaggatgtccacatgcctaagcacccagagctggmagacaagaacgtgcccaaccttcatgtcatgaaggccatgcagtctctcaagtctcaaggctacatgaaggaacagtttgcctggagacatttctactgg

SEQ ID NO: 52114 - DNA, 201 bp, Homo sapiens
ctggagggtgagtgacctgcgagactcacaagaggggaagctgacagacatacctacagatggagtgctgacagacatacctacagatggagtgctgtgccacttagtgccgacaagaaagctgaggctggggctgggtcagcagccaaattccagttgagacggatttggtcgtggacgtggtcagccacctcagtaaaa

SEQ ID NO: 52115 - DNA, 201 bp, Homo sapiens
gtctggagggtgagtgacctgcgagactcacaagaggggaagctgacagacatacctacagatggagtgctgacagacatacctacagatggagtgctgtgccacttagtgccgacaagaaagctgaggctggggctgggtcagcagccaaattccagttgagacggatttggtcgtggacgtggtcagccacctcagtaa

SEQ ID NO: 52116 - DNA, 201 bp, Homo sapiens
ggtctggagggtgagtgacctgcgagactcacaagaggggaagctgacagacatacctacagatggagtgctgacagacatacctacagatggagtgctgtgccacttagtgccgacaagaaagctgaggctggggctgggtcagcagccaaattccagttgagacggatttggtcgtggacgtggtcagccacctcagta

SEQ ID NO: 52117 - DNA, 201 bp, Homo sapiens
aggtctggagggtgagtgacctgcgagactcacaagaggggaagctgacagacatacctacagatggagtgctgacagacatacctacagatggagtgctgtgccacttagtgccgacaagaaagctgaggctggggctgggtcagcagccaaattccagttgagacggatttggtcgtggacgtggtcagccacctcagt

SEQ ID NO: 52118 - DNA, 201 bp, Homo sapiens
aaggtctggagggtgagtgacctgcgagactcacaagaggggaagctgacagacatacctacagatggagtgctgacagacatacctacagatggagtgctgtgccacttagtgccgacaagaaagctgaggctggggctgggtcagcagccaaattccagttgagacggatttggtcgtggacgtggtcagccacctcag

SEQ ID NO: 52119 - DNA, 201 bp, Homo sapiens
ctccactctcctgtgtgtattaattccaaacctgtttggctctaggttcaccatatcctgaattcatcggcatctcatcctctcccactgctgccttagtytaggccaccatcagctcttgcctggaccaccgcagtagtgttctaactggtctctcccccattacccctttcgcacccctagggtctccttttcatatag

SEQ ID NO: 52120 - DNA, 201 bp, Homo sapiens
actggaggtttgggccgcgtccgcgctttccccttccctctccccgcctccccggtccccagactggctcgtgcaagccgagtcccggggcccgggggtcscgtcaactccgctggcgtatgtgtgcagattctccccgagtcggagagggaatccgcccagccagccgccttgtcaaagcgtcctgtccacgaccacaga

SEQ ID NO: 52121 - DNA, 201 bp, Homo sapiens
ctttatgctatttgcatcatcatttgcatgctctttctatacatacacagtatttatttttttccgaaccatttaagactaagttgtatacatcaccaccmtttacccttaagtattacagtgtatatttcctaatagggatatattttgttacataaccaaagtatattgttaacttgagtaaatttaacattgatttag

SEQ ID NO: 52122 - DNA, 201 bp, Homo sapiens
cgctgggtgcggggagcgcagaggcggtgcagggcggctggctcgcctcggcgtgcagtgcgcgtgcgtggagctgggagctaggtcctcggagtgggccrgagatggcggcggccgacggggctttgccggaggcggcggctttagagcaacccgcggagctgcctgcctcggtgcgggcgagtatcgagcggaagcggc

SEQ ID NO: 52123 - DNA, 201 bp, Homo sapiens
aatcacaacttatttaaatatggattttgtgttgtagattgtgaagaggtctcttgaagtttggggtagtcaagaagcattagaagaagcaaaggaagtcygacaggaaaaccgagaaaaaatgaaacagaagaaatttgataaaaaagtaaaaggtagatggccacattttatatcgtgaaggattgtgttttaccattt

SEQ ID NO: 52124 - DNA, 201 bp, Homo sapiens
gaggaaaatatattgttctagtcataaaaaaggaaactagagttcattttccttttcttaggacctgttatggaatttgattatgtaatatgcgaagaatktgggaaagaatttatggattcttatcttatgaaccactttgatttgccaacttgtgataactgcaggtacttattttagatggtgttcttaattgctaat

SEQ ID NO: 52125 - DNA, 201 bp, Homo sapiens
gaatagcaccactgaaaagatgactttaaaatttttttttcagaattgcggcgagcagtaagaagcagcgtgtggaaaagggagacgattgttcatcaacrtgagtatggaccagaagaaaacctagaagatgacatgtaccgtaagacttgtactatgtgtggccatgaactgacatatgaaaaaatgtgattttttagt

SEQ ID NO: 52126 - DNA, 201 bp, Homo sapiens
cataggtttagatagatgttttattagagttgtttctgatcattaatatttaaaatctttaaatttctaataagtatttataaatttatacttgagttagmtcattctttggtacctttggatttgacagttataactataatatttcgcaagtctgaatcacaacttatttaaatatggattttgtgttgtagattgtga

SEQ ID NO: 52127 - DNA, 201 bp, Homo sapiens
cacagtgagggtactttcacactctttgggaaaaagatagaaacactttatttgttcataagtttggcagccaacagtgcaatataacagctttttattawaaaaaaaaaaaaaagacctattccagtctttagttgcagctacagaagtgttgtgcattcatcaatgtaggtggttgctctgctttgatctatgtgtgtc

SEQ ID NO: 52128 - DNA, 201 bp, Homo sapiens
gatcttctactttagcagtttgagaattgatcttactaccaaaaagaattttacagtttaaatagtataaggtgtgtatagatagatagatagatagataaaaataaggtgaaagacaagaaagtgttttcttgttagtgaattcaaattgttctgccttgttagatacaaggcagaaactgctgttcagtttttttaact

SEQ ID NO: 52129 - DNA, 201 bp, Homo sapiens
tgatcttctactttagcagtttgagaattgatcttactaccaaaaagaattttacagtttaaatagtataaggtgtgtatagatagatagatagatagataaaaataaggtgaaagacaagaaagtgttttcttgttagtgaattcaaattgttctgccttgttagatacaaggcagaaactgctgttcagtttttttaac

SEQ ID NO: 52130 - DNA, 201 bp, Homo sapiens
tttctttcacacacacatattttgccaagccatttaagttgcagacattgtgattcttataaacacttcagcatgtttctcctcagaacaatggcattcgrctgggagcagtggcttatgcctgtaatcccaacacttctgtaatcccaacacttcaggaggccgaggcgggtagatcacctgaggccaggagtttgagac

SEQ ID NO: 52131 - DNA, 201 bp, Homo sapiens
atgatcttctactttagcagtttgagaattgatcttactaccaaaaagaattttacagtttaaatagtataaggtgtgtatagatagatagatagatagataaaaataaggtgaaagacaagaaagtgttttcttgttagtgaattcaaattgttctgccttgttagatacaaggcagaaactgctgttcagtttttttaa

SEQ ID NO: 52132 - DNA, 201 bp, Homo sapiens
atatgatcttctactttagcagtttgagaattgatcttactaccaaaaagaattttacagtttaaatagtataaggtgtgtatagatagatagatagatagataaaaataaggtgaaagacaagaaagtgttttcttgttagtgaattcaaattgttctgccttgttagatacaaggcagaaactgctgttcagttttttt

SEQ ID NO: 52133 - DNA, 201 bp, Homo sapiens
atgattaaggttaaagaccttgacatagggagaatatcctgggttattcaggtagacccaatgtaagcacacaggtttccttaaaagtggaagaggggccrggcacggtggctcacgcctgtaatcccagtactctgggaggccaaggcaggtggatcacctgcggtcaggagttcaagaccaacctggccaacatggcaa

SEQ ID NO: 52134 - DNA, 201 bp, Homo sapiens
tttcacactctttgggaaaaagatagaaacactttatttgttcataagtttggcagccaacagtgcaatataacagctttttattaaaaaaaaaaaaaaaagacctattccagtctttagttgcagctacagaagtgttgtgcattcatcaatgtaggtggttgctctgctttgatctatgtgtgtctatattgttgtttg

SEQ ID NO: 52135 - DNA, 201 bp, Homo sapiens
ctttcacactctttgggaaaaagatagaaacactttatttgttcataagtttggcagccaacagtgcaatataacagctttttattaaaaaaaaaaaaaaaagacctattccagtctttagttgcagctacagaagtgttgtgcattcatcaatgtaggtggttgctctgctttgatctatgtgtgtctatattgttgttt

SEQ ID NO: 52136 - DNA, 201 bp, Homo sapiens
tcacagtgagggtactttcacactctttgggaaaaagatagaaacactttatttgttcataagtttggcagccaacagtgcaatataacagctttttattwaaaaaaaaaaaaaaagacctattccagtctttagttgcagctacagaagtgttgtgcattcatcaatgtaggtggttgctctgctttgatctatgtgtgt

SEQ ID NO: 52137 - DNA, 201 bp, Homo sapiens
atacaaaaattagggctgggtacagtggctcatgcctgtaatcccagcactttgggaggctgaggtgggtggatcacgaggttaggagatcgagaccagcmtggccaacatggtaaaaccccatctctactaaaaatacaagaattaactgggcatggtggtgcgtgcctgtaatcccagctacttgggaggctgaggcag

SEQ ID NO: 52138 - DNA, 201 bp, Homo sapiens
aaaaaaggaaactagagttcattttccttttcttaggacctgttatggaatttgattatgtaatatgcgaagaatgtgggaaagaatttatggattcttawcttatgaaccactttgatttgccaacttgtgataactgcaggtacttattttagatggtgttcttaattgctaatgtttatgtgtaggtttagggcaaaa

SEQ ID NO: 52139 - DNA, 201 bp, Homo sapiens
tctgtaatcccaacacttcaggaggccgaggcgggtagatcacctgaggccaggagtttgagaccagcctggccaacatggtgaaatcttgtctctactamaaatacaaaaattagctgggcatgatggtgtgtgcctgtagtcccagctactcaggaggctgaggcaagagaattgcttgaacctgggaagtggaggttg

SEQ ID NO: 52140 - DNA, 201 bp, Homo sapiens
cttcagtagcaaggagagccttgaaggataaagtagtgaacaggcatcttaaggagtctgaaagagaggactgttacacattacagaaatcagttacagawtatagaaatgttttgatttcaaaacttcaggatgcacaggccttaatattagatgggaacgttcagctggttcaaatgtacagaacgttttgggtttgca

SEQ ID NO: 52141 - DNA, 201 bp, Homo sapiens
tcacgacattgacattttgcagtgcccaggccagctgctgttcagtgtgtccctccattcagatttgttagctgcttgtttcctcagttagactcaggtcraatgtttttggtaggaatactttcaaggtgatgtgtttgagcatttatcagtagacacatggtaccagctctgtcttttaagggagtggtagtttgactg

SEQ ID NO: 52142 - DNA, 201 bp, Homo sapiens
tcttattgcatgattttcctactcagagacaatcatcagcaacattttaatttttgctcttcctgttcttttctatcctaagatccttaaatttttttttwaaataaaaatggaagcactgtttgacacgaagttaagcaactccatgatcaacatccttatacacatctttttatatagttacttagcaattcctgaatc

SEQ ID NO: 52143 - DNA, 201 bp, Homo sapiens
aaatctaagtaaatactataaagagtaaaggtatataatgtaaagttttaaaagtagaatgaagactttttacatcatcttggtaccaaaattaaaaaaawatatatcctgcagatcagaagtcaagtcgatagagacaattattgatcttgaaggagatgagtagtagtaattggtaatttcctgcggttggagattttt

SEQ ID NO: 52144 - DNA, 201 bp, Homo sapiens
ggagctaggtcctcggagtgggccagagatggcggcggccgacggggctttgccggaggcggcggctttagagcaacccgcggagctgcctgcctcggtgmgggcgagtatcgagcggaagcggcagcgggcactgatgctgcgccaggcccggctggctgcccggccctactcggcgacggcggctgcggctactggagg

SEQ ID NO: 52145 - DNA, 201 bp, Homo sapiens
agctcagacttaacccaggcctgactccaaagcctatactctgaatcaccaagcgagacctattttaaaggtgaccaggtcgtgagatatgatctcagcayggacccttctcccggatgacaagagagcaggtagttaggcgggtactccgtgtccgcgcatacccagactccgcccagcgcccgggcaggccaccccgag

SEQ ID NO: 52146 - DNA, 201 bp, Homo sapiens
atttctaataagtatttataaatttatacttgagttagatcattctttggtacctttggatttgacagttataactataatatttcgcaagtctgaatcayaacttatttaaatatggattttgtgttgtagattgtgaagaggtctcttgaagtttggggtagtcaagaagcattagaagaagcaaaggaagtccgacag

SEQ ID NO: 52147 - DNA, 201 bp, Homo sapiens
tacagtcagaggacaacttttctatttataatctaattcagcatacgtttactgacagtttcataggtttagatagatgttttattagagttgtttctgakcattaatatttaaaatctttaaatttctaataagtatttataaatttatacttgagttagatcattctttggtacctttggatttgacagttataactat

SEQ ID NO: 52148 - DNA, 201 bp, Homo sapiens
gaaagtaagtttgccaagtttgtataatcaactttgttataaaattaaggtaaactatatatggtttaaatacacatagacacacacacatgtacatggcygaaagcttgatggagttggatttttggattcacctgaatagcaccactgaaaagatgactttaaaatttttttttcagaattgcggcgagcagtaagaag

SEQ ID NO: 52149 - DNA, 201 bp, Homo sapiens
aatgtaaaagcagccccaaagataattgacacaggaggaggcttcattttagaagaggaagaagaagaagaacagaaaattggaaaagttgttcatcaacyaggtaaagtgagtttttcaaaaataagtatctagattggttattttgagtaacatgcataattctatgcaaagtgatgctaaataatgccataactactt

SEQ ID NO: 52150 - DNA, 201 bp, Homo sapiens
ttcttaggacctgttatggaatttgattatgtaatatgcgaagaatgtgggaaagaatttatggattcttatcttatgaaccactttgatttgccaacttrtgataactgcaggtacttattttagatggtgttcttaattgctaatgtttatgtgtaggtttagggcaaaacaagttatatctgtttggatttgatattt

SEQ ID NO: 52151 - DNA, 201 bp, Homo sapiens
cacaacttatttaaatatggattttgtgttgtagattgtgaagaggtctcttgaagtttggggtagtcaagaagcattagaagaagcaaaggaagtccgayaggaaaaccgagaaaaaatgaaacagaagaaatttgataaaaaagtaaaaggtagatggccacattttatatcgtgaaggattgtgttttaccattttgc

SEQ ID NO: 52152 - DNA, 201 bp, Homo sapiens
gggtggcagagcaagactccatttcaaaaaaacaaaaaaagtagaagaggaaagccaagagtcagagggacatgtgattatggaagaagtgggtgatgccrtgtgagaagccaccattgctggctatgaagatggaggaaggggtcatgagtcaaggaatgcaggcagcctatagaagctggaaaaggcaaggagatggat

SEQ ID NO: 52153 - DNA, 201 bp, Homo sapiens
gctgctgttaatcaccagataagctactgtcaattgtcctcattttcgaagagtttgaatttgccctgaagtttttcatagagttagacctcttgggtctsgtttctttttcagttcgcttgttatttgaatgaaggatgtcttttgaggacattttccaaagtggttacatgagtgatatattttccaagtgtctctgta

SEQ ID NO: 52154 - DNA, 201 bp, Homo sapiens
atgatttttgaatagcagctacccttataagtaccaagaaacatcagatgtgattgctgcttttcacatgcttagaatataatttctccatattttttcaygcaaaaaaagcaaagaattctagaattaaaaataagagggacctaagatcatatatggtgcagctcctaagatgctacaccataaccagtgtaaaagttg

SEQ ID NO: 52155 - DNA, 201 bp, Homo sapiens
acatttttatgtctatgcacttggtttcagatgagataggaaatggaaataacaaaacactgttagaaaatcttgtttctgtagacggctcaaccttgccwgaaaccacgaggcagtggaaatatcacgagaaagcttgttcctacaagactcccagactgattaccagaccaaagaagttcccagaaatttagcttgaag

SEQ ID NO: 52156 - DNA, 201 bp, Homo sapiens
catttttatgtctatgcacttggtttcagatgagataggaaatggaaataacaaaacactgttagaaaatcttgtttctgtagacggctcaaccttgccakaaaccacgaggcagtggaaatatcacgagaaagcttgttcctacaagactcccagactgattaccagaccaaagaagttcccagaaatttagcttgaagc

SEQ ID NO: 52157 - DNA, 201 bp, Homo sapiens
tgtctatgcacttggtttcagatgagataggaaatggaaataacaaaacactgttagaaaatcttgtttctgtagacggctcaaccttgccagaaaccacsaggcagtggaaatatcacgagaaagcttgttcctacaagactcccagactgattaccagaccaaagaagttcccagaaatttagcttgaagcaatcattt

SEQ ID NO: 52158 - DNA, 201 bp, Homo sapiens
aatgcttgctgaatctctcactgcatctctcacataattccaacttcactttagttctgaatacatgaacagtaaagggggcagtttccttttaaattttrcttgtcagttaggcactttaagagtcttatttctttatgtgatttcctgtaagagctcatatatggggattgttattgagtaattttgaacacaaaatta

SEQ ID NO: 52159 - DNA, 201 bp, Homo sapiens
ctgcagcctcaacctcctgggctcaagtgatccttctgcctcagcttcccatgtagctgggaccacaggtgcatgtcactatggccggctaagtttttgattttttgtagagatggggttttgtcatgtttcccaggctggtcatgaactcttgggctcaggcgatactcctgtcttggcctccaaaaatgctgggaatat

SEQ ID NO: 52160 - DNA, 201 bp, Homo sapiens
atgtcggatcttaaaagtctttgatagctactgaagtattcactagtgaaataatgtcatgttttggattttctttaaaattatccagtggaggagagagstaaaggggattttgggagaggtgaaacaagactgaccatgtgctgataattgttgaagttaggtagtgagactcacagaggggctattatactgtttacg

SEQ ID NO: 52161 - DNA, 201 bp, Homo sapiens
gtgcttattgacccaaaagaaagatagaaattaagtaattaccagtgttggaaagtagtacagggcgctttaggaataggtagttaccttcttgggtctattttttttttttttttgagacagagtctcgctgtgttgcccaggctggagtgcattggtgtgatcttggctcactgcaagctccgcctcctggattcaggc

SEQ ID NO: 52162 - DNA, 201 bp, Homo sapiens
gagatcataccgccacacatgcattcctactgtccagacccatctttattgttggctgtctttttatagtgatgtctaggtagaggagtgcgatgcccagrgtcggggatagggagggtggagaggaagcagcctttctcattgtttgctcagaaaggaaagtatcccactatctagagagttagtgatgcctcagaatct

SEQ ID NO: 52163 - DNA, 201 bp, Homo sapiens
cttagagcagagctatatggcacaggcttggtggttctaaaaggcaggtcctatccatcacagaaacagcaagtctctgggttatgggggaagattgagcsggggggagtgaagtaaggagaaaggggggctgttgtgtccagtttacatttgtcaccagtgactagcttttaaaaaatgtattagctgtgcatggtggta

SEQ ID NO: 52164 - DNA, 201 bp, Homo sapiens
aaaaaaatctataattgtataaaatcccatacactagcacttcctgttattttgttcatcagcggacagcaaagcatgtagtcgtgttgccttcttgtctsccagtgatagatccatgtagcatttcataaaaatggataattaaaggggagaattgtcaaagatcaaagtgcatcaaataaatgaagtgttaaaattgga

SEQ ID NO: 52165 - DNA, 201 bp, Homo sapiens
tcgctaaccttagtaccaaataacttgtgcttcacttttaaaactagatgtcaccttcagggttttccttgagttagtggaggtcgtgtgtgtgtgtgtgygtgtgtgtgtgtgtgttagaagggaagattggcttacgtctccctctagctagaaaagagttaataaaaccagatagagataatgatcaattgataaatg

SEQ ID NO: 52166 - DNA, 201 bp, Homo sapiens
caaaaccaggaacacaaaaatgaaaatagaaaattgagacaaatggggtagctgtagtctacttcgtgttatttcctgggaactgctgttggtgttgggtytcctaaagtgggaagttcattgtgcctctctggatactgatctcccctttctgtaatgtgcacatccaggggttttgaagtggattgtgggctttgattc

SEQ ID NO: 52167 - DNA, 201 bp, Homo sapiens
tgaggcactagaatggtgtgaatccgggaggcagagcttgcagtgagcagagattgcgccactgcactccagcctgggtgacagaatgagactctgtctcaaaaaaaaaaaaaaaaagatatttgaaggtctaattataggataaatttggtgactaagaggttactcttaataacaataatcatatttggtttacctatt

SEQ ID NO: 52168 - DNA, 201 bp, Homo sapiens
tcttttttctttctttttttaaagaaatgctgcagcactcattattttttcccctgtttccctctcctccccaaatttcctgtcagcaactttgttttctrttcattagaattcaaacacaatttaaattaatttcccttgccaccttctctgtggttagatacacctttggtgagttcacaaatgactcattggactatg

SEQ ID NO: 52169 - DNA, 201 bp, Homo sapiens
gagattttgtcatggaaaacattttaactaaaaaacaaataaagtaatataaatgatgggtcagaattaggacaatttatgatgtctttgatccagctgtctgactgtgtggatattttgtgtgtacctgtgtgtgcatatatgtgtaatggtgagcatcagtgattatatggagagaatagaaatatagggaactaattt

SEQ ID NO: 52170 - DNA, 201 bp, Homo sapiens
tacaaccagttgattcttcaaagatttttgattgtgataataagattgatggatatattgtgccttagccttatattaaattggcagatttttaaataccrgataattagaaatgctattaattctcagtgtagagtgctaacctaacatttttgtatgtcttgtgtggtcaatagaataatggccacccaaacatgacca

SEQ ID NO: 52171 - DNA, 201 bp, Homo sapiens
agattttgtcatggaaaacattttaactaaaaaacaaataaagtaatataaatgatgggtcagaattaggacaatttatgatgtctttgatccagctgtctgactgtgtggatattttgtgtgtacctgtgtgtgcatatatgtgtaatggtgagcatcagtgattatatggagagaatagaaatatagggaactaattta

SEQ ID NO: 52172 - DNA, 201 bp, Homo sapiens
gattttgtcatggaaaacattttaactaaaaaacaaataaagtaatataaatgatgggtcagaattaggacaatttatgatgtctttgatccagctgtctgactgtgtggatattttgtgtgtacctgtgtgtgcatatatgtgtaatggtgagcatcagtgattatatggagagaatagaaatatagggaactaatttat

SEQ ID NO: 52173 - DNA, 201 bp, Homo sapiens
tcattttttaccagcttgctatttcttcatatgacattaaaaacaattagacaaatgtaaggacctttctttgaattgttaattaatttttaattttctgrttaccaccaaataagagacatacttttaggtataattttccatcatatgaatgtttgagtagatttttttaaggagacagaataacttcattgtttctca

SEQ ID NO: 52174 - DNA, 201 bp, Homo sapiens
acagagtcaggtatcctttttctggtgtatttatttggtctggaatgtgtcaggttttgaggccacagcacagatgctttgctctcccataagtgtgggcratatgtggagaatggctttgtgtggattggaagtggaggtgaagggggaagtatcttgttgggaagaaatagctgactgtggccttcaagtgcttcttgg

SEQ ID NO: 52175 - DNA, 201 bp, Homo sapiens
agtacttgaggtcagagactgtgtcttttatagtttgtctacataccaaactcattaatatgaataatcatcttagcagtactggttgtagtagcaaaagyaatacaagaaaccagtcttctcctatatttttacattagcattcattatttgtaggatttgggaggtctttttgagaaagtgatgtgaaactaagtctct

SEQ ID NO: 52176 - DNA, 201 bp, Homo sapiens
agaacaattttaaaattataaaaacatttgtaaacatttagtatgattttaatttttcatttggtatacatactttttaaaatagttccttgtcagttatrttgcttggaaggcagaactctctgcacaagcaataagtcagtaaatccagttttttgatctaatattgttgcttgtttgttttgtaataatagcatgtaa

SEQ ID NO: 52177 - DNA, 201 bp, Homo sapiens
tatcaatagtactatcattattatttttgctaaagtctttgggagatttgaaggtcacaaaaagacttacatgtgaaaaaggaggaagaaatcagaaatasggagaattgtgtaggggatatactttggattttgaagtcttgtttagaagtgtatatacttgtggggcaataattacaatcattttgggttcttttttca

SEQ ID NO: 52178 - DNA, 201 bp, Homo sapiens
ctataattgtataaaatcccatacactagcacttcctgttattttgttcatcagcggacagcaaagcatgtagtcgtgttgccttcttgtctcccagtgayagatccatgtagcatttcataaaaatggataattaaaggggagaattgtcaaagatcaaagtgcatcaaataaatgaagtgttaaaattggattaaaatt

SEQ ID NO: 52179 - DNA, 201 bp, Homo sapiens
gcaaatattgtagcctttaatttttcatagtagtttgtttattatgttcaagcactggtaaaacataacttaacaaaacaaaatgagccaaaacagcttaycatctgaaatgtaaacccagtttatcgtcggatctcttattttttaaaagacgtaatttcttaaaagaaattattagaacagtcttcagctaggagttca

SEQ ID NO: 52180 - DNA, 201 bp, Homo sapiens
gacatatacctgttcttttttatatttaataggtaagagttttcttttgctgaaggaagtggagacatttggttcatagctaaagaagatgagattgtgcygtggaaccttgttttcgcagcacgtgataaatctcacctttaatttacagactcctcttgccccttccaagatgtttaaataataaaagatgtatcatca

SEQ ID NO: 52181 - DNA, 201 bp, Homo sapiens
tagtagtttgtttattatgttcaagcactggtaaaacataacttaacaaaacaaaatgagccaaaacagcttaccatctgaaatgtaaacccagtttatcktcggatctcttattttttaaaagacgtaatttcttaaaagaaattattagaacagtcttcagctaggagttcaagttaccgtacataaaaaactggatct

SEQ ID NO: 52182 - DNA, 201 bp, Homo sapiens
tcagagaactattttctttgcaagatcttgcttaaacacctatggcgaacattcatgtgtagaaatggagccctggtaacttccagcaatatttctaactyctgttctctctctttatcttattcccaacacccccatctctggaactttggcgggaccaccacagccttggataagctcagcacgcagcacctgtaccac

SEQ ID NO: 52183 - DNA, 201 bp, Homo sapiens
aaagttagctgggcatggtggcgggagcctataatcccagctactcgggaggctgaggctggagaattgcttgaggctggggctggagaattgcttgaacsttgtggggtggaggttgcagtgagctgagattgcgccacttcactccagcctgggtgaaagagtgaaactccgtccccctacccacaaaaaaaaaaaagc

SEQ ID NO: 52184 - DNA, 201 bp, Homo sapiens
agcctggactgcatatttcttattaatgattccttttatgcttgctgacattagggcatcatttctgctgctatggtagactttattaaaaacgatgacasatttccaactagtattttttaaatagaaatggatacaccataatcttatacctgaattaataaaatctgtcaaataccatctctactatttgcttttttc

SEQ ID NO: 52185 - DNA, 201 bp, Homo sapiens
ggaagtcttaactgcctagacagggtaggaaaacatcaccttagatttcaaaaagacttaaaatgaacctcatctgaaaatgaaagcatccgtgtagcatrtacaaatacattagcacactatgctatgttcaagtagagttgttaatttctctgtgtattattttaaacaagattggtaaagtaggaaaaccaaaacttt

SEQ ID NO: 52186 - DNA, 201 bp, Homo sapiens
tagtactgttgtgattggttataaagggctacatgagaacaattttaaaattataaaaacatttgtaaacatttagtatgattttaatttttcatttggtrtacatactttttaaaatagttccttgtcagttatgttgcttggaaggcagaactctctgcacaagcaataagtcagtaaatccagttttttgatctaata

SEQ ID NO: 52187 - DNA, 201 bp, Homo sapiens
ttttttttcacacttttgcagggcttcctccctcatttcactagagtctcctctggaatgtcagtcctttaaagagaccttcctgccaaccttccctcctrtgtccctatcagtgtatgtttctttggtctcttaccctgatttttttcttcacagcacactgccgcttgaaagtatatttaatttttttatttacatgta

SEQ ID NO: 52188 - DNA, 201 bp, Homo sapiens
aagtcttttaactagggcttaagactaattccagctactaaggagacaaaaattactctaaagaagacaatttggttttattttatatgtgcatgttaacytgctttgagatcatcattttgtattttagggtattctcttagatgaagtaagatgttcttcatttgttactgaaaggggacatggcctcactccaggaga

SEQ ID NO: 52189 - DNA, 201 bp, Homo sapiens
cgctccgtgatacgcgccctgtgcgccggtctcctcttgcacaattgctggctccttggctccgcgggggagcgagggtgagaggaagcgaaggggacacmacccagaaactttcatcttggattgtgctcaagtgagggagggaagttccctggtgcctccctcctagacacgtcttgcttttccaaagcctacaccaaa

SEQ ID NO: 52190 - DNA, 201 bp, Homo sapiens
ctctgttgcccaggctggagtgaagtgccacaatctcagctccctgtagccttgatctcctgggctcaagtagagattctcctgcctcagcctcccaagtwgctgagaccatggggctggctaatttaaaaaattttttttgtagagacagggtcttgcaatattgcccacactggtcttgaactcctgggctcaagtgat

SEQ ID NO: 52191 - DNA, 201 bp, Homo sapiens
ttatcactccttgtttccacctgatctttgattcatagttttggagaacttgtagattcttttatcctagggtatattaagtactgtaatgtgaagtcctrctcctcttttttgaagatgaaatttacagatcttgctgctgattgcattctgtaaataaagggagagctctgaacatgatgtttgatgttgtgtccctag

SEQ ID NO: 52192 - DNA, 201 bp, Homo sapiens
taaacatttagagaaagggagtctttgaacccaaataataatgtcaaatagtttgttagtgttacatgttcatgtttaagggtttcataagctcaacccayggacaagagcatttcagtttacatcagtgtgtaatatattattttaactgaaggtttatttttattttgttatttggggaaagtttcttttcctctggca

SEQ ID NO: 52193 - DNA, 201 bp, Homo sapiens
aaacattataaaatatggaaacctagagctttgaagaaatgttgagcatattgaaacttatgcatgtaatggaagaggaagtggagtttgacttttgcctmtttcaagtttgcatgcttctgccgggctttggaaacagtacctctatttttcagatctcactgactccctgtcaggttatcttttcatgacatcaactta

SEQ ID NO: 52194 - DNA, 201 bp, Homo sapiens
actgcttcttttagagtgggcgcagatgaaaatgaatcatggagtttaggaatgaaagtgtgaaaagtaactagataaaattttataatttggggagctayaaaatttagaatccatttccttgattttcatccctctcatttggaaatgatgaagctcaggaggttaagaagaccacggtcatcacaaccaacaagagat

SEQ ID NO: 52195 - DNA, 201 bp, Homo sapiens
actttcttggatttagtggaaaaaccttctctgaggctttggtaaccttctgaccaaatggattgcaatcaagtgtacctgtgatagtgagcttgaattcmcaaaacaagcaactcgattcattgctttgttaatccacatccacttaaggcatagatattctttatttgatacgtcatcttggtttattcatcatgatta

SEQ ID NO: 52196 - DNA, 201 bp, Homo sapiens
agatgcatgttcaaatttaattctagtataatcttacaaataattctctgaaaagcaaaggggttttgattcagtttgacagtttatgtttctgtgtccarttaccacttagttattgaatgttaaaaagctgctttctaaaatgtgcactccgactgcaccaattggcttcccagctgcctgctattacatgcgaggtgc

SEQ ID NO: 52197 - DNA, 201 bp, Homo sapiens
ttgtttattttctctgcctttctgtctcaccctcctcatgactgctacttgatttgtggttgaaataatgaggggataactgagagatgaaagttttgctstgtctgcctgcactgggtgggcaccatgcatcttgcaaatgtacttgcaggaaaaaacacttcgacttttattatattctttaagcatttatcgcctttg

SEQ ID NO: 52198 - DNA, 201 bp, Homo sapiens
taggctaggcaagaaggagatgagggccagcaccccagagccaggttttagtttaaattgggcttctgaatccaatactaaattgcaaccaggtctctgtytttgttgttgtttattttctctgcctttctgtctcaccctcctcatgactgctacttgatttgtggttgaaataatgaggggataactgagagatgaaag

SEQ ID NO: 52199 - DNA, 201 bp, Homo sapiens
ggaggtcataaagaatgtaagtaactgaaacaatacatttgctcaaagaaaggccactcaattctctgccctgtggtatctaatctccctgtaatacacawttcaccatctaggattggagaagttcattctatcaacacgaatgctaacaggtaggcttctggaagtacaatgtgatagttcagatctttctctgattca

SEQ ID NO: 52200 - DNA, 201 bp, Homo sapiens
ggcatcttatgtggttggaggtcataaagaatgtaagtaactgaaacaatacatttgctcaaagaaaggccactcaattctctgccctgtggtatctaatytccctgtaatacacatttcaccatctaggattggagaagttcattctatcaacacgaatgctaacaggtaggcttctggaagtacaatgtgatagttcag

SEQ ID NO: 52201 - DNA, 201 bp, Homo sapiens
tttttttttttttttttttttttttatttgagacagagtctcactctgttgcccaggctggtgtgcagtggcacaatgtcggctcactgcaacctccgcckgccgatttcaagtgattctcctgccttagcctcccgagtagctgggattacaggtgcctgccaacccgcccggctaattttgttttgtatgtttagacgg

SEQ ID NO: 52202 - DNA, 201 bp, Homo sapiens
agggggaagaaaaccattattgagaaaatttgtcttcctagacatcccgtcatgactagaaaaacaccaacagagataaaactaaaaattattgtatgatytccaaacccaaaataactggtccagtgaagttttatataaataaccatgttcaaatctggtatagcatatttggaaacatgagcttgctttacagtttac

SEQ ID NO: 52203 - DNA, 201 bp, Homo sapiens
gggttttaccatgttagccaggatggtcttgatcctcctgacctcgtgatccacccgcctcggcctcccaaagtgctgggattacaggcgtgagccaccgygcctggccagaagtttctaagtttgattcagttccatttgtctattcttgcttttgttgcctttagcagtttacttttaaagctcagatatgtctgatcc

SEQ ID NO: 52204 - DNA, 201 bp, Homo sapiens
ttatcctaccatatcaccaccaagaatttgctcccaaggccttgccttggactgtagactgtcattgaatcaacttgtcatgtttaaaaggaatgacctcttttttttttttttttttgagaaggagtgttgctctgtcgcccagggtggagtgcagtggcgtcatctcggctcactgcaagctccgcctcctgggttcac

SEQ ID NO: 52205 - DNA, 201 bp, Homo sapiens
attttaccctttccagttggacccaatgttttcttccttctagtactcctcgattccttcctatcacgtctcccttagcagatagccccatctttaacttycctcagatgattattttgttcatgtagctgttgtttattgagcaccctgttagaccctgaattaggaaagataaattctgtctcttttaagaagtgtaca

SEQ ID NO: 52206 - DNA, 201 bp, Homo sapiens
cttgttctttatccagtcagtatctctacgcaggtgactggctgtttcttggaaggcagttgtactgttgcctgttagagactcagaacagcgctgggacsgggtatctatagaggccctgttctattccacctacttttgatagcctgtgttctctcatttgtaagtcaagtgagtttggtaatttctaagtgcctttcc

SEQ ID NO: 52207 - DNA, 201 bp, Homo sapiens
taaagcaagctcagaacttaataatagaggaatagatacagtatattgaaggaaaaaaatacattgacatttgcaaagagaaagatgctgtttctatagcrtacctaagtccattgaatttgcacagtggacaaattgcaattggggaatattattcatataaatagtcctgtcagaacacgggatgagtagagtcttgtg

SEQ ID NO: 52208 - DNA, 201 bp, Homo sapiens
tcaaagaaaggccactcaattctctgccctgtggtatctaatctccctgtaatacacatttcaccatctaggattggagaagttcattctatcaacacgartgctaacaggtaggcttctggaagtacaatgtgatagttcagatctttctctgattcaaaatggtgatttaaaagaaaacatacttggctgaattggctt

SEQ ID NO: 52209 - DNA, 201 bp, Homo sapiens
tcctggctaacacaatgaaaccccatctctactaaaaatacaaaaaattagccaggtgtggtggcaggtgcctgtagccccagctactcgggaggctgagkcactagaatggtgtgaatccgggaggcagagcttgcagtgagcagagattgcgccactgcactccagcctgggtgacagaatgagactctgtctcaaaaa

SEQ ID NO: 52210 - DNA, 201 bp, Homo sapiens
tttttttaaggtgtgtacttgattgaacactgaattctacttcttaacgtttttaagtaaacatgatttgtaaaggcatatggatattttatgcagttggyatattaatagtatttagtcgtaagcccccaactcaaacccagatatacccgtttttgcaaacacccatcagattttatgtcagtgtttggtaaactagca

SEQ ID NO: 52211 - DNA, 201 bp, Homo sapiens
aatgcagctaagactgcaagagaaactgcaaaagataccccaagttatgtttgttattaagcataggttattttgaaaataggtttccatatggagtatayggtatgtaatttatacagaccacattactaatagattctgtcaagtggcactgaattcaagctacaatgtccataatggaatatgtaaggaaattgctgg

SEQ ID NO: 52212 - DNA, 201 bp, Homo sapiens
gggagaacctgagcctgaagaatcatgtgtaggaaaaatccttgtaatcttaagactttttttgggtgtttaacttactaaaatgtcttaattattaaacwttcttaatgctggacagttaggagaatattaaaaaatataaaattatttttatccaagttttctgttttatccagtaatcagtaatgatctgccttgatt

SEQ ID NO: 52213 - DNA, 201 bp, Homo sapiens
tttttgtagagatggtgactcactatgttgcccaggctggtcttgaactcctagccttgagctatcctcgtgcttcgtaggtgtgagcaaccgtgtctggscaaaagatttttaaatgaacaacaacaacaacaaaaaacctaagagtaaaaaccagaatttgataaaaacagatatttcacatactcgttgcatcctcat

SEQ ID NO: 52214 - DNA, 201 bp, Homo sapiens
gggttttacaggtaattagagccatacaggccatttgaggggtacaggggagaacctgagcctgaagaatcatgtgtaggaaaaatccttgtaatcttaaractttttttgggtgtttaacttactaaaatgtcttaattattaaacattcttaatgctggacagttaggagaatattaaaaaatataaaattatttttat

SEQ ID NO: 52215 - DNA, 201 bp, Homo sapiens
cttccctagctagtctgttatgctgcaagctgaagtttacaaatttgatgcctcctgttggggtatttctgaagggtgtatagggttatcaaacactcttraaatacatgcctaaggtcatgcttaatgtatacggcaaaccatccctcacagtttcttgcataaacttgaatatgttctacatgttttctcagcctaata

SEQ ID NO: 52216 - DNA, 201 bp, Homo sapiens
gcttcttgagttcttagacacctctctttctaaagtaacaggatcctagtgttagtttcactgtaagaactgaaatccagaacctggatgtcctgtgaccrcaaggggcagagccaggtcttggttgcagctgttctgatgcccagtttggactcttccctagctagtctgttatgctgcaagctgaagtttacaaatttg

SEQ ID NO: 52217 - DNA, 201 bp, Homo sapiens
ctgtgattacgcgtgagccactgtgcccgccgcaagcttgggattttgagaagcagcgtggttgccagtgaacaggggtcctgaaattgcagaagggcacratgaaacggagagcccttttacatggcggtacaatagaatttgactgtaatactattgtcagggccctctgcattaagtcagtgcacgtgtgtgcattca

SEQ ID NO: 52218 - DNA, 201 bp, Homo sapiens
tttctagggaaacatgttggcagctgttcgaaataactagtggtttaaagacaattgttagtgtggttttctacacacttaaagcttagacctgctctgtyacttgtctttgatgctaaggagttgtctaagtagttgagttaaataatttcagattagttttatgcattaaatggtttggttttatttttaaaaacctct

SEQ ID NO: 52219 - DNA, 201 bp, Homo sapiens
atctttattgttggctgtctttttatagtgatgtctaggtagaggagtgcgatgcccagagtcggggatagggagggtggagaggaagcagcctttctcaytgtttgctcagaaaggaaagtatcccactatctagagagttagtgatgcctcagaatctctttatctttgtaacctcttttctgtatgaagtttaataag

SEQ ID NO: 52220 - DNA, 201 bp, Homo sapiens
ccccccgccttttgctctgagcattcactccctgtttccttatttcccccgttctcttttcctttatctcaggggagttccctgagtagcaagactgaaaragagctgaggtttatgttagaagaaattaaggttaatgatcattggctcattttcatattctgtgggtgtggatggaggagtaatcagtgcaggtggccc

SEQ ID NO: 52221 - DNA, 201 bp, Homo sapiens
ctagcaaaggaagtgggggatttggttaggaagtgcttgctggccttgaaaaactatcatgtgtgcattctcatttcagccacataaagatcattctttamataaatacttgttggattaaaaaaaccttaaatgctccgataaactagagaaataactttgattttttttaaaaacatgacttccatttggatcaacttt

SEQ ID NO: 52222 - DNA, 201 bp, Homo sapiens
aaggaataattactttcaataaggtgcagacttaagaaaatgtatggttgttgttatggttgttcttggggagttgggatatgctgatcatcttcactgckgcctccattcagctcatgtctgagagcctccaaccctcttctgggcactcggaacaagaccaagctgtatgtggtacattctgtgaacgacaaactttga

SEQ ID NO: 52223 - DNA, 201 bp, Homo sapiens
catactttttattactagattgaattataggataagaaaagtgctttgagcatctttagaccgcacatgtaagactacatacttgggcctgagcctcccartttggagtagggcctcttaaggaaaaaagaaaaagcacacgttatccatgtttgtgtgtgtgtattgtgtcctgtttgcccttgagattaattttttaac

SEQ ID NO: 52224 - DNA, 201 bp, Homo sapiens
gtttggagtagggcctcttaaggaaaaaagaaaaagcacacgttatccatgtttgtgtgtgtgtattgtgtcctgtttgcccttgagattaattttttaayaagtgccgtgatttcccagtttttcttagattatatttctaattgctttaatattagatttgccatttatttcacctatccttgttttcccttgactttt

SEQ ID NO: 52225 - DNA, 201 bp, Homo sapiens
tttgtaatttctttcatatgaaacatcaacaaatacctctagaatggatgccactaaatgtagttattacattttttttttaaattaaattcttggaaatrtattctcaacctttcttttctttctcatgtcttaagtttgaatccaggttttacaacctaataacatgtgactctgagctagttatttacctactctaag

SEQ ID NO: 52226 - DNA, 201 bp, Homo sapiens
cctatatatttttctttcttttttatttttttgaggttggttcttctaccaaaaactgaaaaaaaaagtattattagataatttttactttatgggatttsttagtcccagtctttgtagcaatttcactttaaaattcgtgattagcagaatgtcctcttcatttctgatgactttctgtggtgaggagggttcacttag

SEQ ID NO: 52227 - DNA, 201 bp, Homo sapiens
caggatttgccttacttttgagctatccatttcaaattagagaggacagacgctgtgctccttggttatatactatgcaaaaagacatgtatatggtactkagatagtatttcgtttcttctagaagtgtaattttgagaaggaaataagactgtttttccatccacctgccatcccatgccacccctttctacatagttt

SEQ ID NO: 52228 - DNA, 201 bp, Homo sapiens
taagtttcctaaaaatttaatagtcagttctcacaagtcgcaaagagtaaatctggtatactactagattatcaacctcctgggtgactgctttgagctcyggtgtaaacatagttaggagaaccaattcatgaaaaatggtccaggctttgctaccagtttattctttgactttgcctcagtttccttgattgtatagta

SEQ ID NO: 52229 - DNA, 201 bp, Homo sapiens
attcatgtgatgctttcctccattccttgaataggaattttttttcttgttttaagcagaaattttgcctttttcccaaattcactggaaaaatcggatgstattccactgttaattgaggtgtcactaattactttgcttgaaatttcaattattctaaaatcttccaacattttcatatatgtatcgatattttaaaaa

SEQ ID NO: 52230 - DNA, 201 bp, Homo sapiens
ggctggagtgcagtggcacaatctcggctgactgaaacctctgcctcctgggtcccagcaattcttctgcctcagcctcccgagtagctgggactacaggygcacgccaccacgtccagataatttttgtatttttagtagagatggggtttcctcatgttggccaggctggtctcgatatcctgagctcgtgatccgccc

SEQ ID NO: 52231 - DNA, 201 bp, Homo sapiens
agtttaacagcttgagtagaaatttccttttgaatggttaaccaaactggtatcacttttaaggtcctaaatcccaatctgtttttctagggaaacatgtkggcagctgttcgaaataactagtggtttaaagacaattgttagtgtggttttctacacacttaaagcttagacctgctctgtcacttgtctttgatgcta

SEQ ID NO: 52232 - DNA, 201 bp, Homo sapiens
gttttaaaatttagctttggaggggaccaggtggtgattctgtgactctgtgcatttcattacctaacatatttcagcttttctaaagtcaaattatttcwgcttttctaaagtcaaatatttctatttaaaaggcactagttttgactaaaatgttaataataacagatttaataatattgagtaatattgtttccatct

SEQ ID NO: 52233 - DNA, 201 bp, Homo sapiens
cagcctcctgagtagctgagactacaggcatgcaccaccatgttcagctaatttttgtatgtttagtggagacgaggtttcaccatattggccaggctggycttgaactcttgacctcaggtgatgcacctgccttggtctcccaaagtgctggaattacagacatgagccactacgctcagcccgggtattttctcttgt

SEQ ID NO: 52234 - DNA, 201 bp, Homo sapiens
aatggatgcttgtaggccaggcatcatgaacttagatggcaatagtggccaggcaagtaaaggaattgcgagaacctggtagggtataaaatgaaagtacrtgctgcagagagtagtttctactcctcccttgctgattgttgtcaggaaggaacatacgtttctgttaccatatctttaattctttaacgcctcaccttt

SEQ ID NO: 52235 - DNA, 201 bp, Homo sapiens
ctttttcctttgttgtcttctttgtaatttctttcatatgaaacatcaacaaatacctctagaatggatgccactaaatgtagttattacatttttttttwaaattaaattcttggaaatatattctcaacctttcttttctttctcatgtcttaagtttgaatccaggttttacaacctaataacatgtgactctgagct

SEQ ID NO: 52236 - DNA, 201 bp, Homo sapiens
tttagtacttgtatgctaggcgcttggctacaccttttgcactaataaaaatgtttaaccttcacaacaattctgtgaacaggtacttttatttccacttyagagatgaactttggataagtaacttgccaagatcacacaattagtaaaaggttctgcagttattcaaacccaagaaattgcgctgcagaactctgacac

SEQ ID NO: 52237 - DNA, 201 bp, Homo sapiens
cccataagtgtgggcgatatgtggagaatggctttgtgtggattggaagtggaggtgaagggggaagtatcttgttgggaagaaatagctgactgtggccytcaagtgcttcttgggtggatgcatttaataatgatcttagtgaatcagttgctgcatattgaaaacaagatggctggggccgggcgcggtggctcacac

SEQ ID NO: 52238 - DNA, 201 bp, Homo sapiens
ttagctgcactaactaggttggaaacttaatgcagcttcttatggttcaaagtaaaattcttaataaaaaaaaagggcgggggaaagccttccattctaartaccctggagctgttagtgcagttatttctaagttgacatacttttgtataggcatgacagtggcaccaaccatctacattaagccttaacattccacag

SEQ ID NO: 52239 - DNA, 201 bp, Homo sapiens
attttttcttctatactcaagtatgattttctcaaattatttctatgtatatagctgagtatttgagaacattaaagggtatgacacttgtgtaaagggarttcttctttggatcagtttgatcagtgacaggtggagaaagaaccttattttgcctattttagtttcacaaggtactgttaaaagcaaaaaatgaggctt

SEQ ID NO: 52240 - DNA, 201 bp, Homo sapiens
acacctggcctattgccatttttagagataaaaaaaaaatacatatctcacagagttgtggaaattaaatgagatgatattttcagagtgcttggtatggrtacctactggcatgaaacataaaggtagtcttaatagtatatgatcttttgaatttctgtggatattggtttggactgcatatttctttttttttgagaa

SEQ ID NO: 52241 - DNA, 201 bp, Homo sapiens
tgttcatcatatcactattattatttgtaacaggtatgattcctttgctgatacctgcttttaagtgaagaaacatattcttttataatcagagataattrtgatacacagttagatgtacaatagaaggtattaaaatgtttgttgagatgtgtcgctgatggacagtcccaagacaggtataagtaaaatgctgtagaa

SEQ ID NO: 52242 - DNA, 201 bp, Homo sapiens
caaaagaccaatattttaggcatggctggtagtttattccttacagagcattattcagctgtgctagaaatccaaatttgagattgttccatctttgtgtygaagaatgtaaggcatagttactctgtcttacttgaaagataatgccccttaccagtttttgctaaccactaactatttacttggtaggagaagagttct

SEQ ID NO: 52243 - DNA, 201 bp, Homo sapiens
tgtgtgagatgaaggtctcactcttccatccaggctgggagtgcagtggtatgatcatggtttactgcatccttgacctctgaggctcaagcagtcttccygcctcagcctcccgcgtagctagaaccacaggtgcatgccaccacgcccggcgaatttttcatatttttatagagacgaggtttcgccatgttgtccagg

SEQ ID NO: 52244 - DNA, 201 bp, Homo sapiens
aagctttgtagttatgattattcatcccctctttccattctcacagaaatgtcaggttcaggatagatttttaagactctaaaaataatggttttttggcygggcgcggtggctcacgcctgtaatcccggcactttgggaggctgaggtgggcggatcatgaggtcaggcgatcgagtccatcctggctaacacggtgaa

SEQ ID NO: 52245 - DNA, 201 bp, Homo sapiens
cttagcaaaatgtattctaattctttcctttacaattatcaccttgacctcttttttcccacaacagggagatatctgtatacagctcaaaatgcatacayccaagcatgtgaatcccacactctccccattcatgaggccaaatacagcagtgaggggttggcctctagccttggagttggcagtgggatgacagcaccc

SEQ ID NO: 52246 - DNA, 201 bp, Homo sapiens
ttaatgtccatagtttagatgaggactttatttctaaaccattaagatgaaggtaaataaaatagtaaaaataagaaagaaaacaaactgaattctaaggygttttaggaaatatttaatgataatccagtacaactggaaaattgtttttatcccatgatatttgatttgtgtatttgataaaagaggtgggcagatttt

SEQ ID NO: 52247 - DNA, 201 bp, Homo sapiens
taaaaatcagaacaaatttccttaggaatctgtgtttataacaaaaacatgaactttgaccgtagaatacttttcccattcaaatgaaagataatttaaayaatattttttaaaaggttgatttaattttacatctgtgagtataaatacaaccagttgattcttcaaagatttttgattgtgataataagattgatggat

SEQ ID NO: 52248 - DNA, 201 bp, Homo sapiens
agaggttgcagtgagtcaagatggcaccactgcactccagcctgggcgacagagtgaaactccatctcaaaaaaaaaggaaagacaagggactttgtaaaygcggctaatgttaaggaccttgagatgagggagataatcctggattttctaggtggacccagtctaatcacatgaatcattaaaagctgagaacttttcc

SEQ ID NO: 52249 - DNA, 201 bp, Homo sapiens
atgcatttcaggatttaataaaatatactctaaaatctttttgaagaatgtagttttatgcttacacatttgggattaagctttaccttaacagccatttkttactattcaaactgctgtgtttgtcccacagtcattgaaaagaagagtcaatgagatctgttaaaatacacagtttcaggtcatctactttgcttccag

SEQ ID NO: 52250 - DNA, 201 bp, Homo sapiens
cataactgagagtgaatgtagtgcactgtattcatttagaaaccctaagtgtcagattttctctccctttttcaaaacttactggctaataaccatgtggratacatttagcattggctgcgccagctcacactcctgtagtttctttggaatgcacaaatacggcaagttattgtattttctttcttattttaaaaaaga

SEQ ID NO: 52251 - DNA, 201 bp, Homo sapiens
gggtacaaggacaattaattatttatgtaccctgtgaagatgcctaacttggccaaatgtcaacatctcaagcagtggttgtgcttgtaaaattttaatawtctgtactttcgtagtatactttgtatttctttgcgtggtgtgatattttgtatattttaaaaatgggaagaatttcagatgttttaatatctgttaggt

SEQ ID NO: 52252 - DNA, 201 bp, Homo sapiens
caactagtattctccaaaatttttcaggaatatcagactttactgctgtggaacacttggctgttgtaagaggagtgtttcatctctcataaggatgtaaygaaaggaaattaggagccagtgggagagtgcagggacttaggtgtaaatcataggtgaatctttttttttttttcagatggagtttccctctttttgccc

SEQ ID NO: 52253 - DNA, 201 bp, Homo sapiens
tcaagtgaaaagttcatttccacacagagatgctccttgtcactgcagagcgctgtgagaggtgttttccgcgacgcatccctgcctgggtggctctcgcrtgttggaatgcagtgttttcgctaaccttagtaccaaataacttgtgcttcacttttaaaactagatgtcaccttcagggttttccttgagttagtggag

SEQ ID NO: 52254 - DNA, 201 bp, Homo sapiens
catatcctgtagagggaccctgattactgctgatacagtaagctgggatttaaatgcaatcaacatcaacccaataagtaactcttcatgtgcaatttccyattctttcaagtgaaaagttcatttccacacagagatgctccttgtcactgcagagcgctgtgagaggtgttttccgcgacgcatccctgcctgggtggc

SEQ ID NO: 52255 - DNA, 201 bp, Homo sapiens
tccttgctccgctccccacccccgccccgcaatttttttttgtgtgtgtgtgacagctgggcgctagcggccacctctacctccacgcccgcagctccccgggggggggggggcgccagggttgtttttccatccccacaaagttgttttttccatccccagaaagagagagcaagaacaacccaaacaacaaacaagccc

SEQ ID NO: 52256 - DNA, 201 bp, Homo sapiens
ggaatttatttctggcacgttacttagtgtgtctgatctgaagatgtaccctagtagtgagaccttgtacaagttaacagaacatttactttttggacaaacacacacacacacacaatcccttgtgagcctttagagagtatctgtgttttatatttgtagccgtttcatgtaaactgttcagtcttaatgaagttctta

SEQ ID NO: 52257 - DNA, 201 bp, Homo sapiens
gaatttatttctggcacgttacttagtgtgtctgatctgaagatgtaccctagtagtgagaccttgtacaagttaacagaacatttactttttggacaaacacacacacacacacaatcccttgtgagcctttagagagtatctgtgttttatatttgtagccgtttcatgtaaactgttcagtcttaatgaagttcttag

SEQ ID NO: 52258 - DNA, 201 bp, Homo sapiens
tgtttattacaaagatgtaacaacctacacaaaacatttttctcttataatgaccttacatttgccaaagtgccccatgctgaaattccttttcagtgtctttttttttttttttttcagtccaaagccagacgtgtacccagacacaaaagcctctgtgtatagcaagctgttttaaatattgtgactcgacgatgtgct

SEQ ID NO: 52259 - DNA, 201 bp, Homo sapiens
tctagcatagcctggttctttagaaatacatttgcttaattggctagatgcagaggagaaaaaggatgataatgtggtcattttcaaatcataaataaaayaagtatttgtaaattttgtattggaaaatattattttaaaatcttagagatgaagagaattacctttttaagaattctgaaaacacttgaatagaaaatg

SEQ ID NO: 52260 - DNA, 201 bp, Homo sapiens
tgatttgcatttgcctgatggctagtgatgttgagcatcttatgcactttattggccatttgtgtatcttttctggaaaacagagacatgtctccattggccatttttcacttgggttatttgtctttttattatggagttttaagtgctgtttatatattctgagtacaagccctctgctaggtacaaggtttgcaaata

SEQ ID NO: 52261 - DNA, 201 bp, Homo sapiens
tggtctttgaagcttcccttttgtctgtaaacagcaaccagtcgctgacatgacatatttgtgtacaaaggacagtgataattagatatgctggaatttgtgtgtgtgtgtgtgtgtgtgtgtgagagagagagagagtgtgtgtgaagaaatatggatgagaaactggtagtttgctgcttccttatgggggagggtaga

SEQ ID NO: 52262 - DNA, 201 bp, Homo sapiens
ggtctttgaagcttcccttttgtctgtaaacagcaaccagtcgctgacatgacatatttgtgtacaaaggacagtgataattagatatgctggaatttgtgtgtgtgtgtgtgtgtgtgtgtgagagagagagagagtgtgtgtgaagaaatatggatgagaaactggtagtttgctgcttccttatgggggagggtagaa

SEQ ID NO: 52263 - DNA, 201 bp, Homo sapiens
tcgagaccatcctggctaacatggtgaaaccccgtctctacttaaaaaaaaaaaaaaatacaagaaatcagccgggcgtggtcgcgggcgcctgtagtccyagctacgtgggaggctgaggcaggagaatggcgtgaacccgggaggtggaggttgcagtgagccgagattgcgccgctgcactccagcctgggcgacaga

SEQ ID NO: 52264 - DNA, 201 bp, Homo sapiens
tattttatttttttgagacagagtctccctctattgctcaggctagagtgcagtggctcagtcttggctcactgcaacctctgtctcccaggttcaagcarttctcctgcctcaccctcccgagtagctgggattacagatatgcactaccacgtccagctaattttttgtagttttagtacagacagggtttcaccatgt

SEQ ID NO: 52265 - DNA, 201 bp, Homo sapiens
aattgtgctgaagacagctgtttgaagatttctttaatataaaatctttaatcttaaaccatgctgaggaaggtcagtttggggcagaaaaagagccatgyatttgtcccatttactccagaagaagctaaaaatgatttttgaatagcagctacccttataagtaccaagaaacatcagatgtgattgctgcttttcaca

SEQ ID NO: 52266 - DNA, 201 bp, Homo sapiens
acaatcatggaaatttgaaaaaaaaaaaaaagagactgttactgtttaggtacagaaagaattttaaaaaaattactggagaggtaggtaatacctctgtsagaaaacagatacatggccaggcgcggtggctcacgcctgtaatcccagcactttgggaggtgggcggattgcctgagtcaggagctcaagagcagcctg

SEQ ID NO: 52267 - DNA, 201 bp, Homo sapiens
tgagctgtatgtccagtttctattttggaagtgatgcataggaccagagctgatgagaaactctgggatatagtctaattttctgtcaaacagaacccctsgtggtaaaggtaaaggctgatgttggggtaaaggcactgtacagagattgtctcctgagtttggcttttccatgggctgcctgttcttttggatgtgaaa

SEQ ID NO: 52268 - DNA, 201 bp, Homo sapiens
tgatgagaaactctgggatatagtctaattttctgtcaaacagaacccctcgtggtaaaggtaaaggctgatgttggggtaaaggcactgtacagagattstctcctgagtttggcttttccatgggctgcctgttcttttggatgtgaaaggctagatgtgttctccagcctttctgcacttccctagctcttttctttt

SEQ ID NO: 52269 - DNA, 201 bp, Homo sapiens
agtgtttcctgggtgacaaacctcccctattaagaacactgccttgtatgtgcctcttctgaagtacttacaatgcgtggcgaatatgtccacacgtgtcyatcttcattctgtcagaggtcagtacatctgtggcttctagaacagtactgagatcagagtggcccccagtcagcacgtgttctttgctgcctgactgtg

SEQ ID NO: 52270 - DNA, 201 bp, Homo sapiens
actttgggaggccgaggcaggtggatcatctgaggtcaggagttcgagaccagcctgaccaaaagtggtgaaaccctgtctctactaaaaatagaaaattrgctggacgtggtagtgcatgcctgtaatcccagctacttgggaggctgaggcaggagaatcacttgaactcgggaggtggaggttgcagtaagctgagat

SEQ ID NO: 52271 - DNA, 201 bp, Homo sapiens
cctggcctcaagtgatccacccgcctcggcctcccaacgttctgggattacagtgctcctgcctcggcctcccaaagttctgggattacactgcgcctggsctacttgaatccttttaagccatcattgccctggttaggggttttcccattgctgtttgattttcagattcattaattgaatactaatccactttaaact

SEQ ID NO: 52272 - DNA, 201 bp, Homo sapiens
tttagtgaaacttggatggcatagccttacaagctggtcttacaagttattattttcatggctgaatgctaacagactgcatgtcttgctttatcagagtrtaaagtgagaccttttttttaccttgaatttttttgttgttgttctttatgcaatcatttaaacaatagctctggcatcacttgattgtgctattagcct

SEQ ID NO: 52273 - DNA, 201 bp, Homo sapiens
catggattaatcttttattttgaagtattttatcttttttttcacgttttaagtgtttaaacattttcaaactttgtatttttgattttataagaaggcayggtgaataccacagtgcagtgaaaccactcaaggatcataagggttccattgttaacttaaatgacccacacagaccttatgccctgggtttgattagct

SEQ ID NO: 52274 - DNA, 201 bp, Homo sapiens
aatattttaaaattgagcttaatcattattccagagaatttgataaacacatttagtgaaacttggatggcatagccttacaagctggtcttacaagttaytattttcatggctgaatgctaacagactgcatgtcttgctttatcagagtgtaaagtgagaccttttttttaccttgaatttttttgttgttgttcttta

SEQ ID NO: 52275 - DNA, 201 bp, Homo sapiens
gcgtatttggaaaggcatacaaccactgcagtatttttgccatcatgacattaaaggaaaaacacttgtgatagggtgaataaatacttctgagcagaagyaaaggtcaagctttagagtgaacttttgagtgacagctagtggcttaagggggagacgccatgttaactatgggcattcattaactgcgtggatatgaaa

SEQ ID NO: 52276 - DNA, 201 bp, Homo sapiens
ggaaaggcatacaaccactgcagtatttttgccatcatgacattaaaggaaaaacacttgtgatagggtgaataaatacttctgagcagaagcaaaggtcmagctttagagtgaacttttgagtgacagctagtggcttaagggggagacgccatgttaactatgggcattcattaactgcgtggatatgaaatggcagta

SEQ ID NO: 52277 - DNA, 201 bp, Homo sapiens
tgcagagctggcaatctggggagagagtttctattctcagtttaattcaaggatagtttctgacacctgttaacttcctccacctatgccaaaccaggttytcagtctgattaggggataatttagaatcttaaaacatgttttgaacccatagggagactgtagtttcttgttgagaactgtaagataggaagaactaat

SEQ ID NO: 52278 - DNA, 201 bp, Homo sapiens
gggagagagtttctattctcagtttaattcaaggatagtttctgacacctgttaacttcctccacctatgccaaaccaggttctcagtctgattaggggayaatttagaatcttaaaacatgttttgaacccatagggagactgtagtttcttgttgagaactgtaagataggaagaactaatatgaagaagttacattaa

SEQ ID NO: 52279 - DNA, 201 bp, Homo sapiens
caagatgtttaatttttatttcttcctctacactgttctttaaaacatgaatttgtagctgataaaccttaaagtccttcatagccattactttcttttgrctaatttgtagaaaggcaccatatgaaaattggatttttgatctgatggagtgattcttgagttcttacgagccatttatagtctatcaagtaaatcctt

SEQ ID NO: 52280 - DNA, 201 bp, Homo sapiens
tgagttcaaggcttctgtaatttttcttggcttaaaaaaatattcaaatttatagaatagtaatgatgttggaacgtttgattagattttagtgttccacrtagttgactataataatttctgaactacaatagtttcagctagaatatttccatttattcaacaccacattaatctttacttacttgtcacacagctttt

SEQ ID NO: 52281 - DNA, 201 bp, Homo sapiens
tgctaaggagttgtctaagtagttgagttaaataatttcagattagttttatgcattaaatggtttggttttatttttaaaaacctctgttattatttaaytctgtagtagacatttacaaaataatttttcttatgtgtatttacatggacattaaaaacatcttaagaaattaattttattgatgtttttaagttcagg

SEQ ID NO: 52282 - DNA, 201 bp, Homo sapiens
tttcaccttacctaatgttgggacttccaaatactaagttacctatgaaaatctctatgaagtaattaagatgattagtagtaaatacaataaataagtayacatttttacctcacatttttacacatctaataaactaacattttgttttccttttttcttaaataagaaaccagaagagggcatattagtctttcagaa

SEQ ID NO: 52283 - DNA, 201 bp, Homo sapiens
tggctgaaaagtcatttccacctaatgggttgttaggttgcttctgtacagtaagttggtggttgcagcccacttcctctaagacaaaggtccatgtctcyaaaaccccatcacaactgacactaattggcattgctctcggcccagggctgtgaaagcgggcctgagtgggcatagagtggggagcactgagggggtatg

SEQ ID NO: 52284 - DNA, 201 bp, Homo sapiens
ttttagttttgcctaaagtgaagcatcttagaccagaaaggatgctctaattgttgagtctttattatggcatttgagagctgcttattgctgataaatartgtttatgtactatatgtttagcgtctcaaaattattttcttcaatggagcaattttgcacacagacaaaaaaattgtgacttttggtgtgtgatgttag

SEQ ID NO: 52285 - DNA, 201 bp, Homo sapiens
gataataagattgatggatatattgtgccttagccttatattaaattggcagatttttaaataccggataattagaaatgctattaattctcagtgtagartgctaacctaacatttttgtatgtcttgtgtggtcaatagaataatggccacccaaacatgaccaacttttaagaacttgtgaatatatattttacataa

SEQ ID NO: 52286 - DNA, 201 bp, Homo sapiens
taaataccggataattagaaatgctattaattctcagtgtagagtgctaacctaacatttttgtatgtcttgtgtggtcaatagaataatggccacccaarcatgaccaacttttaagaacttgtgaatatatattttacataagaaatgggactttgggctgggcgctgtggctcatgcccgtaatctcagcaccttggg

SEQ ID NO: 52287 - DNA, 201 bp, Homo sapiens
aggccgaggtggacagatcatgaggtcaagagtttgagagctgcctggccaatacggtgaaaccctgtctctactacaaatacaaaaaggagccgggtgtggtggtgtgcacctgtagtcctagctacttgggaagctgaggcaggagaatcttggaggcagaggttgcagtgagtcaagatggcaccactgcactccagc

SEQ ID NO: 52288 - DNA, 201 bp, Homo sapiens
aatacaaggaagcagattctccttttgagtctcttaaatggatggcagccctgctgatatcttgactttagcccagtgagacctgtcaggcttctgaccawtataactgtaagataagaactgtgtgttttaagccactaaattagtggtaattttttagggtagacatagaaaactaatataccttgctttgtgtttgta

SEQ ID NO: 52289 - DNA, 201 bp, Homo sapiens
taatttataagactttattataatggattgttacaattaattttgcttttaaataacagaacgaacttgatgcgaccttgcaagtatgctttttttttttcctttttaaaatcaagggttgctttgctaccattgtaccaggaatatagtaggcagtcaataattgttggaaaagtaaaattacatagtcaacattttcat

SEQ ID NO: 52290 - DNA, 201 bp, Homo sapiens
ttttgactacttttcctggataatgtagctaaaagtttacatcacctactcttgtaatctagactcctgcccttttctgttaatagggtatgttctgaggyggtgtccccccacagcctcctttccttttgttcactgattatgcattctcttcagtcccctgggtctcctgtggactgttttcctgcacccagtgtgctt

SEQ ID NO: 52291 - DNA, 201 bp, Homo sapiens
ggggattgtgtatttgcatgtgaaatatttagaacagttagccgataatgagtgtttaatcattgtgcattacttttagaataaaattattttatgatgcyttattgacaagaataataactcatatgcacatctttcctcaaagagttaaattttatagctagcggcaaactactgtgacatttcattttgtaagtatag

SEQ ID NO: 52292 - DNA, 201 bp, Homo sapiens
gactacttttcctggataatgtagctaaaagtttacatcacctactcttgtaatctagactcctgcccttttctgttaatagggtatgttctgaggcggtktccccccacagcctcctttccttttgttcactgattatgcattctcttcagtcccctgggtctcctgtggactgttttcctgcacccagtgtgcttctgc

SEQ ID NO: 52293 - DNA, 201 bp, Homo sapiens
gaatataggaaaactacaatcactaaaacagatggccatttagaggttcacttgtagatagattatgaagtgagagacacttggggagaatattaagtcartgtctgtgtgatggtctactctattttaccaaccaaatatttgctacctggttttaaaaatgcaatagcttatgaataagtttgccaagtagtacaaagt

SEQ ID NO: 52294 - DNA, 201 bp, Homo sapiens
atgatcttagtgaatcagttgctgcatattgaaaacaagatggctggggccgggcgcggtggctcacacctctaatcccagcactttgggaggctgaggcrggcagatcacctgaggtgaggagttcgagagcagcctggccaagatggtgaaaccccatctctactgaaattacaaatattagctgggcatggtggtggg

SEQ ID NO: 52295 - DNA, 201 bp, Homo sapiens
aatcccagctactcaggaggctgaggcaggagaatcgcttgaacctgggaggtggagcttgtagtgagtcgagattgtgccactgcactacagcctgagcracagagcgagactctgtctcaagaaaaaagaaaaaaaaatgactatttgaatctataactgaacctataattggaaaatgaaatatggggtgggggaaag

SEQ ID NO: 52296 - DNA, 201 bp, Homo sapiens
acctgggaggtggagcttgtagtgagtcgagattgtgccactgcactacagcctgagcaacagagcgagactctgtctcaagaaaaaagaaaaaaaaatgrctatttgaatctataactgaacctataattggaaaatgaaatatggggtgggggaaagaccctcccatttgtatttacaagaacatttagatctggatta

SEQ ID NO: 52297 - DNA, 201 bp, Homo sapiens
ttttaatgaaaaactcgcattttaaagactttctgctttcattcagcaatgtcatgatttttgaagtttgttttcccttcagcttcaggaatgctttacasagggtcatgtgtggttgccttgttgaattgttcctcacttttgtggtcttatctttgaggagtcctctttagatataccaaggtctgtaggcaaacatta

SEQ ID NO: 52298 - DNA, 201 bp, Homo sapiens
ttggacccaatgttttcttccttctagtactcctcgattccttcctatcacgtctcccttagcagatagccccatctttaactttcctcagatgattattytgttcatgtagctgttgtttattgagcaccctgttagaccctgaattaggaaagataaattctgtctcttttaagaagtgtacagtttagtggaaaaaat

SEQ ID NO: 52299 - DNA, 201 bp, Homo sapiens
tatccatgaccgactggatcccagtgaacactgaattctatgaaagaatagtaactagtcatacacaggggagactgctgaagatgtattaccctttgtaraattattaacatctcacttaaaaaaaaaagcaaaactaatatgcggagatgggggaatctgttttcatactgcactatctcttaatccatttatttaaaa

SEQ ID NO: 52300 - DNA, 201 bp, Homo sapiens
attttatgcctgaattaaagtttgtgtacgtggacatcagaaagcaatggtgtcaggtgtggaattttccacttaggacatgttggtactcaaaaagtgtrggattttagagcattttatgatttttggatttaggatgctcagcctgtaaacttgagggtcaaacttttcttgtgttagttgaaatctcctgggtgcttt

SEQ ID NO: 52301 - DNA, 201 bp, Homo sapiens
gcttatcaaggagataacagtttgggagaacagggccaggaggtgactgaggacaggcaagtgcctttccctccctttattttcttgtagtagattttacytgaaagagtgtcatatatgtggcctttagaaagaaggcatacaaacaagctttgtccagggccacaaaagaagggacctttgaatttccagaagtttcaa

SEQ ID NO: 52302 - DNA, 201 bp, Homo sapiens
gatttgtttgaaggaacacatctggggtgtgatctgctatatcttaacaccagatggcaggtttaggctgacaactaaacccagtttagcctggtcaaacsgtatcttcgtatgtccttttccccctcccctcccaaacaatctatgcacaggaagtagaacaattatttgcactccaggctaacagtcctcttgtatctg

SEQ ID NO: 52303 - DNA, 201 bp, Homo sapiens
tctctaggtaccatctttgaaaagtggttgcatttgggctgtgagtgcataaatgacatacctcctcattcggctgagtaaattaacgagaatttttagtrtaaagtaaacttccactgattcgtatctttggcaggcacctctctctttacagaaagaaaaaaaaaaagaggggtaagaaaaaagatgtgatttgtttga

SEQ ID NO: 52304 - DNA, 201 bp, Homo sapiens
tgcatggtggtaagtaagatccagctgcaggggattatggctttgagtgggtcggggagcttggaatgcattcagttccatcaggggatttgtgtccctcrtcatcagccttaacattgctaacacagtaaagattaggaacagaccagtgtcacctgccctgaactttgaaaaaccctggaaccattaaacaaaggggtt

SEQ ID NO: 52305 - DNA, 201 bp, Homo sapiens
caggtcccctggtgcctcgtgccggctcctggctcgcctcccttctgctctgcccagcccaccccgccgcccccctgctcacacatgcggcctctcccccrcgccccagcctctggagtcgcttcggggccatctagtcatacgctgtccatcagatgtgtttacttttttcctgacagccgacacatctggagcacatat

SEQ ID NO: 52306 - DNA, 201 bp, Homo sapiens
aggccactcaggggagggacgcgggcggaacagtcgcgctcagtcctcccaggccgccccaggccccaggtcccctggtgcctcgtgccggctcctggctsgcctcccttctgctctgcccagcccaccccgccgcccccctgctcacacatgcggcctctcccccacgccccagcctctggagtcgcttcggggccatct

SEQ ID NO: 52307 - DNA, 201 bp, Homo sapiens
caccaccatcaaaaaagacaacatattcggatcaggaatgtaatcacccagtcacctaataaaaagagtgcttgagtatgcatatggaacaaaaaagcaaraccattcatttggtaaagggtgagtaggggccaggagacagccctaccctgaagatagaatgctttaaaaacatgttgccattaatatttaagacagaaa

SEQ ID NO: 52308 - DNA, 201 bp, Homo sapiens
tcttgctctgttgtccaggctggagtgcagtggcgtgatctgggctcactgcaacctctgcctcccggattcaagcaattcttttgcctcagcctcccgaktagctgagattacaggcgcccaccaccatgcccaactaatttttgtattttagtagagatggggtttcaccgtgttgaccaggctggtcttgaactcctg

SEQ ID NO: 52309 - DNA, 201 bp, Homo sapiens
aaaagcattagggagagtctctatggagcttgatgcaattggtgtgacattgtctaagaaaagttggtggcttgaggaaccataacccaggagcacttgaytgagtttttaaaacacacagtagattaaggacagaagtgtgtcgagttcaaccaccaaatctgttcatatgggtatcttataactcttggaacttgaata

SEQ ID NO: 52310 - DNA, 201 bp, Homo sapiens
tcactgcaacctctgcctcccggattcaagcaattcttttgcctcagcctcccgagtagctgagattacaggcgcccaccaccatgcccaactaatttttrtattttagtagagatggggtttcaccgtgttgaccaggctggtcttgaactcctgacctcaagtgataaaactgcctcggcctccaaagtgctgagatta

SEQ ID NO: 52311 - DNA, 201 bp, Homo sapiens
agggacagaaggttgaaattgtcaagaagagtgtttttggatttgttaatcttggtcctctttgaaggcagagtgcttctaagagaagatcttattcatcrtctgatgaataggtcagttgtcacttgggaggagggagcgaaattggtggtggcaagagaagggtggatttgtaggaagcatatcactttcctgagggtt

SEQ ID NO: 52312 - DNA, 201 bp, Homo sapiens
gagaggcaatttctaaaactgctaaaatcaatccctgtaggcctttagagattaaactcactacctcgtgttataaccagatgaaaataattatgtactgyagcctgctgagtggggtgaaatagatttctagtgccaggattcttaactaggtgggatgggtgctgtgttttactgaagactccctgcagttgaaagatt

SEQ ID NO: 52313 - DNA, 201 bp, Homo sapiens
gggtttcaccgtgttgaccaggctggtcttgaactcctgacctcaagtgataaaactgcctcggcctccaaagtgctgagattacaggcgtgagccactgygcctggctgaaaataattgttaaaaatctttaattttatatatacatacatatatatacacacacacatacatatatatatatacatacatacatatata

SEQ ID NO: 52314 - DNA, 201 bp, Homo sapiens
ttctcttgcctaggctggagagcagtgtcacgatcatggctcactgcagcctcagccttccaggctcaagcaatcttcccacctcagcctcctgagtagtwgggaccacaggcatgtgccaccacacctgggtaatttttaatttttttgtagcgatgggatctcactctgttacccaggctgatctcaaacaaccgggct

SEQ ID NO: 52315 - DNA, 201 bp, Homo sapiens
gaatacaattatatgaaattgggattgttgtggaaaatcagagacgtatgtttgctataggtataatattagtttttcagcatcaagagtaaaacaagtgraattacctctgaaattgcagctaactattgctacctctataccagaaatattttttcatcttttcataccacatgtgaaaactttgttgttgttgttttt

SEQ ID NO: 52316 - DNA, 201 bp, Homo sapiens
tgaagagtttgcttcctggagcatgggttcttttgatctcacaaatatcactattctaaagtaacctaccctgtcctttatcttaacattctgaaactgaygttggtgactctattggttcttcttggctaaaaagttttgctactttccatgttcattctttttaatttttggtactttgagtatcatgataaattttac

SEQ ID NO: 52317 - DNA, 201 bp, Homo sapiens
cagagtgaagagtttgcttcctggagcatgggttcttttgatctcacaaatatcactattctaaagtaacctaccctgtcctttatcttaacattctgaarctgacgttggtgactctattggttcttcttggctaaaaagttttgctactttccatgttcattctttttaatttttggtactttgagtatcatgataaat

SEQ ID NO: 52318 - DNA, 201 bp, Homo sapiens
caaaaatggaggggaacggaattactctctataaaaataaatttatcttctgacattctctggagccctttgctaacaaggtttaaatggatcttttttcyaaagcccttatcaccataacctctcagctagagagccgttttgggttcaactgcaggttgagctgagtgaccatctaagcagcacagggactagcagccc

SEQ ID NO: 52319 - DNA, 201 bp, Homo sapiens
taggttgtcatgaggattctaagtgaaaatttgtaaaatgttcttaaaatagttcctggtgcatactgagtgtatagttggtatgatggtatgtagttgatttttttttttttttttggagggtcaaggtcttgttctatcacccaggctggagtacagtggcatgatcttggctccttgcaacttccgtctcctgggcta

SEQ ID NO: 52320 - DNA, 201 bp, Homo sapiens
caaaaatgctgggaatatacgtgtgagccaccatgcctgaccctgaaggtgattttgcattgtactattttgtgggggtatggaccacaaaaatggagggsaacggaattactctctataaaaataaatttatcttctgacattctctggagccctttgctaacaaggtttaaatggatcttttttctaaagcccttatca

SEQ ID NO: 52321 - DNA, 201 bp, Homo sapiens
gagtaatattgtttccatctgtttagaaaccaaaatttagcttttatcccttcatttcaggggtggatttttgcttctccaaaatagatcttaaatcttaygtgtatattttaagcaaattattattgcattttaggagtcttagccagaataaaatctgattacattttcaattcataaaattacattgtgaccccagaa

SEQ ID NO: 52322 - DNA, 201 bp, Homo sapiens
tccctcattctcaaaaatctcatcatggttgcacttggatcaagcttcttcataaagtcattgtcatcttacacttttcccagaagcgtcaccctaggggraaaatgattgtgtaatagaaaaactctctctgcattctatgcattgaccattcattatcttccatttggctaccctttgacctcctttccctgagccaca

SEQ ID NO: 52323 - DNA, 201 bp, Homo sapiens
ggagtgcagtggcgcgacctcagctctctgcaacctctgcctgcaaggttcaagtgattctcctgcctcagcgtcctgagtagctgggattacaggcgccygccaccacgctcggctaatttttgtatttttagtagagacgggatttcactatgttggccaggctggtctcgaatgcctgacctggtgatccacctgcct

SEQ ID NO: 52324 - DNA, 201 bp, Homo sapiens
gaacgtcatttttcctgcattaagaggtgtctgatgtgactgaaattgctgggataactcaaactgctgcatttaaaatatttagaacagaatacactgtscaaaaccttcttatctgacttggctaatggttcaggctctggaaaataaatttgggggcatgggggatgggtaaaaaagaacagatctagtataaaattg

SEQ ID NO: 52325 - DNA, 201 bp, Homo sapiens
ctattcacggtgaaaacaagcatttacccaagcatttgaccagggtaatgtgtgttttagtttcaggtagtagaaactgaagtggctttgtttcacagtgrcatttaggaacattgactaaaatataccgggctgtttaaagttttgttttcttttttccccctctcccttacagtactccccctgactccaaattctcca

SEQ ID NO: 52326 - DNA, 201 bp, Homo sapiens
tcctggaagtccttattgcaagtatgactgaaaaactaatcatggaaatatgtgtttttttcaattagttacagatgatttactaggagaggttcaacagktaggaagtatttgtttacagatcgtttaggattataatttttaagaaatgaaatgcctacttagtaaggatcatgtttgtaatgatactaactccagagt

SEQ ID NO: 52327 - DNA, 201 bp, Homo sapiens
atgtcctcttcatttctgatgactttctgtggtgaggagggttcacttagaacctgggacaaatgagagttggttgagtaggatcaaacttaataagaatyaaggagacattaaatatattcttgaactggttttctaggattcttttttttttttttctcctgaaaggaagagctgggccaaagttttaaaaatcaagac

SEQ ID NO: 52328 - DNA, 201 bp, Homo sapiens
tagctgcaaaattctcttttgctcagggaaaacagcttttagctgcctcctagttttggtgaggcagctggattctggtctctccatgagcaaagtccttrgacttttttcttcgttttagagagcaaaagcaaggccattttcctgcctggcacaggaggcttttttgggcttgacctgagggcacagtgccctcttctg

SEQ ID NO: 52329 - DNA, 201 bp, Homo sapiens
taaaataaattatagtaatatttacctgctaaaaatccaaaagctataagtaggtgaattttaggtaggattaaggctacttttacctattttcacacctrtctttttgcatgtgaagtgcttcgatgggctcgccactttatcattttattgcattttattacatcataaatttttatatcttgctaacgatcctacagg

SEQ ID NO: 52330 - DNA, 201 bp, Homo sapiens
ttttatatcttgctaacgatcctacaggaagcttaattgtttataggagcatcttaattaactggagttcaccaggttaagcagaacacaaattgaagggkttataaatgaaacacactcaactcctctccttttactcaggataaactaggagattcggctgggtcgtaaggaccccatatgcctcagcaatatcatgtt

SEQ ID NO: 52331 - DNA, 201 bp, Homo sapiens
tgtattttttgtagagatagggtttcgtcttgttgcccaggctggtctcaagctcctagatgcaaatgatcttcccgcactggctcccaaagcactgagaytacagctgtgagcctccgtgcccggccataaattatatttccattagacgtggtaatcgtaggctctaggtatgagagaatatatttggagagctaaagc

SEQ ID NO: 52332 - DNA, 201 bp, Homo sapiens
agacgtggtaatcgtaggctctaggtatgagagaatatatttggagagctaaagcctaggttaaagtggtttggtggcagagtagttagaattggtgtgakaatcctaacaccctaaatccaggctcttgtcccttgagtcaccactgtaaactctttcccagtttttcgtactttgacgcttgctgcactattgatcctg

SEQ ID NO: 52333 - DNA, 201 bp, Homo sapiens
ctgatcatcttcactgctgcctccattcagctcatgtctgagagcctccaaccctcttctgggcactcggaacaagaccaagctgtatgtggtacattctrtgaacgacaaactttgaaaatgcaggtataaagaaaagagcagacagtttccaataatggaaattgaggaaagaattacaaggcaccctggcacccttgt

SEQ ID NO: 52334 - DNA, 201 bp, Homo sapiens
tttctttgcgtggtgtgatattttgtatattttaaaaatgggaagaatttcagatgttttaatatctgttaggtggaaagtataattctttttcaattacmtggattaatttttttttttttttgagatggagtcttgctctgtcacccaggctggagtgcagtggtgcaatctctgctcactgcaagctctgcctccaga

SEQ ID NO: 52335 - DNA, 201 bp, Homo sapiens
cagtcagcttgtttattatttctcacgcttttgtgggaaccaggctgagttctactatttgccatttctgttactcatttcttactgattcagagtttcattttttttttttgaaatggagtttcgctgttgttgcccaggctggagtgcagtggcgtgatctcggctcaccgcaacctccacctcccaggttcaagtgat

SEQ ID NO: 52336 - DNA, 201 bp, Homo sapiens
ttgggtcaagtaattcattgagcaaaaccgtaggctgtaggttaggtatacagcttctcctccccatagggtttgtgtaaatttcccaaggcctgggaaayttctctgtaattccggagggctccacttatcctggagcacccacttagagcctgaaaatgccacaggttggtctatacttcacagcatcagggttttctc

SEQ ID NO: 52337 - DNA, 201 bp, Homo sapiens
gatatcccctgagatactaaccttggccacttgttttatctcttgtttcaggtctgtgtagatggctgctggatgtgataacttcagtatcagtctgtttkctaacatttccagttgcctggttatctgcatgatctgctgttccccccatactaaacttgctatatattctcacaaactagttcatccccctttctgttg

SEQ ID NO: 52338 - DNA, 201 bp, Homo sapiens
ttttcataaccaccatctctgttttacctgaatagaaagagcacaatcagcccatatctgtgactacacagggttggccctgatcttagggtggcagtggrtgagcatccactgtcaactctcctgtatctctgggtgttcagtgcctcgcattctgagatttggcccataccttccaggttagcattgagccatgggact

SEQ ID NO: 52339 - DNA, 201 bp, Homo sapiens
tgttgtatgtttctccagaaaaagaatcagtcttcatagaatatacaattattttgtacgggaatgtataactcctacctaagatccagtcttccctgttkatgtgcactagtgcaaaaataattggcaaacacatcctccagaccaaaagattccagcaccttcaatttgttgggcttgaagacgttgaaccagttataa

SEQ ID NO: 52340 - DNA, 201 bp, Homo sapiens
caaccagatactatattttaaatgttttggtttgactaactactgtttgtagtttttgtcaactgagggagttactctcgttttaggaggccagtcttcaragttctattaaaagtagcttcctacgaaatcaccgagaagtgggttaacttcttttagtttatgaaggacaaccccttttctgtaaatgatggttttgga

SEQ ID NO: 52341 - DNA, 201 bp, Homo sapiens
cattgaggacattgacaaaaaatacttggtcctgcttcaagatggaaggacacttaatagacttaagaagtattgatcaatttggacttggaaaatgagartgacacacccctccagcaagtatccattgaagaaatcctagaagaccaaagcgtggaccagcagaccaggctggaagtagaggaactgaaagttcaggcc

SEQ ID NO: 52342 - DNA, 201 bp, Homo sapiens
gacatgtgccacatgttgatatgcatcccagggataaatgcacaacatgggggataggccgacgctggcagtaatgagctttgtaggagttattgcaaagwccaacagtttgtgaaggaattttgcttaacaggccaaggagatagacagagttgagggttgccaagatttgcctgtgcggggcttgtcagtcacattgtt

SEQ ID NO: 52343 - DNA, 201 bp, Homo sapiens
aaaaaatttaattatacaaaattattattattattatcattattattatttttttgagacagagtcttgctctgtcaccaggctggagtgcagtggcacartctcggctgactgaaacctctgcctcctgggtcccagcaattcttctgcctcagcctcccgagtagctgggactacaggtgcacgccaccacgtccagat

SEQ ID NO: 52344 - DNA, 201 bp, Homo sapiens
aaatgtggtataatctattttaattgtctcccttaatttcaacttacttctgtttatttgcaaattgtgtatttaagacattaacatatttaataccctgwtattggatatatttaactttctactagcttcatgctttcagagttttgaactctgaaaacacaagcagcattaagacctgtcttttgcttaaagtactga

SEQ ID NO: 52345 - DNA, 201 bp, Homo sapiens
aaagcagttgaattacacaattattatatgtttttaaattgtagttacatatttttattggagtcatggtccacaaattataaggttaactattatcatgkatcatgcagaggagatgaaaccacatcaaagtttcctaccgtccactctaagctgcagttcaagtttctaacacgtttttgcttcttataagtggatgag

SEQ ID NO: 52346 - DNA, 201 bp, Homo sapiens
atttatggtgagcagtgtgcagaatgttttatttactttttcaaagcttatgaataaaagcaacatctgaatctgatctttgggaaccaagttcaggaaawgtggtataatctattttaattgtctcccttaatttcaacttacttctgtttatttgcaaattgtgtatttaagacattaacatatttaataccctgttat

SEQ ID NO: 52347 - DNA, 201 bp, Homo sapiens
aagcgtagctataacataagcataaaccattgtgatttgcataatttatctcttcagcataaatattgtacttgtagagtaacatttttgtcctggaaatyagattttggttgtctgagtatttgtgggactggaggaggttttaggtttatgtttgtgtttagattaaatttgaatggtgagttaagatttatggtgagc

SEQ ID NO: 52348 - DNA, 201 bp, Homo sapiens
ccaggaccgtctggatctcctgacctcgtgatccgcccgcctcggcctcccaaagtgctgggattacaggcatgagccaccgcgtccggccaatgttaaamattttcaatttgacatgtcagatatttggatgtattattttaaagatcttttgtctcatcttcataggagtgccccagatctccctgtttcacctgtgat

SEQ ID NO: 52349 - DNA, 201 bp, Homo sapiens
caatattaaaactgtcctaaatagtaaaattgtttaatcattagacaacctgagctttatgtaaatttgtagactcttgaaacttgtcgtatgcagaagcrtaagcgtagctataacataagcataaaccattgtgatttgcataatttatctcttcagcataaatattgtacttgtagagtaacatttttgtcctggaaa

SEQ ID NO: 52350 - DNA, 201 bp, Homo sapiens
ctgcactattgatcctggccagtttttcctgtgccttgttcatcaagaaagtgggattcccacccctttactcccctctgcaccaccactccccacccccrgagcaattaagtgctcccttctttattttctcaatacactttgctgagaccagaggtttctgggtaatactgatccttccactaacttgaaaagctcagg

SEQ ID NO: 52351 - DNA, 201 bp, Homo sapiens
caagtaagtggcagagctgggattagactctggccctagagactctgtctttaatctggaagacaacgagcatcttttaaaaacactggaaacatgaaatygttgctttctgtcattattttttaaccttaactgttgtttccactccttttcccccaaataacattaccataaatgttcactggaaagtcttttatcact

SEQ ID NO: 52352 - DNA, 201 bp, Homo sapiens
caagctttgcatgcaaagaaaaccgtgttgattcattgatcttcgacatgctacattatgagccttggcagaaggtaaaggctcccctggctcccctgttkagagcagccggaattcctctggtctgttggtaccatctgtggccttccttcaggctcagtcttcatagtaagtctaactcatgtcaaatgggccaaggtg

SEQ ID NO: 52353 - DNA, 201 bp, Homo sapiens
atgcatgcctacaatgaaaattaataaaatatttagaaatagaaattttattttaaaaactgtcatcacagtgataaaatccaagcgatataaatattacwaattttaacaatttgttaaacataaagtgggtttttgttagaaatgtatctgtcagtgaagtatctgccggtgaaatagttgggactataaatttttttc

SEQ ID NO: 52354 - DNA, 201 bp, Homo sapiens
taccatatagaatataagccaagtatctacctttattttgtaaagaaggaagggtacaattttcagaagagaaacaagaatgaattcatgtacttggaggmccattctcaagtggatcagttttagagtaaatatggaactgcaagatctggaaattgggtccttgtgtttgcatacctcatggaaggcctttttataccc

SEQ ID NO: 52355 - DNA, 201 bp, Homo sapiens
cacaattttcaaagttaaaacaaccctcttacttctgaactttcctgcgttggttggttctggctctgtggccaaggttcatccagtaccttcaccagctwttgttcctgctggataggtgtcatgtctcccatgtgacaactattgctttaattaaatttctgcactcttatcagaattttacatctaaaactaaaaatc

SEQ ID NO: 52356 - DNA, 201 bp, Homo sapiens
acaatggaagaagaattggcttgggccacacataaaatacactaacacactaacgatagctgataaactaaaaataaatggcaaaaaaaaatctcatttawgaaagtttatgaatttgtattgggccgcattcaaagccatcctgggccatggtttggacaaatttgctctagaatgatgcctgatatatagttgatactt

SEQ ID NO: 52357 - DNA, 201 bp, Homo sapiens
tacactaacacactaacgatagctgataaactaaaaataaatggcaaaaaaaaatctcatttaagaaagtttatgaatttgtattgggccgcattcaaagycatcctgggccatggtttggacaaatttgctctagaatgatgcctgatatatagttgatacttaaagggttattttctttatactcttcctcaccattat

SEQ ID NO: 52358 - DNA, 201 bp, Homo sapiens
cactaacacactaacgatagctgataaactaaaaataaatggcaaaaaaaaatctcatttaagaaagtttatgaatttgtattgggccgcattcaaagccrtcctgggccatggtttggacaaatttgctctagaatgatgcctgatatatagttgatacttaaagggttattttctttatactcttcctcaccattattt

SEQ ID NO: 52359 - DNA, 201 bp, Homo sapiens
gatgacaggcatgagccaccgcacctgacgttgaaattactttttaatcagctagaaaagtacctcaaagggtagttgtaatagaactcttttagttccarcttacagaatgtgacttcaagtagacagtgagaaaatggcagaggggacagggagaggtagtggagggacaaggaaatacagattttgttggctcatgta

SEQ ID NO: 52360 - DNA, 201 bp, Homo sapiens
ttggccacttgttttatctcttgtttcaggtctgtgtagatggctgctggatgtgataacttcagtatcagtctgttttctaacatttccagttgcctggytatctgcatgatctgctgttccccccatactaaacttgctatatattctcacaaactagttcatccccctttctgttgataatgctaccattttcctgtg

SEQ ID NO: 52361 - DNA, 201 bp, Homo sapiens
tctctatcaaggccagtagattgcttgagagtaggagttcccagacttgcctgggcaacatagcgagaccccatctttaaaaaaaaaaaaaaagccaggcrcggtggctcacgcctgtaatcccagcactttgggaggctgaggtgggtggatcacgaggtcaggaaatcgagatcattctggctaacatggtgaaacctc

SEQ ID NO: 52362 - DNA, 201 bp, Homo sapiens
cgaggtcaggaaatcgagatcattctggctaacatggtgaaacctcgtctctactaaaaatacaaaaaattagccgggcgtggtggcgggcgcctgtagtsccagctactcgggaggctgaggcaggagaatggtgtgagcttgggaggcggagcttgcagtaagccaagattgcgccactgcactccagcctgggcaaca

SEQ ID NO: 52363 - DNA, 201 bp, Homo sapiens
acctcgtctctactaaaaatacaaaaaattagccgggcgtggtggcgggcgcctgtagtcccagctactcgggaggctgaggcaggagaatggtgtgagcytgggaggcggagcttgcagtaagccaagattgcgccactgcactccagcctgggcaacagagcgagactgtctcaaaaaaagaaaaaaaaaaaaaaaaaa

SEQ ID NO: 52364 - DNA, 201 bp, Homo sapiens
gctactcgggaggctgaggcaggagaatggtgtgagcttgggaggcggagcttgcagtaagccaagattgcgccactgcactccagcctgggcaacagagygagactgtctcaaaaaaagaaaaaaaaaaaaaaaaaaaaaaaaggccaggtgtggtggctgaggtgggagggttgcttgaggccaggagtttgaggttcc

SEQ ID NO: 52365 - DNA, 201 bp, Homo sapiens
aggagaatggtgtgagcttgggaggcggagcttgcagtaagccaagattgcgccactgcactccagcctgggcaacagagcgagactgtctcaaaaaaagaaaaaaaaaaaaaaaaaaaaaaaaggccaggtgtggtggctgaggtgggagggttgcttgaggccaggagtttgaggttccagtgagctatgattgtgcac

SEQ ID NO: 52366 - DNA, 201 bp, Homo sapiens
ggagaatggtgtgagcttgggaggcggagcttgcagtaagccaagattgcgccactgcactccagcctgggcaacagagcgagactgtctcaaaaaaagaaaaaaaaaaaaaaaaaaaaaaaaggccaggtgtggtggctgaggtgggagggttgcttgaggccaggagtttgaggttccagtgagctatgattgtgcact

SEQ ID NO: 52367 - DNA, 201 bp, Homo sapiens
tgctgatcatcttcactgctgcctccattcagctcatgtctgagagcctccaaccctcttctgggcactcggaacaagaccaagctgtatgtggtacattstgtgaacgacaaactttgaaaatgcaggtataaagaaaagagcagacagtttccaataatggaaattgaggaaagaattacaaggcaccctggcaccctt

SEQ ID NO: 52368 - DNA, 201 bp, Homo sapiens
gttaatgtattactttgaagcatcttttctttttttacagttagaaattcaccaaaactatatttcaaacgtagctctttttaattttatactaaattaattttttttttttttttgagacggtgtctcgctctgtctcccacgttggagtgcagtggcgcgatctggggtcagtgcaagctccgtctcctgggttcacgc

SEQ ID NO: 52369 - DNA, 201 bp, Homo sapiens
ttaatgtattactttgaagcatcttttctttttttacagttagaaattcaccaaaactatatttcaaacgtagctctttttaattttatactaaattaattttttttttttttttgagacggtgtctcgctctgtctcccacgttggagtgcagtggcgcgatctggggtcagtgcaagctccgtctcctgggttcacgcc

SEQ ID NO: 52370 - DNA, 201 bp, Homo sapiens
agactttctctaggatactctagtcattgagattggaggcttttaaaaacacctctgactttgccagtgctcagccccaaaacttcatttattgcagactstctgtattcagagtaagcccttacctctgtgctcagtatccctccttgagtgtaggcttgcttacctttctacctccatctctttctgacactcttttga

SEQ ID NO: 52371 - DNA, 201 bp, Homo sapiens
atagctctgtgtattcatccatccatcgatcatccatccatccatctatccatccatcatttcatctgtctttaggctattttccatagtttgttgccctrgatttggagacttgatccagcacagagctattgtccacttgggttattggggtttccctttctaagtagatgatcaaaatccatggtgaaaacatgcttg

SEQ ID NO: 52372 - DNA, 201 bp, Homo sapiens
acatcactcttttaactccttttcattcccactgacctactataggcttgttgcagtacctgcccactttaactttagactttctctaggatactctagtsattgagattggaggcttttaaaaacacctctgactttgccagtgctcagccccaaaacttcatttattgcagactctctgtattcagagtaagcccttac

SEQ ID NO: 52373 - DNA, 201 bp, Homo sapiens
tactaaaaaaaaaaaaaaaaaagccgggtgtagtggtacaggactgtagtcccagcaactcaggaggctgaggcaggagaattgcttgaacctgggaggtsgaggttgcagttaggcaataacgagccactgcactccgacctgggtggcagagcaaaactctgtctcaactaaaaaaaagaaatacatagcaagaatttc

SEQ ID NO: 52374 - DNA, 201 bp, Homo sapiens
ctacagcttttcatctcccctagttctcaccccagttgagatccatgcatttgggatgggggtgggggggtatcccttagaaatcaactttgtatgcgttygcacatttttctctttttagtctggggtcctcagcaggcttggaggggggattgtgtagtacacagtatgacttatgtttgacttgggaaaatttttcct

SEQ ID NO: 52375 - DNA, 201 bp, Homo sapiens
agcatgtaacatttgtgtgctgaatggatcatggagaacgcatgagctccttagtttacatttactcatccagtactccagtgctcacaatatactagggttttttttttttttaaaccattttcaatgcaatttaagagaatattttagaattaagttttcacagttttgtagttttttttatttcacagttttgtagtt

SEQ ID NO: 52376 - DNA, 201 bp, Homo sapiens
aggtgtctgtggttcccgagactaccctcttcctgccttcctttcagcttcctcagaggaccagcaagctccagttcttctaaataggtgcacaggcccasaggtggattttccttcaaggccctgggaaaaggccccagcaatgtgttcacattgccatttgtttctgtcaagtttttgtgtatttttatttttgcatac

SEQ ID NO: 52377 - DNA, 201 bp, Homo sapiens
ctgtgtgtagtctgggcaatcttagaagttattcgtgattgggccttgtttttcctttatacctataaccacttttccccttcatatctttgaagacatamtcttaattaaaacactttcttgaaacctactctcttctatttattccaaaattttaacacacttgcctttgtatgttgacaatgcttaaactttgaaaat

SEQ ID NO: 52378 - DNA, 201 bp, Homo sapiens
actttctttgtattttacctctgtcaaatgagattcttagaagagtaatcagccattctaagccactccactcttttgacttatattttcatgggtaattktaactctttgggtgctgtccagaaagtttactgctgcttctcacaagggaaggtgtctgtggttcccgagactaccctcttcctgccttcctttcagctt

SEQ ID NO: 52379 - DNA, 201 bp, Homo sapiens
ctgcaaccttaacctcccaggctcaagtgagcttcctgccttagcctcccaagtagctgggaccacaggcatgtgccaccactcccagctaatttttgtattttttttttttgtagagacggggccgctctgtgttttacaggctggtcttgaactcttgggctcaaacaatcctcctgccttagcctcccaaagagctgg

SEQ ID NO: 52380 - DNA, 201 bp, Homo sapiens
taagttcccatatgttttctgtaaaaactagcgcacactttctttgtattttacctctgtcaaatgagattcttagaagagtaatcagccattctaagccrctccactcttttgacttatattttcatgggtaattttaactctttgggtgctgtccagaaagtttactgctgcttctcacaagggaaggtgtctgtggtt

SEQ ID NO: 52381 - DNA, 201 bp, Homo sapiens
tgcagtccttaaaaaaaagtgtagctggggagaaaaggaacatgtaaaactgtaaaattgctaatgctgtcctagtacatgacaatttcccaccatggaakgctccatggggaggacgatgggcctgctcagcctgatcttacggtacactgcttctcttcttagggaaaggaattccccatttcctgaatgtgaaacgcc

SEQ ID NO: 52382 - DNA, 201 bp, Homo sapiens
atcactgttactcgtctctagcctgtcctgtttaatcactgattgtcagatcttttgctctttccagttccttcccactaagaagtaggagaggggagaayctgcccaaccacgtgggtttggggtgagttttgggatgggggaagggaattagactgttgcagggtgggagttattgtgccgcagatcaatgaccttccc

SEQ ID NO: 52383 - DNA, 201 bp, Homo sapiens
gtagaagcataaggattttaaaataataaaagatttctgaattctgaaaataatcccatgatttgtgtaagtaattgatgtagatgaaaagccgaattcarctataaaaagcttttcgtctcaccttaaagcggtagattcttggccctgaatctttgtgggattgctataatttaccaagcaattgattatgatgtcaca

SEQ ID NO: 52384 - DNA, 201 bp, Homo sapiens
tctgccatttattattttcaagggagcctggaatcactgttactcgtctctagcctgtcctgtttaatcactgattgtcagatcttttgctctttccagtyccttcccactaagaagtaggagaggggagaatctgcccaaccacgtgggtttggggtgagttttgggatgggggaagggaattagactgttgcagggtgg

SEQ ID NO: 52385 - DNA, 201 bp, Homo sapiens
tgtaagtataaatgtcagatggtggcatacatgtggagtcagtaaagatgaatatttgctgtgataatagtcatgcatcttaaatgttgacttttaaaatwtaccttgaagacatatcctattttcatattacagtacattttcacttaagtacatgatagctctagaaaggaagtgtggaagtgttaacatgtgaaggaa

SEQ ID NO: 52386 - DNA, 201 bp, Homo sapiens
gaggcacaaagaggtcaagtaacttgcccagtgacagacagctaattctggcagagctgggatttaaactcaggcagcgtggctccagagtccgtactctktcatgcacatcatgctgttttcagaattctagaatgctagcaccaggccgacttaggaaaattattttgtttccccgttcttcattttacagctaatagg

SEQ ID NO: 52387 - DNA, 201 bp, Homo sapiens
agaagttttaaaatgtgcagatggcatcccagaaatgatgtctggggccatgacatccagggtccccacatttcctcctcattgagcctgacctgtactgycatctttctccccaggtttaaagaaagtttaacgaataggaaaaataaaagtattgattattttttaatttgtgcgttccctgtaggaagcctcgcagat

SEQ ID NO: 52388 - DNA, 201 bp, Homo sapiens
tcatcttgtttaattcctaaatgggcatatgcatataattctgacagttttgaatgccttttgtgttctcttaaggagtttagagtgcctctcactcgttwtctcactaatctttgcagcatctctttaagccctacagataagacagtgttattgcttgagaaactgaggcaaaatgtaattatattatcagcaataggg

SEQ ID NO: 52389 - DNA, 201 bp, Homo sapiens
aaagatgcaggaaaaataagatgaaaaaaatctgctaagcagctcaaggtctaagaagttttaaaatgtgcagatggcatcccagaaatgatgtctggggycatgacatccagggtccccacatttcctcctcattgagcctgacctgtactgccatctttctccccaggtttaaagaaagtttaacgaataggaaaaata

SEQ ID NO: 52390 - DNA, 201 bp, Homo sapiens
acaaagtgacttgttatttctttctttttaaaattatgactttaattttcttttttatcctgaataactttcagaaaacatgccaatgaacacaaaagctrtctaacaggtgactaacgagagaaattgagagaactaagtttttggataaccccctatagctaatatgacttgacttaaattactagccctccacacaga

SEQ ID NO: 52391 - DNA, 201 bp, Homo sapiens
tggtcagaagattgtttgggggtcctaggaagtgatggatctcactactgtctgccaaagctgatgccattttttatttccagaaaagcagctggcttctrcattttgctgggcgatcttcatctactgtaaggaccctggagacaggagaaagggagtcaaagaccctttcaagaaactgacatctatttttaagcttta

SEQ ID NO: 52392 - DNA, 201 bp, Homo sapiens
atattcttatttaatcaaagccctgagtaaagcagctgatagttaatggtctttgaaaacgactttcattgccaggcatcatccatccctagcttgctttstgcagttttctccattttttactcccttccttacagttagtatgtttggatgatcttgtcttactaaaaaaggattaaattgactaaacttgtggtctta

SEQ ID NO: 52393 - DNA, 201 bp, Homo sapiens
tgagggggaacaagatctaggaggaaggggccaggaaaaataaatcaggaactggtttcacaatccctgcttatactggccccaagatgcatacagtgctrcgtctttctacagtcatttctacagcgtgattattaatgtctgttttgaatggattttaccctacacaaagagaaaaacctcttacagttgtttgtatgg

SEQ ID NO: 52394 - DNA, 201 bp, Homo sapiens
atatggtaacttaagtatgcagaggcattgaacttgaacattttgtgttctggaacgtggggtttggattcttggtataattttcctattttatttttatyttattttgagacggagtcttgctttgtcgcccaggctggagtgcagaggtgcgatctcggctcactgcaagctccgcctctcaagttcacgccattctcc

SEQ ID NO: 52395 - DNA, 201 bp, Homo sapiens
ctgcaacctctgcctcccaggctcaagcgatcctcctatctcagcctctcaggtagctgggaacacagggacatgccaccacacctggctaattttttaatttttttttttttttttttgtagagacaggatctcactatgttactcaggctggtcttgaactcctgagctcaagtgatcctcccaccttggcctcccaaa

SEQ ID NO: 52396 - DNA, 201 bp, Homo sapiens
aatttgaagggggcacttcctaaataatattaagttcaattcatagtatgaacttttgagttcaaggcttctgtaatttttcttggcttaaaaaaatattyaaatttatagaatagtaatgatgttggaacgtttgattagattttagtgttccacatagttgactataataatttctgaactacaatagtttcagctaga

SEQ ID NO: 52397 - DNA, 201 bp, Homo sapiens
tctagagtataaaagtaatatcaaaatttcagaggcctgcagaccctgttgctgtttatcactttatcattctatttcctccttgaatcctttttttttctttttttttttttgagacggagttttgttcttgttgcccaggccgtattgcaatggcgtgatcttggctcactgcaacctccgcctcctgggttgaagtga

SEQ ID NO: 52398 - DNA, 201 bp, Homo sapiens
tgaactcctgacctgaagtgatcctcctgccttgccctcccagagtactggaattgtaggcatgagccactacacctggcctattgccatttttagagataaaaaaaaaatacatatctcacagagttgtggaaattaaatgagatgatattttcagagtgcttggtatgggtacctactggcatgaaacataaaggtagt

SEQ ID NO: 52399 - DNA, 201 bp, Homo sapiens
ctcccagagtactggaattgtaggcatgagccactacacctggcctattgccatttttagagataaaaaaaaaatacatatctcacagagttgtggaaattaaatgagatgatattttcagagtgcttggtatgggtacctactggcatgaaacataaaggtagtcttaatagtatatgatcttttgaatttctgtggata

SEQ ID NO: 52400 - DNA, 201 bp, Homo sapiens
tcccagagtactggaattgtaggcatgagccactacacctggcctattgccatttttagagataaaaaaaaaatacatatctcacagagttgtggaaattaaatgagatgatattttcagagtgcttggtatgggtacctactggcatgaaacataaaggtagtcttaatagtatatgatcttttgaatttctgtggatat

SEQ ID NO: 52401 - DNA, 201 bp, Homo sapiens
cccagagtactggaattgtaggcatgagccactacacctggcctattgccatttttagagataaaaaaaaaatacatatctcacagagttgtggaaattaaatgagatgatattttcagagtgcttggtatgggtacctactggcatgaaacataaaggtagtcttaatagtatatgatcttttgaatttctgtggatatt

SEQ ID NO: 52402 - DNA, 201 bp, Homo sapiens
ccagagtactggaattgtaggcatgagccactacacctggcctattgccatttttagagataaaaaaaaaatacatatctcacagagttgtggaaattaaatgagatgatattttcagagtgcttggtatgggtacctactggcatgaaacataaaggtagtcttaatagtatatgatcttttgaatttctgtggatattg

SEQ ID NO: 52403 - DNA, 201 bp, Homo sapiens
gtgtcatcagccaagtcagttcatctgtggttacccattgtttttcactggtaacgtaaaaatatctgcggagatagctatggtttgcttggtccgtggamctggaagtcagagagttcagttgtcacaaatccaggctggagattctcttctgtaaagatcctggacatcctttccaccagaaggagttttctggaactg

SEQ ID NO: 52404 - DNA, 201 bp, Homo sapiens
gacttttttttattgccaaggttctgaggtccagtgaagccagagtatattgttaagataggatgtaagaaatggaagagatctgcagtattctctagctaagtacttcttaaccgctttaaaaaatgcctcactcctttaaatgaattttttttaaaaattcattccaggcactgtggcacgtgcctgtaacctcagcta

SEQ ID NO: 52405 - DNA, 201 bp, Homo sapiens
ccaccacgcccggctaattttttgtatttttggtagagacggggtttcaccatgttagccaggatggtctcgatctcctgaccttgtgattcgcccacctyggcctcccaaagtgctgggattacaggcgtgagccaccgcgcctggcccaggaatgacctctttatggagtgtcatcagccaagtcagttcatctgtggt

SEQ ID NO: 52406 - DNA, 201 bp, Homo sapiens
caggcatggtggcgggcacctgtagtcccagctacttgggaggctgaggtagaattgcataaacctgggaggcggagcttgcagtgagccgagatcgcgcyactgcactccagcctaggcgacagagcgagactccatctcaaaaaaaaatcatttcacatgatttcagcgcgcatgatcacttttgtggtattgcattat

SEQ ID NO: 52407 - DNA, 201 bp, Homo sapiens
aaagtcagttatgaagtggttgtgatgaaaaggatgaagatgtaacagaggaaagatgctggcaaaaaaaatcatatgagaggaactctcacagatattgyataactgtgaaaacacaaaggataaaatgttggaagcaagtctgaacttagaaggaagtatacctatctaccaaggcatggaaaagatgcttgtttagaa

SEQ ID NO: 52408 - DNA, 201 bp, Homo sapiens
tgagaaaaaacggggtgggggctagaaaaagaggaagagggagtgaaggagggggagaaagagacaaggagagggcgagtgagaggcgagagagaacacakgcaaaaacacacaggcaaagcgatacaacagagcctgagtggaaggaggaggaagcttgctattgacagtgtccttaagcctcccacaaataacagccat

SEQ ID NO: 52409 - DNA, 201 bp, Homo sapiens
tcttttgcctcagcctcctgagtagctgggattaccagtgcctgccaccatgcctggctaatgataggtgaatcttaattgtgaagatgagtacctttatsagtagagatggcttcatatcagaactttatcttacaagctactctttactcttcctctttctccccgctccatgccaacagagttaatgtaagcatagta

SEQ ID NO: 52410 - DNA, 201 bp, Homo sapiens
gaacacttggctgttgtaagaggagtgtttcatctctcataaggatgtaatgaaaggaaattaggagccagtgggagagtgcagggacttaggtgtaaatsataggtgaatctttttttttttttcagatggagtttccctctttttgcccaggctggagtgcagtggcgtgatctcggctcactgcaacttccacctccc

SEQ ID NO: 52411 - DNA, 201 bp, Homo sapiens
caggtgtgagccgccgtgcctggcctctagttgaatttttaaaagtactttttaatctattttctcttttggtcctcacgccaccctgtgaagaggtagtrgtattacttattttatagggcaagtcatagaaacacagtgtcagtatgtgactttgttactagtaacagtgttcgaattataatctagatttctcctctc

SEQ ID NO: 52412 - DNA, 201 bp, Homo sapiens
ggggccagtgattgaggctggcaatcagagatgacacaagctttttccttcctatttgaatctgtaaagacccttaagagcactttgaatttgttcatctrtaagctgttaacccaaattcatgtcccaggtttttaagagaataagcaatagaatataggcgtttccaaagaggaagacgtacagaagcagataggtgta

SEQ ID NO: 52413 - DNA, 201 bp, Homo sapiens
ccaagtagttgggaccacaggcacgagcaaccacacctggctaatttttgtattttgatagagatggagttttgccatgctgcccaggctggtctctaacktctgggcttaagtgatccacctgccttggcttcccaaagtgatggggttacaggtgtgagccgccgtgcctggcctctagttgaatttttaaaagtactt

SEQ ID NO: 52414 - DNA, 201 bp, Homo sapiens
gccttctgtatgttgaaatgcccagtcaaggtggccagaaccatctggagaaggtagagttgtaaatatgaagtgacatgtataattctaatggactcttwtaatgagagaggggccagtgattgaggctggcaatcagagatgacacaagctttttccttcctatttgaatctgtaaagacccttaagagcactttgaat

SEQ ID NO: 52415 - DNA, 201 bp, Homo sapiens
tgatcacgtaggttgtcatgaggattctaagtgaaaatttgtaaaatgttcttaaaatagttcctggtgcatactgagtgtatagttggtatgatggtatstagttgatttttttttttttttttggagggtcaaggtcttgttctatcacccaggctggagtacagtggcatgatcttggctccttgcaacttccgtctc

SEQ ID NO: 52416 - DNA, 201 bp, Homo sapiens
attctgctcttgtttcttttcctattctgtttttgttaaggttgttttgttcatagcttatctcctgtactagattgtaaacttgtgagcaaggagtatgycttaacttttgtgttctccacagcttcttatacttggcaagggagcggggcggggggctggggcgggaggatgggggtgggggtgattagtattccctaa

SEQ ID NO: 52417 - DNA, 201 bp, Homo sapiens
gttgcatgcttttggacaagttatttgacttctttatgctttggtattctgcaaaatgggggttataatgcaactgatcacgtaggttgtcatgaggattstaagtgaaaatttgtaaaatgttcttaaaatagttcctggtgcatactgagtgtatagttggtatgatggtatgtagttgatttttttttttttttttgg

SEQ ID NO: 52418 - DNA, 201 bp, Homo sapiens
ctttctgttgataatgctaccattttcctgtgctcagactattagaactttagtgtcattgttgacacttctcatttgttacagtcattctggtccccttrattttatcttcacagtatcttctgtatcttgtccttttttttttctccagccgtattgccagtaatttacccagattattgactgattgattgagatgga

SEQ ID NO: 52419 - DNA, 201 bp, Homo sapiens
acgcttatgataaatacgaattctttccctcttcttgcaaagtaaactttatttcttagttggttccccccgctggtatttatgcttctactcactagaaytgaaggaattgaatgtatttgaactattcttttggccccttctgcagactgggaatggtctttctagcttctcagatctctgcatattgtgcatccttgt

SEQ ID NO: 52420 - DNA, 201 bp, Homo sapiens
tttcctgggctgtgcttgtaagagtattgacggtgtttacccctcttgctttttttctgctaccattgcccttgtgatagacaaatttctctttctttagrtacgttaatattctcaagcagatattaggcaactgtcctgggagctagttgttaaggtgactttgcctctctttggttttttatggatctaatgcagatg

SEQ ID NO: 52421 - DNA, 201 bp, Homo sapiens
accataccctaaatataagtcttgttgttctagatcatttaaaactctcaagcatcctatcttctgtcaactgttttcccttatcaggtggaacgttggamaatcacgatgctcctgttaacgctgttccttctgtcttttcccctaataaccatggatatcccctgagatactaaccttggccacttgttttatctcttg

SEQ ID NO: 52422 - DNA, 201 bp, Homo sapiens
gcagtggcgccatgtcggctcactacaagctccgcctccaaggttcacgccattctcctgcctcagcctcccaagtagctgggactacaggcgcccgccamctcgcccggctaattttttgtatttttagtagagacggggtttcaccgtgttacccaggatggtcttgatttcctgacctcgtgatctgcccacctccgc

SEQ ID NO: 52423 - DNA, 201 bp, Homo sapiens
cccacataaatcaggaaagagggttcatcagaatcaacactggttaaaaagaggtcttaatggaagtgcctaagtattgtccaaacacgggggataaatgygttctgctttacttggccagaacaatgtctcaagctagtgattaggctttactccagctttaacctcaggcaaaatttatgcagctctgctaccgtttgt

SEQ ID NO: 52424 - DNA, 201 bp, Homo sapiens
aactcctgtctgtaatttttttttgtaacgtaaaaaaaaaaacttatgagaaattgctaaactcttataagatttattattattatttttgtagagatggkgactcactatgttgcccaggctggtcttgaactcctagccttgagctatcctcgtgcttcgtaggtgtgagcaaccgtgtctgggcaaaagatttttaaa

SEQ ID NO: 52425 - DNA, 201 bp, Homo sapiens
actcaggaggccgaggtgggaggatcacttgagcctgggaagttgaggctccagtgagccgtggtcacaccactgcagtacagccatggtgacagaatgaractctgtctcaaaaaaaaaaaaaaaaaaaaaaaaaaaaaagttgcccaagatcacacaactaggatattgatagattcaggcctggggctcaggttggtg

SEQ ID NO: 52426 - DNA, 201 bp, Homo sapiens
aaatataactttgcctaatggaaattgttagtcatagataataatcatgatattagtcaagaaagtataatctgcttaacattacattgggtctaacctgaaaaaaaagagaagaaagtagactatttcttatcaaagttaaatttatagcacacctctactataaagcctagtgagtgctgcactgacaaagacagattc

SEQ ID NO: 52427 - DNA, 201 bp, Homo sapiens
aggcggatcacctgaggtcaggagttcgagaccagcctgaccaatatgatgaaaccccgtctgtactaaaaatacaaaaattagccaggctgtggtggcaygcgcctgtaatcccagctactcgggaggctaagacaggagaatcacttgaaccgaggaggcggaggttgcggtgagctgagatcgtgccattgtactcca

SEQ ID NO: 52428 - DNA, 201 bp, Homo sapiens
tcacacagctgttttgaagctatacagtaagggattatccctttgtttcaattaattaacttacagttgagaggcagttttattttttctgtgtgtgtgtktgttttttttttttaatttaagggggtgtcttagaataaaatatttcagcttcttttggcatggctttctcactcctttgtaaagtatggtcagttttgc

SEQ ID NO: 52429 - DNA, 201 bp, Homo sapiens
acacagctgttttgaagctatacagtaagggattatccctttgtttcaattaattaacttacagttgagaggcagttttattttttctgtgtgtgtgtgtgttttttttttttaatttaagggggtgtcttagaataaaatatttcagcttcttttggcatggctttctcactcctttgtaaagtatggtcagttttgctt

SEQ ID NO: 52430 - DNA, 201 bp, Homo sapiens
tttagttgaatgagcttgtttgctaaagtacagcatttaaaggtgaggaatggggctggccacggtggctcacgcctgtaatcccagcactttgggaggcygaggtgggtagatcacgaggtcacgagttcaagaccagcctggccaagatggtgaaaccccatctctactaagaaaaaaaaaaatagaaaaattaaccgg

SEQ ID NO: 52431 - DNA, 201 bp, Homo sapiens
gctggcgtgcagtggtgcaatctcggctcactgcaatgtctgcctcccaagctcaagtgattctcctgcctcagcctcccgagtagctgggactacaggcrcctgctaccatgcctggctaatttttgtatttttagtagagatggggtttccccatgttgtccaggctggtctcgaactcctgatctcaggtgatctgcc

SEQ ID NO: 52432 - DNA, 201 bp, Homo sapiens
cctctctcttcccaggtggctgggggtggcggttggaaacaggagagccttggtcttaatgaacagacaggagatatctcaagattaatgtgaaaaaagckcagtcatgataattgcattcccctcggcagtgattggtttacgagcagtcatgtgattaagttctgaccaatactttgtaagaggaagtctgctggggga

SEQ ID NO: 52433 - DNA, 201 bp, Homo sapiens
cacttcttcttgaggaaggggaaaattgtgtaaatgaaaaaggacagctaattttttgaaaaacaaatctggagtgattgagaggtctaaacccccaaaartgtaaaattgaagagaactaatatggttaattttgcttcatggtgttagctgaggaattgtgttttttaaaagccctttgatttactggctcttactcac

SEQ ID NO: 52434 - DNA, 201 bp, Homo sapiens
ggtcttctcctcctatagagaaattctttccagtgacctgtgatgttcacggtgcacactttggactcctttcctgggctgtgcttgtaagagtattgacrgtgtttacccctcttgctttttttctgctaccattgcccttgtgatagacaaatttctctttctttagatacgttaatattctcaagcagatattaggca

SEQ ID NO: 52435 - DNA, 201 bp, Homo sapiens
acctttacctcccatcctctttccctggcattctgcaaggattagttcagggattaaagcaacttggaaacgttttagtttcatactgtcatttttagtgrtttgccttttaaatcatctctttactgtaaaagtcttggttcctataaatctcacacccttgggaaccaaactcatgacaatcatgaagtgtcttacttc

SEQ ID NO: 52436 - DNA, 201 bp, Homo sapiens
ttggttttctaacatgagcagttttaatatatgtatttcttaaccacagattttttttctgtatctcttacctttggtttctgagggaaaaaaagggtttyttttttctccctccaggggcacccttttcatttgtgctcttgatcatattctctcctcggaccctttcataccattttccctctggcttagatcttcaat

SEQ ID NO: 52437 - DNA, 201 bp, Homo sapiens
tggaggggagtgggggatgaatggagcgctggcaggagctcggggaagagaggaaggcggctgggacctacgggaacttttacaacttgccgccgagtgagggaccggcggctgggcgtgggtgccgggtgcgctggggcgcagccgcccgggcccggcacgttgactcttcctctcccctcgtcttcacattcggaatct

SEQ ID NO: 52438 - DNA, 201 bp, Homo sapiens
tgtcatccttaagaggccaacgaggtttcattttaaaagctagctcatgttgattgttagtaacttcctagtgtgttgtgctgtgaaagatggtgaagtcrtaatgagattcactggcatgattgtttagtgatgtgtgtttgccatggattgggaggggcatatatgtattttcagagggatgtcaaatctatagtacag

SEQ ID NO: 52439 - DNA, 201 bp, Homo sapiens
ggccaggctggtcttgaactcctgacctcaggtgatccacctgccttgtcctcccaaagtgttgggattacaggcgtgagccaccgcacctgtcatggtgyatgttttagagcaaggtatttttctctttgtgtccagaactccttgctggttctaagtatttcacttcccaaactgggaactctgagctatactttcttg

SEQ ID NO: 52440 - DNA, 201 bp, Homo sapiens
tgggagagatgagtaatgtgaagcaagttgtctctactctaggagttgtctctcttgtataaacataagacctgaagcttctgttgctgaagcaagaccartgcacatttgccttgcaggaagggctttagatctctgtgtcacaaacaatcaagaaatcatttcttgctgtacaaatgtagcagcttattgtagcaccag

SEQ ID NO: 52441 - DNA, 201 bp, Homo sapiens
tctgagggaaaaaaagggtttcttttttctccctccaggggcacccttttcatttgtgctcttgatcatattctctcctcggaccctttcataccattttycctctggcttagatcttcaatatcgttttctctcttggcttcatcccctttgcctgtgatagtctcttttttccctgtagtgaaaaacaaactgccaact

SEQ ID NO: 52442 - DNA, 201 bp, Homo sapiens
cttgtctaaagtggtagaaacctggagaggcaatgctggatatttggatgagcacatattttgaaatcagaccaacttggtcttgaattcccagtttgacmcttaatataagacttcggccaagtgactaaactctcttagcttcgatttccttattggtaaaatgagaataataatacctatctcagaggacctgtgaag

SEQ ID NO: 52443 - DNA, 201 bp, Homo sapiens
agaacagttagccgataatgagtgtttaatcattgtgcattacttttagaataaaattattttatgatgctttattgacaagaataataactcatatgcamatctttcctcaaagagttaaattttatagctagcggcaaactactgtgacatttcattttgtaagtatagttctgtacatcattttctttagcgtggagc

SEQ ID NO: 52444 - DNA, 201 bp, Homo sapiens
ttcaggcatctatttggttgctggaggtacagtgtaacaaagtcctttccccttggagattatattctagtggagaagacaaatagtaaagaacatataaratagggagtataataagggctatgaagaaaaaagcagagaataaggggatgggaagtgaggctagagaggagcctgttattttacatcgtgtggccaaga

SEQ ID NO: 52445 - DNA, 201 bp, Homo sapiens
gatattaccagatattaattgatgtttaattatcaagaaagatatgtcctgcttaaaacagggtaataggcagcaccttttcagaaaattcttgtctaaartggtagaaacctggagaggcaatgctggatatttggatgagcacatattttgaaatcagaccaacttggtcttgaattcccagtttgacacttaatataa

SEQ ID NO: 52446 - DNA, 201 bp, Homo sapiens
aaaatattttgcagggaataatttggctgaatacagatattaactgaacatataattctgtttcaggcatctatttggttgctggaggtacagtgtaacaragtcctttccccttggagattatattctagtggagaagacaaatagtaaagaacatataagatagggagtataataagggctatgaagaaaaaagcagag

SEQ ID NO: 52447 - DNA, 201 bp, Homo sapiens
tacacagtatttactgttctgcatcttgccttttactcatgttttgtttggagatgttgtttatctgtatttacagttttttttccattcttcttaatgastacttaatattccattggaaagattcatagtaaaataaaatagcaaattctagaactgggaagaaggcaaatgttaggcaaacaattaataattataact

SEQ ID NO: 52448 - DNA, 201 bp, Homo sapiens
tctcctgcctcggcctcccaagtagctgggactacaggcccacgccgctacacccggctaattttttgtatttttagtagagatggggtttcactgtgttrgccaggatggtctcgatctcctgaccttgtgatccgcccgccttggcctcccaaattgctgggattacaggtgtgagccaccgcgcccggccaattttcc

SEQ ID NO: 52449 - DNA, 201 bp, Homo sapiens
tcattaacaaagagttgaaaacagggtggcagcggttttggcaagaatgtgttacggtctaattcagagatactgaacttgggacctaagtaagaaggatwttctgttgtagaaatctggcagattctagagtttgtttgagagatctcttgcatttgctcattgggtatgccaggcattctggagggatgcccattccca

SEQ ID NO: 52450 - DNA, 201 bp, Homo sapiens
ggttggtgaatgctttgagagtctgaggtgggccagagaaaaaagacacaactctgtacttggttagcaatgcctgccattgccgctgaagtaccagtcartggaagcatctcctgaattcatctccctagcccagaaacttctgtgttactgtaatcattcatttattcatcttgtgttcattcattcacccaaattttt

SEQ ID NO: 52451 - DNA, 201 bp, Homo sapiens
ttcaatgcaatttaagagaatattttagaattaagttttcacagttttgtagttttttttatttcacagttttgtagtttttttttagacttcagtgatgytttaaatgttttccttgtgcttacctggaaaagctttttaaatgataccaatttggaatgttaaaaaaggtataattctgggatgacagatatatttaat

SEQ ID NO: 52452 - DNA, 201 bp, Homo sapiens
tggcgcgatctggggtcagtgcaagctccgtctcctgggttcacgccattctcctgcgtcagcctccggactgcaggtgcccgccaccgcggccagctaayttttttgtatttttagtagagacggggtttcaccgtgttagccaggatggtctcaatctcctgacctcctgatccgcccgtctcggcctcccaaagtgct

SEQ ID NO: 52453 - DNA, 201 bp, Homo sapiens
aattatagtaaaaaacagataagatttaccctcaactttttaaagtgtacagttcagtaatgttaaatatattcatattgttgtttcattaaaaaactttkaattttgaaataagttcaggccttcacttgaggttatgagtttgactccagcctggccaacatggcgaaaccgcgtctctactaaaaatacaaaaattag

SEQ ID NO: 52454 - DNA, 201 bp, Homo sapiens
ttttgggctttgcttaaggaaatagtgaaaagattgtacagttctgttattgataatggtttagaatttaacactgaaaatgctggattttctttcctctwattaagttaatgtattactttgaagcatcttttctttttttacagttagaaattcaccaaaactatatttcaaacgtagctctttttaattttatactaa

SEQ ID NO: 52455 - DNA, 201 bp, Homo sapiens
caggcatggtggcgggtgcctgtagtcccagctactcgggaggctgaggcaggagaatggtgtgaacccgggaggcggagcttacagtgagccgagatcaygccactgcactctagcctgggcgacagtgtgagactccatctcaaaagaaaaaaaaaaatctataattgtataaaatcccatacactagcacttcctgtt

SEQ ID NO: 52456 - DNA, 201 bp, Homo sapiens
agaattggtgacaaatatttttcaaagagaaatacgatgacttttcttattaatgagcagaccttttgggctttgcttaaggaaatagtgaaaagattgtrcagttctgttattgataatggtttagaatttaacactgaaaatgctggattttctttcctcttattaagttaatgtattactttgaagcatcttttcttt

SEQ ID NO: 52457 - DNA, 201 bp, Homo sapiens
aattgtataaaatcccatacactagcacttcctgttattttgttcatcagcggacagcaaagcatgtagtcgtgttgccttcttgtctcccagtgatagayccatgtagcatttcataaaaatggataattaaaggggagaattgtcaaagatcaaagtgcatcaaataaatgaagtgttaaaattggattaaaattttag

SEQ ID NO: 52458 - DNA, 201 bp, Homo sapiens
tggataattaaaggggagaattgtcaaagatcaaagtgcatcaaataaatgaagtgttaaaattggattaaaattttagctaattgtaaacagcattcttaaaaaaaaaaaaaaaaaaaaagcttaccaagggaatgtcaactcagccagtgttctagaggctctatatatttagctaggagcacttagtgaaagataact

SEQ ID NO: 52459 - DNA, 201 bp, Homo sapiens
ggataattaaaggggagaattgtcaaagatcaaagtgcatcaaataaatgaagtgttaaaattggattaaaattttagctaattgtaaacagcattcttaaaaaaaaaaaaaaaaaaaaagcttaccaagggaatgtcaactcagccagtgttctagaggctctatatatttagctaggagcacttagtgaaagataacta

SEQ ID NO: 52460 - DNA, 201 bp, Homo sapiens
ggaaattgaggcacaaagaggtcaagtaacttgcccagtgacagacagctaattctggcagagctgggatttaaactcaggcagcgtggctccagagtccrtactctttcatgcacatcatgctgttttcagaattctagaatgctagcaccaggccgacttaggaaaattattttgtttccccgttcttcattttacagc

SEQ ID NO: 52461 - DNA, 201 bp, Homo sapiens
taaaattctaagtcctgttctagtcttcttccacctacccaggaatgaagttgaatattaatgcaccatggtcaccattctccaatggctcagtctttctycacattttctataattaagactgtccttcccaatttcaactcaaaatacctgaaaagactccttgtttagttaagagaaagcaaatttccccaggtaagt

SEQ ID NO: 52462 - DNA, 201 bp, Homo sapiens
ctgaggcaggagaattgcttgaacctgggaggtggaggttgcagttaggcaataacgagccactgcactccgacctgggtggcagagcaaaactctgtctyaactaaaaaaaagaaatacatagcaagaatttccatcaccttaagtagtcacctgatccccttactttccccgtggcctcagtttttgcagtggtgatat

SEQ ID NO: 52463 - DNA, 201 bp, Homo sapiens
ggccaaggcgggcggatcacgaggtcaggagatcgagaccatcctggctaacatggtgaaatcccgtctctactaaaaatacaaaaaaattagccaggcgwggtggcgagcgcctgtagtcccagctactccggaggctgaggcaggagaatggcgtgaacccgggaggcagagcttgcagtgagccgagatcgtgccact

SEQ ID NO: 52464 - DNA, 201 bp, Homo sapiens
cctcttgaccccttcatgctgtatgttttatttgtttcctaacttcatataaaatcactatcatctgaaggtgatgatggtttttttttgtttttttgagrcagggtcttgctctgtcactcaggctggagtgcagtggtgtgaacacagctcactgcagcctcaacctcctgggctcaagtgatccttctgcctcagctt

SEQ ID NO: 52465 - DNA, 201 bp, Homo sapiens
ttctccctgacttgagtccaaaacctagcataactaaagtagtccagtcttttccttgccaatctcttttcttccctagtcttctctccttcccactccgmatagaaattcctttatcataagaataaagcatgacatttctgtgatatcatgctcattctgagtgactccacaacagtgtccatatgataatttgtaaat

SEQ ID NO: 52466 - DNA, 201 bp, Homo sapiens
ggcttcttgctttgctggagcccatctgggctggagccatggaccccattggttgtgacacaagtaccaagtgtctgcactttggcatatggaggcttcasagcgctcagtaaggcatagacattcagtgtgattcacttcaagtgatatctaaagtaatggattactgtaactacccatctgctccacatcaaaaagaat

SEQ ID NO: 52467 - DNA, 201 bp, Homo sapiens
ctgcaatttttttttaacaaaatgcttttatcttactgttgcagacttagctatcttaattgatgaaaatttccaccaggtagcctaatttgcaaatccartgatatggtcaaatgatcatatttgatcagtgggactgacaaatttgacttaatttttattagaaaaagctgagttcacatttcacttcaaataaatgca

SEQ ID NO: 52468 - DNA, 201 bp, Homo sapiens
gtttatcttagacagttctgagagtgtcggttaataatttaccctttctgagagacagaggcagcaattacaggctgtaagcgagcactctgaggcttctygctttgctggagcccatctgggctggagccatggaccccattggttgtgacacaagtaccaagtgtctgcactttggcatatggaggcttcacagcgctc

SEQ ID NO: 52469 - DNA, 201 bp, Homo sapiens
attaggaaaatgttaatagcagtacattcctactacctgattttttcttctatttgagatgtaagatatctgtcagatagagatatgtgattacaaaaagmagcagacaaaagcagagctgactattgctatattaaaatgtaagtgttacagtttgaattttcaagtgagagttcttgagttcagtgctttacataacat

SEQ ID NO: 52470 - DNA, 201 bp, Homo sapiens
cagttctaatgagtttatcttagacagttctgagagtgtcggttaataatttaccctttctgagagacagaggcagcaattacaggctgtaagcgagcacyctgaggcttcttgctttgctggagcccatctgggctggagccatggaccccattggttgtgacacaagtaccaagtgtctgcactttggcatatggaggc

SEQ ID NO: 52471 - DNA, 201 bp, Homo sapiens
accaccagttctaatgagtttatcttagacagttctgagagtgtcggttaataatttaccctttctgagagacagaggcagcaattacaggctgtaagcgrgcactctgaggcttcttgctttgctggagcccatctgggctggagccatggaccccattggttgtgacacaagtaccaagtgtctgcactttggcatatg

SEQ ID NO: 52472 - DNA, 201 bp, Homo sapiens
gtctggaatgtgtcaggttttgaggccacagcacagatgctttgctctcccataagtgtgggcgatatgtggagaatggctttgtgtggattggaagtggwggtgaagggggaagtatcttgttgggaagaaatagctgactgtggccttcaagtgcttcttgggtggatgcatttaataatgatcttagtgaatcagttg

SEQ ID NO: 52473 - DNA, 201 bp, Homo sapiens
ctagatgtttatacctttttacagagtcaggtatcctttttctggtgtatttatttggtctggaatgtgtcaggttttgaggccacagcacagatgctttsctctcccataagtgtgggcgatatgtggagaatggctttgtgtggattggaagtggaggtgaagggggaagtatcttgttgggaagaaatagctgactgt

SEQ ID NO: 52474 - DNA, 201 bp, Homo sapiens
gtgtcttctcatgctctcttgctctctctttttgaactgttgcttatttggaaatattttcagttatttccacacataacttctagatgtttatacctttytacagagtcaggtatcctttttctggtgtatttatttggtctggaatgtgtcaggttttgaggccacagcacagatgctttgctctcccataagtgtggg

SEQ ID NO: 52475 - DNA, 201 bp, Homo sapiens
cagcagaagaaagtatattcttaataacttctcatccctttgagagacaaagaaagggttgtcccttttgatagtcttctgtacatctcatgagagacacytgagttaatcccagaggtttgtttttcacatatctagcgttggtttggcacatgacttagacgtatctctacattgtaaaaactggagactgaacttaat

SEQ ID NO: 52476 - DNA, 201 bp, Homo sapiens
ggtgactccaagaagctgaggtaggaggctatttcagctgtcaaaatatgagagtctgtaccagagtaatagagagaggaatggaggatagatccagagayagttaggagataaactagaaagatttggaggttgactgcatgtggggtgtcagagaggcagggagaggtagttggggaaataaaataatcatgccaacaa

SEQ ID NO: 52477 - DNA, 201 bp, Homo sapiens
attcataccacaaaacaaaaacaaataaaaccctaaaggtccacatggaagcttttggagatgatgaatatgtttattattctggttgtggtgatggtagyatgaatgcatacatatatccaaactcaccaaattgtagacattaattttgtgtggttttttgtataccagttatacctcagcaaatcttgaggtgaggga

SEQ ID NO: 52478 - DNA, 201 bp, Homo sapiens
tgaccatggaagaatagtaagagagctctaacattgctggctttgaagatggagcatctgggccctaagctaaggaatgctggtggcggatagaagctgaraaatacaaggaagcagattctccttttgagtctcttaaatggatggcagccctgctgatatcttgactttagcccagtgagacctgtcaggcttctgacc

SEQ ID NO: 52479 - DNA, 201 bp, Homo sapiens
taaggaccttgagatgagggagataatcctggattttctaggtggacccagtctaatcacatgaatcattaaaagctgagaacttttcccagctgtggtcrgagagagatgaccatggaagaatagtaagagagctctaacattgctggctttgaagatggagcatctgggccctaagctaaggaatgctggtggcggata

SEQ ID NO: 52480 - DNA, 201 bp, Homo sapiens
cagcctgggcgacagagtgaaactccatctcaaaaaaaaaggaaagacaagggactttgtaaatgcggctaatgttaaggaccttgagatgagggagatawtcctggattttctaggtggacccagtctaatcacatgaatcattaaaagctgagaacttttcccagctgtggtcggagagagatgaccatggaagaatag

SEQ ID NO: 52481 - DNA, 201 bp, Homo sapiens
aaaaacaggaggcatgatgtaaaggttgaggactgctgcacgaaaccatttttattgtttaatatttgcaagttagttttaatgtccatagtttagatgargactttatttctaaaccattaagatgaaggtaaataaaatagtaaaaataagaaagaaaacaaactgaattctaaggcgttttaggaaatatttaatgat

SEQ ID NO: 52482 - DNA, 201 bp, Homo sapiens
aggcagaggttgcagtgagtcaagatggcaccactgcactccagcctgggcgacagagtgaaactccatctcaaaaaaaaaggaaagacaagggactttgyaaatgcggctaatgttaaggaccttgagatgagggagataatcctggattttctaggtggacccagtctaatcacatgaatcattaaaagctgagaactt

SEQ ID NO: 52483 - DNA, 201 bp, Homo sapiens
cttgggaagctgaggcaggagaatcttggaggcagaggttgcagtgagtcaagatggcaccactgcactccagcctgggcgacagagtgaaactccatctcaaaaaaaaaggaaagacaagggactttgtaaatgcggctaatgttaaggaccttgagatgagggagataatcctggattttctaggtggacccagtctaa

SEQ ID NO: 52484 - DNA, 201 bp, Homo sapiens
gaggtcaagagtttgagagctgcctggccaatacggtgaaaccctgtctctactacaaatacaaaaaggagccgggtgtggtggtgtgcacctgtagtccyagctacttgggaagctgaggcaggagaatcttggaggcagaggttgcagtgagtcaagatggcaccactgcactccagcctgggcgacagagtgaaactc

SEQ ID NO: 52485 - DNA, 201 bp, Homo sapiens
agtgtagagtgctaacctaacatttttgtatgtcttgtgtggtcaatagaataatggccacccaaacatgaccaacttttaagaacttgtgaatatatatyttacataagaaatgggactttgggctgggcgctgtggctcatgcccgtaatctcagcaccttgggaggccgaggtggacagatcatgaggtcaagagttt

SEQ ID NO: 52486 - DNA, 201 bp, Homo sapiens
agccttatattaaattggcagatttttaaataccggataattagaaatgctattaattctcagtgtagagtgctaacctaacatttttgtatgtcttgtgyggtcaatagaataatggccacccaaacatgaccaacttttaagaacttgtgaatatatattttacataagaaatgggactttgggctgggcgctgtggct

SEQ ID NO: 52487 - DNA, 201 bp, Homo sapiens
ctgctaaaaatcagaacaaatttccttaggaatctgtgtttataacaaaaacatgaactttgaccgtagaatacttttcccattcaaatgaaagataattwaaataatattttttaaaaggttgatttaattttacatctgtgagtataaatacaaccagttgattcttcaaagatttttgattgtgataataagattgat

SEQ ID NO: 52488 - DNA, 201 bp, Homo sapiens
ttggttttgtttgtgtgtggaacaccaaaacccagaaccggaatcagttttttcccctctcattatgattagtcgttcagaatatgtgctttatgcttctrtttgcccaaaggccatattttgcatttttaaatttgcgtcagataactgggataagtgtccctaaacaactgctaataggagttttatcagttagccttg

SEQ ID NO: 52489 - DNA, 201 bp, Homo sapiens
aaagtacaaaaatagtaaaagcaattagtgaattaagcctcaattccaattgcctcgattttttgtatgaaatcatatctttcttattatagaagtgtgarattatagccagctgttggagtagtaacttgtaatccatttctgtacgttggtttttggtgtgaactgaaaatgattaccatgaagttaagtgttataacc

SEQ ID NO: 52490 - DNA, 201 bp, Homo sapiens
ctgcactccagcctgggtaacagagcgagatctgtctcagaaaaaaacaacaaaatttttttttttagttatgtatgggagattggtgaaggttaatgaayccatgaagggagctccttgtgaatagttgtttttggttttgtttgtgtgtggaacaccaaaacccagaaccggaatcagttttttcccctctcattatga

SEQ ID NO: 52491 - DNA, 201 bp, Homo sapiens
aataagtcccagagatctgctgtacaacatattgcctacagttaacaatatgatattgtgcatctagaaatttgttaagacagtacttctcatgttaagcrttcataccacaaaacaaaaacaaataaaaccctaaaggtccacatggaagcttttggagatgatgaatatgtttattattctggttgtggtgatggtagc

SEQ ID NO: 52492 - DNA, 201 bp, Homo sapiens
attcctttatcatatagaaagaactcagaattttgagtcagaagatgtggcttcttgttctgggcacactgttttctttttttgtgtttttgagacagagycttgcactgtcgccaggctggagtgcagtggtgtgctctcagctcactgcatcctctgcttgcagagttcaagcaatcctgctgcctcagcctcccgagt

SEQ ID NO: 52493 - DNA, 201 bp, Homo sapiens
aggacatgttggtactcaaaaagtgtaggattttagagcattttatgatttttggatttaggatgctcagcctgtaaacttgagggtcaaacttttcttgygttagttgaaatctcctgggtgctttcttttaaccaaatcccaaagtcttttttataactaatatgctagatttcctacattgttttatgaaggtagaga

SEQ ID NO: 52494 - DNA, 201 bp, Homo sapiens
tcagcaagttatggtttgaggtaatactaatcagtttttttatgttgactttttggttatcaattaagaaaagcattagtgctttggaaaaatctgtgttrttgaacttcttccaatttgtatacaacctcttctccacagcgtaaaatgcaaattttgcatggggtcaggtgcggtggctcacgcctatagtcccagcac

SEQ ID NO: 52495 - DNA, 201 bp, Homo sapiens
tatggtttgtgttgggagtagtagaagagaaaagagggacttgtgaagatgaaggccataattttaactcttcccctggcaatgaaaacccccaaattagracaaaataggttagtgctgtgtggtaattaaagagagaggaatacatggcagtagctactctctgcaggtatcctgcacttgttctttatccagtcagta

SEQ ID NO: 52496 - DNA, 201 bp, Homo sapiens
ggctgaagacaaaggcagagtgaatgcctgtcttgtgtctcacctcagcttctagccccacccctgccaaggtaaatgaacggggagaaaatatgctgtcytgtggaagactacactaagcctgtcctatggattgcataacagtgggccctagtagacaggtcagggacaattcatattataatgatattctttttataa

SEQ ID NO: 52497 - DNA, 201 bp, Homo sapiens
aacagctctgtgggacgcctagcctgtagcccctatttaggctgtgggtatccaggtgaggactggtcttttcacgactccttggttttgcaaggctgaaracaaaggcagagtgaatgcctgtcttgtgtctcacctcagcttctagccccacccctgccaaggtaaatgaacggggagaaaatatgctgtcttgtggaa

SEQ ID NO: 52498 - DNA, 201 bp, Homo sapiens
gacatgtgcatgaacttatccttactatgtgtgatgcattttgttcagtttcatttaagcacaaatggttaagagccactaaaatgattttcaccatccascaatgcctgtgacctgcagtttgagaagcagtgcttgggatttggctgcagggtctgcttgccagggccttccccatgaatgtgcatcactgcttaactc

SEQ ID NO: 52499 - DNA, 201 bp, Homo sapiens
ggactttgttttcttcttttgcttaattttcttaacctgaaatgtgacttggcaaaattaaggacagaggtgtatcaaattctttgctagtctctattttkttttttgtgaagaagagatttgtattactacgttttatttataatctttagaagagctataatagaaatgggttcatagatctgtaaaaatcaaaatcac

SEQ ID NO: 52500 - DNA, 201 bp, Homo sapiens
ttagctgggcatggtggcgggagcctataatcccagctactcgggaggctgaggctggagaattgcttgaggctggggctggagaattgcttgaacgttgkggggtggaggttgcagtgagctgagattgcgccacttcactccagcctgggtgaaagagtgaaactccgtccccctacccacaaaaaaaaaaaagctatc

SEQ ID NO: 52501 - DNA, 201 bp, Homo sapiens
ctcttgcgtttctctttctttcttccccttgccacacagctgtcactggtataggagaaagactggggggaggggaggaggaggaagccctgctcaaatcstgtcacgtagcactaattcatctgctctcattagagggagcgagggacagcagtgatggccaagagctgcactctacacatgacacgcgaacagtttggg

SEQ ID NO: 52502 - DNA, 201 bp, Homo sapiens
tttcttttggctcaaggaaaatggaaatcacggctggttatcacagatttgatctactcacattgtacccaccaaaataaattaacatttctacaaaactytgggcacctttttgaatttcagtgaacttactgatacgacattttttcttcagcaggttctgtattgttctgattccacttatttgtactggtacaattt

SEQ ID NO: 52503 - DNA, 201 bp, Homo sapiens
aaagggctacatgagaacaattttaaaattataaaaacatttgtaaacatttagtatgattttaatttttcatttggtatacatactttttaaaatagttscttgtcagttatgttgcttggaaggcagaactctctgcacaagcaataagtcagtaaatccagttttttgatctaatattgttgcttgtttgttttgtaa

SEQ ID NO: 52504 - DNA, 201 bp, Homo sapiens
aatacccacttcaataattatttctttttgttctatttggtctagtaacatgatgatagtttttttagtgatttgttttttagttgtacattttaaaatgygatttttccggagaatattgctctgtgctggatttttatttcttttacttaacagccaattttaaagttaattattttatttaaatactagaaaaagtag

SEQ ID NO: 52505 - DNA, 201 bp, Homo sapiens
ctcccatttacaacctggagctttttatgtcttcttttcagaagtctggtccctaacattttttttttttttttttttttttgtgatctcagtaaacaaaragtgtgtgtatgtgtgtgtgtgtggttatgtgtgtaggaagcctgccatatttcctccctgccccacagaaaatatgttttctggaagcccttttgacac

SEQ ID NO: 52506 - DNA, 201 bp, Homo sapiens
gctttcattcttgccatgtcatgtgtcctagtcctttttaaattttttcctagagaatgagccatttcttattgttcagcatagctttatactctagggarctcactataggacttgccagtcatctccttttcctgcttgtatcataggctttgccccagggctaggcattatcatcactagaggttttgctgtttggcc

SEQ ID NO: 52507 - DNA, 201 bp, Homo sapiens
aggcaaaccccaaaagatgcatgtggaaggctggatgtgggagagaggtgttttcctttaattgacctctcacggcgttccacttgataaagtgacaacaytttctgaaaacttaaggtttttgaatgtgtggattttctccctaccactgtaatttctgaaactttctctaaacaagatggctggcacattatggggaca

SEQ ID NO: 52508 - DNA, 201 bp, Homo sapiens
ctatgcacttggtttcagatgagataggaaatggaaataacaaaacactgttagaaaatcttgtttctgtagacggctcaaccttgccagaaaccacgaggcagtggaaatatcacgagaaagcttgttcctacaagactcccagactgattaccagaccaaagaagttcccagaaatttagcttgaagcaatcatttaaa

SEQ ID NO: 52509 - DNA, 201 bp, Homo sapiens
tgtttccttcacagatacatccacaacatccccccaaataaaagttcactctctcttttttttttctgttccaaatagatgaccttgtgctaaacaaagtsgtgttgccggtagagcagtctaagtggaccagtagccttacatccttggtcaccagcgcaccggtcccccaaccccctctttcaggttaagatctgttca

SEQ ID NO: 52510 - DNA, 201 bp, Homo sapiens
ttcattcagattctgtttattgactaaaccgcaaggattcctgcccaaagtaccaggcggtctatgcttgactgattttgattttctaacatcagccctgsggtttatttgaaaaatgtacatacactgcagctttaacaagtcaagtgactgcatgtttttgaccatggagtagagtatatctgaagatcattaaattta

SEQ ID NO: 52511 - DNA, 201 bp, Homo sapiens
ttcacatatcttgaaaaattaaatattatttacctaaaaacagttttataatttttccctaaaataaggaatctaaagaacacagaaaattttggaacaakataactatgtttttctttttatctttcttaattcgccttctgtaatacatctgtttctcaaaacaaataagaaaatgataatatcttcaacagtgacttg

SEQ ID NO: 52512 - DNA, 201 bp, Homo sapiens
tctatgcacttggtttcagatgagataggaaatggaaataacaaaacactgttagaaaatcttgtttctgtagacggctcaaccttgccagaaaccacgaggcagtggaaatatcacgagaaagcttgttcctacaagactcccagactgattaccagaccaaagaagttcccagaaatttagcttgaagcaatcatttaa

SEQ ID NO: 52513 - DNA, 201 bp, Homo sapiens
atgtctatgcacttggtttcagatgagataggaaatggaaataacaaaacactgttagaaaatcttgtttctgtagacggctcaaccttgccagaaaccasgaggcagtggaaatatcacgagaaagcttgttcctacaagactcccagactgattaccagaccaaagaagttcccagaaatttagcttgaagcaatcatt

SEQ ID NO: 52514 - DNA, 201 bp, Homo sapiens
ttttatgtctatgcacttggtttcagatgagataggaaatggaaataacaaaacactgttagaaaatcttgtttctgtagacggctcaaccttgccagaaaccacgaggcagtggaaatatcacgagaaagcttgttcctacaagactcccagactgattaccagaccaaagaagttcccagaaatttagcttgaagcaat

SEQ ID NO: 52515 - DNA, 201 bp, Homo sapiens
ccacatcaaagtttcctaccgtccactctaagctgcagttcaagtttctaacacgtttttgcttcttataagtggatgagctgatcttcatttctttttcygtggtatctgatttctttctggttgtttctgtttaaagaaatatgtactgcttataggaatgataatttaagcagttagagaagaagtagttctctattt

SEQ ID NO: 52516 - DNA, 201 bp, Homo sapiens
tttttatgtctatgcacttggtttcagatgagataggaaatggaaataacaaaacactgttagaaaatcttgtttctgtagacggctcaaccttgccagaaaccacgaggcagtggaaatatcacgagaaagcttgttcctacaagactcccagactgattaccagaccaaagaagttcccagaaatttagcttgaagcaa

SEQ ID NO: 52517 - DNA, 201 bp, Homo sapiens
gctttctccctccctgtaggtgagtggttattattttttcttttgtcacgggcttggatatcatgttcttatgtgtaaacactggaccatatagtactcamaatactttggcaaaaaccaaaccaactgaaaactgaaggcatgcctttatgtcttatttccaacttggaccatgatcttgccccttgaaatcttcaggct

SEQ ID NO: 52518 - DNA, 201 bp, Homo sapiens
cttagcctcccacagtctagcttctgtttcttgtcttctccacaacaacagctctggagcgctgacctctcatctgaagcatattgtagaagcgtttctgktttttttacttatttctctgtgacatttgatgccactgaccacttttgctccacctttaagtctttggattttctaactcttcattgttccagttcaatc

SEQ ID NO: 52519 - DNA, 201 bp, Homo sapiens
gtggttattattttttcttttgtcacgggcttggatatcatgttcttatgtgtaaacactggaccatatagtactcacaatactttggcaaaaaccaaacyaactgaaaactgaaggcatgcctttatgtcttatttccaacttggaccatgatcttgccccttgaaatcttcaggctgttttgatgaagccttctgtatg

SEQ ID NO: 52520 - DNA, 201 bp, Homo sapiens
agcctccaccgttctttaaatagcatcaccatctggctagaaaccagaaagtcagcttagacttgtccttctccctagctcatacctccttccccaatttkaaatggcaactgacttctgtttccccattcattattctgcatccccagtgcctctaatcttgtaaagattccctctgtgaggagttgttttgaatgggta

SEQ ID NO: 52521 - DNA, 201 bp, Homo sapiens
atttttatgtctatgcacttggtttcagatgagataggaaatggaaataacaaaacactgttagaaaatcttgtttctgtagacggctcaaccttgccagwaaccacgaggcagtggaaatatcacgagaaagcttgttcctacaagactcccagactgattaccagaccaaagaagttcccagaaatttagcttgaagca

SEQ ID NO: 52522 - DNA, 201 bp, Homo sapiens
tgtttttaaagagttatctgactagaaagaaaagcaagataaaattaatttttagaagtgaaaaatattttgcattacgtatagcacatgtcaatatttasaaaacttacacaaacataactttgtggacctataattttctaaaagtttggaaagtaggcgacacttaggattggaaaaggcatagctttgtgaataatt

SEQ ID NO: 52523 - DNA, 201 bp, Homo sapiens
aagcttctataagatatttcccttttctgaatgcaattgattatgctatactgcataatactacatttacctatatataatccagttaaagctgtattacrtatttatagaagtcagactttggtctgaaatgccattatttataaacacaaatcagtgagtaattagtctactgtgtaaaaaaaataaaaaaaaattttg

SEQ ID NO: 52524 - DNA, 201 bp, Homo sapiens
taatgagattcactggcatgattgtttagtgatgtgtgtttgccatggattgggaggggcatatatgtattttcagagggatgtcaaatctatagtacagrggagctcatttaatctacagtgcccccaacctcatcctttccattgtatagtggagaagttgggtatctagaaagatgaagctatttccagcttattaga

SEQ ID NO: 52525 - DNA, 201 bp, Homo sapiens
atattttgtgaggtagtcaggtagctaccttaacaaaagctacctcttgttttgtgccatatcgtagaagccccacttttgctaacagactgaagcaagtrttcaacttgcgacaatttaaggaaaatttgacagtatttgaccttgtacagagacccacaaaaggcattagttgaagataaataaatggtagttagcaat

SEQ ID NO: 52526 - DNA, 201 bp, Homo sapiens
agagagaggtcagctgtgctccaagtgttagttaagattcagcctgcggctctaaaacagcatattctcagctccaaggagctaggcgagcagctctcagyagaaggccaagatgtttataggacagttgggctgtgaagttcttactgagcatgggcgcagccagcaagcaccaggcctgatggaaactcaaacatacca

SEQ ID NO: 52527 - DNA, 201 bp, Homo sapiens
gtctttttgttccggcttatttcacttagctagaaacttaatgttcttaaggttcatttatgttgtagcatacaacagaattgtcttcatttttaaggctraataatatttcatcatatgtatataccacattttctttatccattcatctgtagatagacatttagtttgctttccacctcttggctcttgtgaattatg

SEQ ID NO: 52528 - DNA, 201 bp, Homo sapiens
cctggagcacccacttagagcctgaaaatgccacaggttggtctatacttcacagcatcagggttttctcacgtttgcaagcttcaatgacaagctccacscacatgaatcttgtaagtggtggcagagcttgctgttatccagtgcttattgtgtgccaggcattctgctagatgctttacatccatcatcatttgctct

SEQ ID NO: 52529 - DNA, 201 bp, Homo sapiens
cagaagaagctaaaaatgatttttgaatagcagctacccttataagtaccaagaaacatcagatgtgattgctgcttttcacatgcttagaatataatttytccatattttttcatgcaaaaaaagcaaagaattctagaattaaaaataagagggacctaagatcatatatggtgcagctcctaagatgctacaccataa

SEQ ID NO: 52530 - DNA, 201 bp, Homo sapiens
ccagtgcctgccaccatgcctggctaatgataggtgaatcttaattgtgaagatgagtacctttatcagtagagatggcttcatatcagaactttatcttrcaagctactctttactcttcctctttctccccgctccatgccaacagagttaatgtaagcatagtagagtaatatttcatctttgtgtgtgtagttttct

SEQ ID NO: 52531 - DNA, 201 bp, Homo sapiens
tttacatatgtgagtccagggaaaacaggcagcttaaattatgatataattttttacaaagggaaaacctgaattgaaattattgttttacttcttttctrttcatttctttacagtgagtcaaaaattttttccccttaacttcacatagaaaatgaaactttacacaataaagtaaggatggcaggtttcacaagggaa

SEQ ID NO: 52532 - DNA, 201 bp, Homo sapiens
atatgtctgacttttttacagattactcaaaaacatgagctatgaaatgcttaataaggtgtcagctcgaaagttacagggaaaatgtttaattacagcartctataaattgaattttactatagttatgtgaaaataaagatttctttttaagttcaggatttagtgtattagagccagtatatgaaaggcatgttatag

SEQ ID NO: 52533 - DNA, 201 bp, Homo sapiens
tattaatctagaaatttttagtggtgaaattaagttatcttttgaaacagtctagcaaattagactaaacaatcaggaaattaattaaatagaggcaacarattgggatagtaaacctatttgtaatattaataatagctcactttaaaatatctgagaaagtgcctcagcaaatttatttggtgtagatttttgtgtttc

SEQ ID NO: 52534 - DNA, 201 bp, Homo sapiens
tctgatgcccagtttggactcttccctagctagtctgttatgctgcaagctgaagtttacaaatttgatgcctcctgttggggtatttctgaagggtgtakagggttatcaaacactcttaaaatacatgcctaaggtcatgcttaatgtatacggcaaaccatccctcacagtttcttgcataaacttgaatatgttcta

SEQ ID NO: 52535 - DNA, 201 bp, Homo sapiens
tttacactgtaagaatgcttgctgaatctctcactgcatctctcacataattccaacttcactttagttctgaatacatgaacagtaaagggggcagtttscttttaaattttgcttgtcagttaggcactttaagagtcttatttctttatgtgatttcctgtaagagctcatatatggggattgttattgagtaatttt

SEQ ID NO: 52536 - DNA, 201 bp, Homo sapiens
caaagtagttaagattttgtttgagcaaatccatttagcaggtgcagtactgtatatttatgaaaaaatattttttaaaacttagaaagatatcctgctgyttttaaggctcgtgttgtggcagtaacatgttatattgcagacgtgtttcagccagggccacctcagtccatgatatctgaaggagctcagtttgcctat

SEQ ID NO: 52537 - DNA, 201 bp, Homo sapiens
tatttctttttgtgatcatgggaagatttagaagaagatttgggttaataaaatgatagtttctgtcctataaaccttgttttcatggaaattgatactawgttgtgttctgatacttaaaaataactttctgtagataacatttaatgcatttgccattattcttattcattctagtcataaagagatctgtggtgttga

SEQ ID NO: 52538 - DNA, 201 bp, Homo sapiens
tgatccgcccacctcggcttcccaaagtgctgggattatagcagagtttcattttaccctttccagttggacccaatgttttcttccttctagtactcctygattccttcctatcacgtctcccttagcagatagccccatctttaactttcctcagatgattattttgttcatgtagctgttgtttattgagcaccctgt

SEQ ID NO: 52539 - DNA, 201 bp, Homo sapiens
ataggcgtttccaaagaggaagacgtacagaagcagataggtgtatagttcattcattcacagataggcactaggttagatccagtagttggcgtgcatgyatcaacatgttaatcggaattaaaggctgctacatttaggcttggctagatcatctataaattgaaacccaaaagagaattgttaactaggaaagtagct

SEQ ID NO: 52540 - DNA, 201 bp, Homo sapiens
gatactgaaacgggaaaaacttttatgggctgttttacttatataatgataacttcagacttgagccagaaccacagagaaggagaagtttacatagaaakgaaccttcacacagctgttttgaagctatacagtaagggattatccctttgtttcaattaattaacttacagttgagaggcagttttattttttctgtgt

SEQ ID NO: 52541 - DNA, 201 bp, Homo sapiens
taaattctgtctcttttaagaagtgtacagtttagtggaaaaaattggtaataaattggttttctaacatgagcagttttaatatatgtatttcttaaccmcagattttttttctgtatctcttacctttggtttctgagggaaaaaaagggtttcttttttctccctccaggggcacccttttcatttgtgctcttgatc

SEQ ID NO: 52542 - DNA, 201 bp, Homo sapiens
taattagttgagaaatttccattttttttccctaaagctatatacttaaaaaagaaagaaagtaagtttagtcttggattacaacaaggcattttaaagamagtaatgtgaacactggttcagtgccctttatatgcaggtcatcctataagatcatatctttcagatgcatcgtaagaaatggtttgaagaaaagtgtga

SEQ ID NO: 52543 - DNA, 201 bp, Homo sapiens
agtatgtgtgctgttcatatttaatatgtttgtttttcttacctgtagttcatcagcaatgctgattcagcacgtgtgtgtgtgtgtgtgtgtgtgtgtgwgtgagagagagagacttattgaaattatatctctgatatctcttgaagccagccatttaaacgagtattactttcaatatatacagttacgctagttttt

SEQ ID NO: 52544 - DNA, 201 bp, Homo sapiens
taatgtagtgaatcttctgaatgtagtgagtcttctggccattttttgagtattacattgatagctcattcaaaacgaaaattattcacacaactatggtrtaaataaaaagatgtgatgttaatataatttttggattagattattgccgaatcaagcatctttacaacattatagtttagagtaatgtgtttggctaaa

SEQ ID NO: 52545 - DNA, 201 bp, Homo sapiens
aattaatagcctgaggtactagatattaaatagtatatatttatatttggcaaatgtttattgtgcatcttctatgttataaaaactgctaggcttatttkcttactctttagagtataaggtcacatctctatgtacgttatttaggagtttctatgtggttataaatagcccagcacatacgagatgactttcaggagc

SEQ ID NO: 52546 - DNA, 201 bp, Homo sapiens
tgacttctctgtatgtgaaacactgacaaaaaccaaaaataatttcactactctgtatttatttttctgattgagactttggaaaagtcaagaatgacaayggtaggtatttcttttttgcagaacaagcctgagatggtacttaggtgcttacatacaagctactgatcacttaatgacattaaaaaaattttaattact

SEQ ID NO: 52547 - DNA, 201 bp, Homo sapiens
acaggtaagttactttctttcttgattttttttttcttttttttaagaaaccttgaattgttatgggcacttttgtttctggtgtttttctttctaaataytttttaaaatgtggtcacttcctagttaggctcttgttttgtcataactgtgttactggaatgtgcagggttacttcatggtttccctaagggcgtctta

SEQ ID NO: 52548 - DNA, 201 bp, Homo sapiens
caagtttaaaatcatagaacttttttgcagtagctcatggcatgagttgataatctgcgaattgctctgcgtgtgtgtttgtgtgtgttcgcatgcatgcytcagcccatctgtaagtagctggatcctgtgccgttcctccccctgtttcccacctcacttatttagatacataaatacgcacacttttacatctaaggc

SEQ ID NO: 52549 - DNA, 201 bp, Homo sapiens
ttacttagcgataagtagtacaagagtactttttctatgaattcctcttaaataggtaccttagaaatacatgatcaatgaaattgccagaaaaaaaaaaragttccagtgcctcttcgcattacaaaagtagtgcttttactggttaagtaactggttgcatttaagtctctattttttttgatatgaaaagaatatccc

SEQ ID NO: 52550 - DNA, 201 bp, Homo sapiens
agttacgctagtttttgttacaggtaaaagtttgtccagtttaatcaaatatgtagaattctgtacatctcattgctgaggcataaagaggtttctctagrttatgattattttatttctaagtaaaatttacttagcttatgaaatgaataaaatttattgggttattttttttaaagttttctttaatagtataaaaac

SEQ ID NO: 52551 - DNA, 201 bp, Homo sapiens
ttaaaagcaaaaaatgaggcttgcttttcaaagttttttttttaatcacacttgaggaggcaattcttctatttgtataaatattttgtgcatttgagagmatagtaaataaaattcttgtagctatctcaagggatgtaatagtccagtctatttaaaaatctttttagaaaggaaaccataaaggtatatagctatagc

SEQ ID NO: 52552 - DNA, 201 bp, Homo sapiens
agcccatatctgtgactacacagggttggccctgatcttagggtggcagtggatgagcatccactgtcaactctcctgtatctctgggtgttcagtgcctygcattctgagatttggcccataccttccaggttagcattgagccatgggactatgttagtttcctctgctgttgaactgctttaggaagaaaagacctcc

SEQ ID NO: 52553 - DNA, 201 bp, Homo sapiens
gtatgataaccagtcaaaaaataacataagattgatgtccagggttggatttttatgtgtcatttaaaaatggcatttgtgccacagttcactttacagcygttttccagataattcaaaatactagaaaaatccatctggtcctttagaaaactatcctggagcccttcccttcatgtgcaggttatagaaaaaactctg

SEQ ID NO: 52554 - DNA, 201 bp, Homo sapiens
aacatcagaagtcactttcagagccattgcctttttttccccttcagttctccaatctattttaccattgtaaaatgcttttgagtttcttactttgtgtmagtatatttctacttatgtggtgtggtgtgggggaagtattcacattcacacaatgtctttaacttggatgcagtgaaacctagtttggtggacttcata

SEQ ID NO: 52555 - DNA, 201 bp, Homo sapiens
ctgtggccatttagggacatctcagagcctcattttctgctgtttgaaaaaatctctaattttagggattttgatgattaaatacaagaatgtatttgaartgttatgcaagcttcatagcactgtacaaacatgggatattattagtcttacagtctgtctcaattggcctgggtaatcagttgtcatctgaaatgttaa

SEQ ID NO: 52556 - DNA, 201 bp, Homo sapiens
gtggccatttagggacatctcagagcctcattttctgctgtttgaaaaaatctctaattttagggattttgatgattaaatacaagaatgtatttgaaatrttatgcaagcttcatagcactgtacaaacatgggatattattagtcttacagtctgtctcaattggcctgggtaatcagttgtcatctgaaatgttaaat

SEQ ID NO: 52557 - DNA, 201 bp, Homo sapiens
gtgtgtgtgtgtgtgtgtgtttgtttgagacaaagtctagctttgtcccccgggctggagtgcagtggcgcgatcttggctcactgcaacctccacctccsaggtccaagcaattctcctgcctcagcctcccgagtagctgggactacgggcattcaccaccatgtccagttaatttttgtatgtttagtagagatggag

SEQ ID NO: 52558 - DNA, 201 bp, Homo sapiens
ccattgtcttatattctgtaaacttgtgaaatatgtatttttaaatctctgttctgagaacaccctcttctttttttcccagaaactctagagtagtatgrcattttaaggagtagtagttgtctaaaagggccatgtggaggtaacaaaaattaaaacaagtagagtgagtctagtggggactgtggtggaccagaaagc

SEQ ID NO: 52559 - DNA, 201 bp, Homo sapiens
tcatagcatgtaaattctgtgtgcattgttcattcagacttagatttatgtatttctttgtataaatggagaaaacatacccaccttactaaaactatagrtttatattaatactctcatggtcagaattagatagacgttttaggttgttaataaagcttttttgtgggatgtttaaaaccgtagatcttttgacccatg

SEQ ID NO: 52560 - DNA, 201 bp, Homo sapiens
acccatgttctgtatctttctgactcacctcttccttgtctccttttgatacttggttgcaaaactcttcagtacaacaggtggatattcttttacattcrtcatagatgagttttgtaatcaagtacaagtgaaattgatatgtagtcttgtagttcatgctggtcttaagtaagcttagtagttgtccaccgtgcaaga

SEQ ID NO: 52561 - DNA, 201 bp, Homo sapiens
tattggtgtagtaaaataggagttgctgagaatgcacgtgtagtgtagcccgtaccattagggataaggtgttaggaaaagccgctgagaaaggccacacwgtagtttagaatttgcagaaaccttaggttcataacttaggtgtagttatgacttgagcctagatgttggctgatacccatttgcctgactcatgaggtt

SEQ ID NO: 52562 - DNA, 201 bp, Homo sapiens
tgatctgcaaatggggcctaggtatatctaggctctttctagggtcttgtttaacagcatcactgaacagtgtcagaaaccaatcagaagggagccatttstgttttaaacataacaagttgttggtttgcttccaaaacttcagagaagaactcaactggagaaaagaccagagattaacagtttgtgttagagtaagtc

SEQ ID NO: 52563 - DNA, 201 bp, Homo sapiens
aaaaatctgtgtgcacgcacttttaaattcctccatgattatgcagtaatattggtgtagtaaaataggagttgctgagaatgcacgtgtagtgtagcccrtaccattagggataaggtgttaggaaaagccgctgagaaaggccacactgtagtttagaatttgcagaaaccttaggttcataacttaggtgtagttatg

SEQ ID NO: 52564 - DNA, 201 bp, Homo sapiens
tcactgcaaataaaattcagaaaatacttagctcgtaagagtttctgtctctggccccgcgcggtggctcacgcctgtaatcccagcactttgggaggccraggtgggcggatcacgaggtcaggaaatccagaccgtcctggctaatgcggtgaaaccccgtctctactgaaaatacaaaaaattagccgggcgtggtgg

SEQ ID NO: 52565 - DNA, 201 bp, Homo sapiens
gcttcccaaagtgctgggattatagcagagtttcattttaccctttccagttggacccaatgttttcttccttctagtactcctcgattccttcctatcaygtctcccttagcagatagccccatctttaactttcctcagatgattattttgttcatgtagctgttgtttattgagcaccctgttagaccctgaattagg

SEQ ID NO: 52566 - DNA, 201 bp, Homo sapiens
aatctttttttttttttcagatggagtttccctctttttgcccaggctggagtgcagtggcgtgatctcggctcactgcaacttccacctcccaagttcawgcgattcttttgcctcagcctcctgagtagctgggattaccagtgcctgccaccatgcctggctaatgataggtgaatcttaattgtgaagatgagtacc

SEQ ID NO: 52567 - DNA, 201 bp, Homo sapiens
ataatttataggccaggctgctagcataagagaactcagaaaattaccttatattttaattgtgaaagggttggttgcaggaggggcagatatgctgcttyttgccactctcaccccctcatcccccagtgaagtcttttttttttttttttttttttgagactgtcttactgtgttgcccaggctggagtgcagtggtga

SEQ ID NO: 52568 - DNA, 201 bp, Homo sapiens
tgggggggtatcccttagaaatcaactttgtatgcgttcgcacatttttctctttttagtctggggtcctcagcaggcttggaggggggattgtgtagtayacagtatgacttatgtttgacttgggaaaatttttcctgtatggaacagcaggactgaatctgctttctcatttcctttcttcttttaacattacctatg

SEQ ID NO: 52569 - DNA, 201 bp, Homo sapiens
ccttagggaaaactctagccgtctcattcactgttggagttgttttaggcttacagttactgagggtgtgtatgatttgacttcagttgtaatcgtgtgcrttacatataacatttgaactgactcaagttaatttataacagattaaagtgtggatgtgtggaacagctttctgataatgcagtgtgcctttataaaata

SEQ ID NO: 52570 - DNA, 201 bp, Homo sapiens
tggtctcaaaacgagtaagtgaagactcagagaaatacctttaatttgccttttagtatttttgaataaagcagactctgtcctgccttcctttcatgcaygtattcattgtttcttactgagtgagacaagcacatttaaagtagaatatattccttctctccagaataatagaatgaaatcagtgatcaagtaattttt

SEQ ID NO: 52571 - DNA, 201 bp, Homo sapiens
ccgaagctgcctccctttgcgtgcgtttttgataaatttaagaagtcaaatcgctgacacagatagataatccaagtgtatagggtgaagcgttataaatkaacacattattccctcttaatgtgaaatacttgagaatgcattttctgagtcccctgacatctacccagtgagggctcacattgtgcttttctagtggca

SEQ ID NO: 52572 - DNA, 201 bp, Homo sapiens
tggaataatatttgaaaacaaagtatcactatagttttgtgctgtaggttcttcctgacctaagtgattgttgaaaggactttctctagtttagaggtatrtttatcttcgaacaataatcacttcatgctgttctttttttcctagttgacccattctccagacctttcaaaaactttttaagtggatgtaaactccgtt

SEQ ID NO: 52573 - DNA, 201 bp, Homo sapiens
tggtctcgaactcttggcctcaagtgatctgtcctcctaggcctcccaaagtgctaggattataggcatgagcgaccaagtcctgccctataaatttaatygttagtcttcagtttagaggcatgttgtttatccctgtatacccagaaaagattgagaaaataaaaatactgtattagtttttaattcaaataacttctg

SEQ ID NO: 52574 - DNA, 201 bp, Homo sapiens
gggaagaatcataagagagaaaacaatcatttaaatgtaatatgtggaaagtttcttgtggccataaatggttgtcatttattgagcttttcctgttgccrgataggttaacacttactttttcttcattatttcatttgagtgttttgccactgttgcaatgtcattgttactatcattttacagatgaggaagcgggct

SEQ ID NO: 52575 - DNA, 201 bp, Homo sapiens
aagtagggattgagaatttggatagcagaggagtcagctgtccaaccaaggagaatggacagccactgtttctactctagtaggcagaatctgacaggagrgtgaaaataacctcagtcaagcaaatagcaatcaaccgtgtggatctcttaagaagagagaatgttcatgcagatggggagagaagagaaacgtgtaggt

SEQ ID NO: 52576 - DNA, 201 bp, Homo sapiens
gtgtcctgggtgtggggcaatgaggaagtgacttgggttttctagtgtgtaattttcctctgaaatgcatggaacagcaacaaaactaccaagatacattscccagaatggtttcatggtagcactgaatgcattctacctgtcattatgtcaataaaaaaatttttaatatctgctgctaaaaaataaccaaatgccaaa

SEQ ID NO: 52577 - DNA, 201 bp, Homo sapiens
tgagtcttacaatgggaaaggattgatgtgataatgattccaaagggcccctttatgatgaaattctaaatacgcaaaatcccattaaacctgtggaagtkcatgggctaggtacattgaaatgacatatcattatattgggtatagtgtgcttattatgaagtgtggtataattgaaaattattggtcgtattagcaaaa

SEQ ID NO: 52578 - DNA, 201 bp, Homo sapiens
gtgcagtctaatactgcaactagcgaggaatggaagaaacgtgctggaagttaatacaacccaaatcaaccacagccagataattcccctgatctttgtarcaaccgcccccccttccccacctccacaattaagtgaccctgttgttctgtagtttcaacgagacatttaaggttcatttaaaaaaatgatcatccttta

SEQ ID NO: 52579 - DNA, 201 bp, Homo sapiens
tagaaaattgctttctcaggaagcccagccaattaaggacttgaccatattgaatgtcaagtgttaatttaggtttttcttcattttcccagtagtaatgygggtcctgtgatgagcaaatacatgtcaagtaaaagttgattgcatgaaggacctgggtattatatgtcactgacaagtcacaaatgtactgaagtcttt

SEQ ID NO: 52580 - DNA, 201 bp, Homo sapiens
agagtactggaattgtaggcatgagccactacacctggcctattgccatttttagagataaaaaaaaaatacatatctcacagagttgtggaaattaaatgagatgatattttcagagtgcttggtatgggtacctactggcatgaaacataaaggtagtcttaatagtatatgatcttttgaatttctgtggatattggt

SEQ ID NO: 52581 - DNA, 201 bp, Homo sapiens
atggctgctggatgtgataacttcagtatcagtctgttttctaacatttccagttgcctggttatctgcatgatctgctgttccccccatactaaacttgmtatatattctcacaaactagttcatccccctttctgttgataatgctaccattttcctgtgctcagactattagaactttagtgtcattgttgacacttc

SEQ ID NO: 52582 - DNA, 201 bp, Homo sapiens
agttctttcccccagaagtagtgaataaaatgtgcagatctaaatattacttcacgtcataagaaatttttctcttaatcacaattgttgcctgccttcaygatctcctgattcactaaaaagttttaatgtgtcatcattgccctatattaatgttctccccaagtgttaaggcttttattaggatctagcttacaatct

SEQ ID NO: 52583 - DNA, 201 bp, Homo sapiens
gatggctgctggatgtgataacttcagtatcagtctgttttctaacatttccagttgcctggttatctgcatgatctgctgttccccccatactaaacttrctatatattctcacaaactagttcatccccctttctgttgataatgctaccattttcctgtgctcagactattagaactttagtgtcattgttgacactt

SEQ ID NO: 52584 - DNA, 201 bp, Homo sapiens
attttgtcatggaaaacattttaactaaaaaacaaataaagtaatataaatgatgggtcagaattaggacaatttatgatgtctttgatccagctgtctgactgtgtggatattttgtgtgtacctgtgtgtgcatatatgtgtaatggtgagcatcagtgattatatggagagaatagaaatatagggaactaatttatg

SEQ ID NO: 52585 - DNA, 201 bp, Homo sapiens
cactcccatagcctgctattgagacaggtggtattttcaaagtctaagtaaaatattggcagattatgcctctaccctcagactctgtttttcaactgttsccttctaaagttctgcaccgttcatgcctcactacatacactccagcagttgctggactctgcagaattagaaccaggtctgtctctgacaattagctca

SEQ ID NO: 52586 - DNA, 201 bp, Homo sapiens
agggcagctgccctgggaaatgagtggtacttgaactccaaagaataagtagccgttaacaacttaagcaggacttggaaggagggaagctagagagcacrgtgttggagaagtagggattgagaatttggatagcagaggagtcagctgtccaaccaaggagaatggacagccactgtttctactctagtaggcagaatc

SEQ ID NO: 52587 - DNA, 201 bp, Homo sapiens
gcacatatcaagagcttaagaaatgctgactctaaaattatgacatctaggaagatgtggggcagaattgtaaacttacctgctaaattacctatgagctrcccaccattcgttaattatggcaataataatgggtttatcatgctgtatcctcactcttgcaagcagtgttccttgtgcttagcagtaaatgttgcctaa

SEQ ID NO: 52588 - DNA, 201 bp, Homo sapiens
ttacatttacctgttgtcactcaggaaaagtagcagggggatcttcttgcgcacaatctcagtaattgaaaaatgaaggtagtagctgatctccttttcaraaaaggtacaggtgttggcgtttgttataaatacctattctgagaagcctgcacagcagtaatggggaatactccataacctgctgtccccagtgatttt

SEQ ID NO: 52589 - DNA, 201 bp, Homo sapiens
cctgctgtccccagtgattttcaataacatgtggcatttggggccacctttccttttggctttgtcttttacatttaaaatttattaaagcaacatttttytgggttgcaagcacaaaatggatttttttcctagaagttttgcatatttcttgttatttctttaacacagtacgttttccttcccttgtgtgatctgcat

SEQ ID NO: 52590 - DNA, 201 bp, Homo sapiens
gttttcttcattcagactcaagtgtcattttggggtcctgtggcttagccaccatgttcctttggaaaactatagatcttatcaaaatatttattgaaatyatatccaggcctcaatttctcctttgttttgtagccataaaattgccagtttaggcctctgtttctagcattttaggaaatccaagtaaattatgtccca

SEQ ID NO: 52591 - DNA, 201 bp, Homo sapiens
ttccctctctcactctaagtccccaggggatagagagcccttagattcttggttttagtgatctttgcacccagcataccttaggtgttcaataaagaatrctttgaattgcttcacttatagaaatgctggtaaatttggtgacttagctaaagttgttcccatgtcagaaaatgaatatttttggtgacaaatcatttt

SEQ ID NO: 52592 - DNA, 201 bp, Homo sapiens
gactaggttatttttatatggaggaatatttgttcttcctcgagttatttattttgtttggagacatttatatgataaatttacttgtatatgaattttgaaaaattttgttaaatcaagaattgttcctttactctgcaggtagaatattttaaaattgagcttaatcattattccagagaatttgataaacacatttag

SEQ ID NO: 52593 - DNA, 201 bp, Homo sapiens
ttcacagtttaaggagcttgtattgtatgaatttttttccttttttctaatatctttatcttgcagttaaagcttttgctttttccagatgaaattctgcrtactaaaaagagattaattgaccctttgtttgtttttcctccaggtcttttacaaaagaaaaataatcctgtctttatagatgctcttcttacagtctta

SEQ ID NO: 52594 - DNA, 201 bp, Homo sapiens
tttaaaatgcttcggattcagcaatcctccttcagttgcgttattaggtacattgccttgtactgttatccttctggttgtggttacatggtgcgcccagtttttgccaccccttttcccttccctcatcactgcattgtgtgatatctatattatgttgctgggcctttcctttagaatttgtggaaataatggtatatt

SEQ ID NO: 52595 - DNA, 201 bp, Homo sapiens
ctaatatctttatcttgcagttaaagcttttgctttttccagatgaaattctgcatactaaaaagagattaattgaccctttgtttgtttttcctccaggycttttacaaaagaaaaataatcctgtctttatagatgctcttcttacagtcttactgtgtgactattctctgacgactttccagggtctatactacacct

SEQ ID NO: 52596 - DNA, 201 bp, Homo sapiens
aggaagatcccttgagcccaggagttcaaggctgcagtgagctatgatcttgccactgagtccagcctgagtgacacaacaagagtctatctctttaaaamaaaatttaaaaaattgattatttttaaatgcttattttgtctaagaattaataatcataataaactttttttttcttttagttttaaggagcagggagtt

SEQ ID NO: 52597 - DNA, 201 bp, Homo sapiens
cctgggagggttaaggttacagtgaaccgtggttgtgccactatgctccagcctgggtgacagaacgggaccatgtctcaaaaaaaaaaaaaaaaaaaaargaattcttgaaaggttggactctttattagttatcactaattatatcacagactctgaactctaagaatgcttgttttcatggctctggtctctgttgtg

SEQ ID NO: 52598 - DNA, 201 bp, Homo sapiens
ttgcttagtggtgatatttgaagctgtaggagggcgtgaagttgccaaattaaagaatgaagagcttggccatgggaaacacctgtatttatttacagtggagagagagagagagagaggagagagcagttgatgccagaaaaactaggatagtcagtctctacagcccaggaatgaaggagagttagtgcagcaagctgc

SEQ ID NO: 52599 - DNA, 201 bp, Homo sapiens
cctagccctaatgtgttgagtgataacacactgtagaccactgaaaaggtcatcagagagtgatccaggagggggcttgtttttggctcttatctcattgkcaacagttcttcctctagcggcagctcccatcacatgcagcgctgagacaaggcccttgttctgacaaagggcacttagacccaggccatttaagcctca

SEQ ID NO: 52600 - DNA, 201 bp, Homo sapiens
aaacagatggccatttagaggttcacttgtagatagattatgaagtgagagacacttggggagaatattaagtcaatgtctgtgtgatggtctactctatyttaccaaccaaatatttgctacctggttttaaaaatgcaatagcttatgaataagtttgccaagtagtacaaagttgcgtgtctttattccccaaagtta

SEQ ID NO: 52601 - DNA, 201 bp, Homo sapiens
aatacactcaaaaggtaccggatatagaataagcccactaccgtaacttcagctaacagatcatttcatcatcaggatagctccatgatgtaaagcatgtyattcttgtctcttacaagtgaggaaattgaggcacaaagaggtcaagtaacttgcccagtgacagacagctaattctggcagagctgggatttaaactca

SEQ ID NO: 52602 - DNA, 201 bp, Homo sapiens
tcaagaccagcccgggcaacaaagtgagaccctcgtctctacaaagaagaaagaaaatattatctaccttttgcctaggaggggaagcactgtaggaagcrgtggccagagtagttaccctctttaggtgattcaccacaaaaatacactcaaaaggtaccggatatagaataagcccactaccgtaacttcagctaacag

SEQ ID NO: 52603 - DNA, 201 bp, Homo sapiens
tgcctgactcatgaggttagatgaccatccttcaggcttatgtgttcatcttgtttaattcctaaatgggcatatgcatataattctgacagttttgaatkccttttgtgttctcttaaggagtttagagtgcctctcactcgttatctcactaatctttgcagcatctctttaagccctacagataagacagtgttattg

SEQ ID NO: 52604 - DNA, 201 bp, Homo sapiens
aagagaaattgtttactattagttcattcatgtacatatgtttgcatatgtgggcatgatgtgataaagcactgaaatgctataagctttcacattttacrcagtttttctgataaagctcagtgagaccagtgtaaaaatttcacagggagtttatatttctccttgccacaaactagacatcctgagctttggggccaa

SEQ ID NO: 52605 - DNA, 201 bp, Homo sapiens
ttccttgattgtatagtaaagcaatgggattagatctgtttcctaagattttttggtatgaccttacaattgtgtgtgtgtaaggctgcagaagccaaggrgcccaggctttatacgacttgtctcatattcacaatatcaatatttttttcttttcaaaaaaggtctcccctagttaaagcaaatatatttgagaaccac

SEQ ID NO: 52606 - DNA, 201 bp, Homo sapiens
tgcttagtggtgatatttgaagctgtaggagggcgtgaagttgccaaattaaagaatgaagagcttggccatgggaaacacctgtatttatttacagtggagagagagagagagagaggagagagcagttgatgccagaaaaactaggatagtcagtctctacagcccaggaatgaaggagagttagtgcagcaagctgca

SEQ ID NO: 52607 - DNA, 201 bp, Homo sapiens
accagtttattctttgactttgcctcagtttccttgattgtatagtaaagcaatgggattagatctgtttcctaagattttttggtatgaccttacaattstgtgtgtgtaaggctgcagaagccaaggggcccaggctttatacgacttgtctcatattcacaatatcaatatttttttcttttcaaaaaaggtctcccc

SEQ ID NO: 52608 - DNA, 201 bp, Homo sapiens
agcctaagaggtcaaggctgcagtgagctgagatcatgccaccacattccaatctgggtgacagagcaagactctgtctcaaaaataaaaaaaaaataataaattaaagagtgattaattcattatactgcaacacctgggttttgaaattattaatacttagtgggctgtgttacttttcacagagtattttcttaaaat

SEQ ID NO: 52609 - DNA, 201 bp, Homo sapiens
gcctaagaggtcaaggctgcagtgagctgagatcatgccaccacattccaatctgggtgacagagcaagactctgtctcaaaaataaaaaaaaaataataaattaaagagtgattaattcattatactgcaacacctgggttttgaaattattaatacttagtgggctgtgttacttttcacagagtattttcttaaaatc

SEQ ID NO: 52610 - DNA, 201 bp, Homo sapiens
caacaaaagttttttagagctctttttggttcgaaagtggcaaaataagattaagatatcaggataagagcagtaatgggctccttttctggtgatgtaatttttttttttctttttaccctttgcctccacactagagtagcaatttggccattcacagaattcagacttcagccaaatattttacagaatgttaaaaat

SEQ ID NO: 52611 - DNA, 201 bp, Homo sapiens
gcaggtggatcaggaggtcaggagattgagaccatcctggccaacatggtgaaaccccgtctctactaaaaatacaaaaattagctgggtgtggtggtgcrtacctgtaatcccagctactcgggaggctgaagcatgagaatcgcttaaacccaggaggtggaggttgcagtgagccgagattgtgccattgcactccag

SEQ ID NO: 52612 - DNA, 201 bp, Homo sapiens
aatacatcattctggcagaggcatcagagagaggtgccaccctcaggtgtggtcctctgtgagtgctgacaggactgtctcgagtgttgctgtagaagggytctttgagtaagggcatgataaaaacgtgtaaccaggggccctggcttatcattcagaggtgctgaaaggcagctcaatttgatccttagcctgtataag

SEQ ID NO: 52613 - DNA, 201 bp, Homo sapiens
ttcttcgcccttaggttctatattcttggtccttctgagtcttagtctggggtcccatggtagagaaagtttaggcccagaattttgtctcctagttaaaytgtaggctgaaaaatggagatataatttaactgcatactctgccacgtagctcaccttcctgtgtttctgcttttgtattcatttattttgcagcagtgt

SEQ ID NO: 52614 - DNA, 201 bp, Homo sapiens
acgtttttaaacatcacttttttactattttacttgaaactagaaaaattaaaattctgtatcttggcttgaattatatttctttctttttctttttctgtttttttttttttttgagacagggtcttgctctgtcacccagatgcaatggtgcaatgtcatctcattgcaacttccccttcctgggttcaagcaatcctc

SEQ ID NO: 52615 - DNA, 201 bp, Homo sapiens
gtggcacactcacggctccttttaactttgaactcttgggcttaagtaatcctcctaggattacaggcacatgtcaccacacccagctaatttttctttcrttattacttttctctctgtgttgcccaggctggtctagaactcctggtctcctgccttgacctccctaagtgctaggattacatgtgtgatccaccacat

SEQ ID NO: 52616 - DNA, 201 bp, Homo sapiens
ttgctttctgtcattattttttaaccttaactgttgtttccactccttttcccccaaataacattaccataaatgttcactggaaagtcttttatcactchacatgcatgcctacaatgaaaattaataaaatatttagaaatagaaattttattttaaaaactgtcatcacagtgataaaatccaagcgatataaatatt

SEQ ID NO: 52617 - DNA, 201 bp, Homo sapiens
ttaggccagttacctaacctgattgagcctataatctcagaataagcaataataataatactgtgtttgtatgctttttaattgaaggattaaatgagctwatagcccctagaacagggatgtccaatcttttggcttccctgggccacaatggaagaagaattggcttgggccacacataaaatacactaacacactaac

SEQ ID NO: 52618 - DNA, 201 bp, Homo sapiens
tgggccacaatggaagaagaattggcttgggccacacataaaatacactaacacactaacgatagctgataaactaaaaataaatggcaaaaaaaaatctyatttaagaaagtttatgaatttgtattgggccgcattcaaagccatcctgggccatggtttggacaaatttgctctagaatgatgcctgatatatagttg

SEQ ID NO: 52619 - DNA, 201 bp, Homo sapiens
gctattcaacatgacaggcacttgctgaagtcgcagctaatatatttgcactcttaactggccccaatgccgcgtatccttgagcatgtttggctaagaartgaatgatagctatgtttttttctttgagaaaatgtttctaatgtggaagacagtcgttttattttggatacgaagcaggcgtgtggcataacatgagtg

SEQ ID NO: 52620 - DNA, 201 bp, Homo sapiens
ttttttttctacatcagaaaggagagaaagacaactatcttagaaacatatttaaagcacatgatgaaaaagaagaggtttttaaaaactgttgaaaatayattttctttgtaccaggtaccagatgttgatgttggcagtgcctcagagggtcacagggcatttaaaatcactaggctgtagggagtaaaattccagatc

SEQ ID NO: 52621 - DNA, 201 bp, Homo sapiens
tcacaagtcgcaaagagtaaatctggtatactactagattatcaacctcctgggtgactgctttgagctccggtgtaaacatagttaggagaaccaattcrtgaaaaatggtccaggctttgctaccagtttattctttgactttgcctcagtttccttgattgtatagtaaagcaatgggattagatctgtttcctaaga

SEQ ID NO: 52622 - DNA, 201 bp, Homo sapiens
cagttagcagagattggaccatggcattccagccttggtgacagagcaagaccctgtctcaaaaagcaaacaaacaaaaaacaaaaacgagtttaataagrttcatagggttaaatgtggggggctctgacactgattgcagtcaggttcaacatggccaatatgaagtcaactggcttgtaagtttcctaaaaatttaat

SEQ ID NO: 52623 - DNA, 201 bp, Homo sapiens
tagaatactcttcattccattcattgcagaaattgtgaattgcattcagcctggaactaacatacttttagttgaacaccgaccactactttgaaattacttttttttttttttttttgagacggagtcttgctctgtcacccaggctggagtgcagtggcacaatctcagctcactgcaacctctgcttcccgggttcaa

SEQ ID NO: 52624 - DNA, 201 bp, Homo sapiens
tcttttaattctcttttcttctgtacccttaacagtttagtgctcttcatctttaaaacaaccaaccttggccgggtgtggtggctcatgcctgtaatccyggcactttgggaggccgaggcgggtggatcacgaggtcaggagatcgagaccatcctggctaacatggtgaaaccccgtctctaccaaaaatacaaaaaa

SEQ ID NO: 52625 - DNA, 201 bp, Homo sapiens
ggaggggtggtgtatagcactagttggcaagtatggaatgataaagtcaggattattgctaaagggttattgcagaggtctgagcatgtacttgttagaawtattctggaaagtgtgtgggggacagctgaggggattgaaagggcagaatggacaggctatcagaactgactgggttcaggaaataaggagaagcctttt

SEQ ID NO: 52626 - DNA, 201 bp, Homo sapiens
aagctggaaaggcaggttagagctagattgtagagggcctggaaagaactgtaattggtaattggtggggagctataaacatgatctaggagaatgtgttygacaattggaggggtggtgtatagcactagttggcaagtatggaatgataaagtcaggattattgctaaagggttattgcagaggtctgagcatgtactt

SEQ ID NO: 52627 - DNA, 201 bp, Homo sapiens
tttttaaggctcgtgttgtggcagtaacatgttatattgcagacgtgtttcagccagggccacctcagtccatgatatctgaaggagctcagtttgcctayactgggtagcattttgtcagaagactgctggctgggcagactagatttggatgtattagctagtcagcctaataaccctgtacagactgtattgattttc

SEQ ID NO: 52628 - DNA, 201 bp, Homo sapiens
aatatttattttaaaatgagtgttagagaaacttaaaatcttatttattattgagtctggattaattgttgtctctttttgtaacagagcttgtcctcttygtaaatttgtgttacaaagtagttaagattttgtttgagcaaatccatttagcaggtgcagtactgtatatttatgaaaaaatattttttaaaacttaga

SEQ ID NO: 52629 - DNA, 201 bp, Homo sapiens
ggataggccgacgctggcagtaatgagctttgtaggagttattgcaaagaccaacagtttgtgaaggaattttgcttaacaggccaaggagatagacagarttgagggttgccaagatttgcctgtgcggggcttgtcagtcacattgttttcatccaaacttcatttgaggggaaaattgaatacatttgacagcaatgg

SEQ ID NO: 52630 - DNA, 201 bp, Homo sapiens
acttctaaataaacacccccaaatacttctaatattgaaacattgaaataaatgtgagctatacatacacttaaagattaatacaattaggataattaagtttttttttttttttcaagacggagtctggctttgttgcccagggctggagtgtagtggtgcgatcttggctcactgcaacctccacctcccgggttcaag

SEQ ID NO: 52631 - DNA, 201 bp, Homo sapiens
atgatcacttcctctgggcaagggtatgaagaataaaagtaaatctagcaggaggagtaaatcccagaagacagagataagtacttgaggtcagagactgygtcttttatagtttgtctacataccaaactcattaatatgaataatcatcttagcagtactggttgtagtagcaaaagcaatacaagaaaccagtcttct

SEQ ID NO: 52632 - DNA, 201 bp, Homo sapiens
ctcttaaaaaataataggccgagctgggcatggtggctcttgcctgtaatcccagcactttgggaggctgaggcaggtggatctcctgaggttgggagttygagaccagtctgaccaacatggagaaaccctgtctctactaaaaatacaaaattagccgggcatggaggtgcatgcctgtaatcccagctactcgggagg

SEQ ID NO: 52633 - DNA, 201 bp, Homo sapiens
agtcagagggatacaattttggaatgcagaagatccgagtttaaaacaaaacaaactttagaatggtacttttttttttttttttcctttttggcatttaraagggctaaatccaaccatgctaattcaattgcagccaaaggttttcagtgtgatttaaaatcaggagttctggaaatggagcagttgaaagatgcagtc

SEQ ID NO: 52634 - DNA, 201 bp, Homo sapiens
tgaaagggcagaatggacaggctatcagaactgactgggttcaggaaataaggagaagccttttaataatgatgtatggttctgagtctttgttaatgggsttatggtaataacattgaaaaatatagaaaaatccagggaaagctgtagtaaagaaaggagaccagtgaacctatttgctttgcttgtttagctcgagat

SEQ ID NO: 52635 - DNA, 201 bp, Homo sapiens
aatattttcaacggtagctcccatttacaacctggagctttttatgtcttcttttcagaagtctggtccctaacattttttttttttttttttttttttgkgatctcagtaaacaaagagtgtgtgtatgtgtgtgtgtgtggttatgtgtgtaggaagcctgccatatttcctccctgccccacagaaaatatgttttct

SEQ ID NO: 52636 - DNA, 201 bp, Homo sapiens
gaagacagagtgagatcctgtctcaaaacaaaaacaaaaaacaaagaaattaacattacctttataattcttgcaactttcatgttcatgttaatttcccrttgtgtgcgcccccagcctgttttttttttgttttttttttaattcatttaagtaaagccatcactggttctttccttctagattttctcataaaacatt

SEQ ID NO: 52637 - DNA, 201 bp, Homo sapiens
ggttagcgcctttttcctttgttgtcttctttgtaatttctttcatatgaaacatcaacaaatacctctagaatggatgccactaaatgtagttattacattttttttttaaattaaattcttggaaatatattctcaacctttcttttctttctcatgtcttaagtttgaatccaggttttacaacctaataacatgtga

SEQ ID NO: 52638 - DNA, 201 bp, Homo sapiens
aaaagtttcacagtacaatctgggtcaggggaagacttaatttatttctttgttttctgttgagaatgaaaaaagccacctcccaacaaatgtatctatcwatatgaatcacttcgtccaaagtgtttgctctctcggagtaggttccgcaacctaaaaaacagtcatcaaatctcggggcccctcagaacagccctactg

SEQ ID NO: 52639 - DNA, 201 bp, Homo sapiens
tttgtgccttgtaggtgtatttttttgtacctgtgtctgtaaaacgatacagatgtcccacttgctagatagaaattatcctaatgtcaaatgttctacayagtatgttatatgtggaagttcagatcatgtatcttggggatttatagagggattaaatgttcctttcaaatatttattttaaaatgagtgttagagaaa

SEQ ID NO: 52640 - DNA, 201 bp, Homo sapiens
agtatgccttaacttttgtgttctccacagcttcttatacttggcaagggagcggggcggggggctggggcgggaggatgggggtgggggtgattagtatwccctaacagcagttaaaagtgtcatattaagtggaagaaaagggagtaagaaattgagctaggcagggcaaaagtgtatccattatcaatcagcaaatta

SEQ ID NO: 52641 - DNA, 201 bp, Homo sapiens
ctagatagaaattatcctaatgtcaaatgttctacatagtatgttatatgtggaagttcagatcatgtatcttggggatttatagagggattaaatgttcytttcaaatatttattttaaaatgagtgttagagaaacttaaaatcttatttattattgagtctggattaattgttgtctctttttgtaacagagcttgtc

SEQ ID NO: 52642 - DNA, 201 bp, Homo sapiens
cagtactgtatatttatgaaaaaatattttttaaaacttagaaagatatcctgctgtttttaaggctcgtgttgtggcagtaacatgttatattgcagacktgtttcagccagggccacctcagtccatgatatctgaaggagctcagtttgcctatactgggtagcattttgtcagaagactgctggctgggcagactag

SEQ ID NO: 52643 - DNA, 201 bp, Homo sapiens
ttgcttctacttactatttcacttggttttaaccataccctaaatataagtcttgttgttctagatcatttaaaactctcaagcatcctatcttctgtcarctgttttcccttatcaggtggaacgttggacaatcacgatgctcctgttaacgctgttccttctgtcttttcccctaataaccatggatatcccctgaga

SEQ ID NO: 52644 - DNA, 201 bp, Homo sapiens
tcccccaaccccctctttcaggttaagatctgttcaaaacgttactgtctagttactgtggtgtctttcattcagattctgtttattgactaaaccgcaaggattcctgcccaaagtaccaggcggtctatgcttgactgattttgattttctaacatcagccctggggtttatttgaaaaatgtacatacactgcagctt

SEQ ID NO: 52645 - DNA, 201 bp, Homo sapiens
ctaactcaatatgcgtaagaatgatattacagatatatcattctttaagtttttgctatcgtcataacttttttcctttaaaaatatccgtacataacaayatcagttttgttctttttgctctattttctctttgacattctagagtatttttctcttggtgatttaaattgttttgctgttataatttaaaataaactt

SEQ ID NO: 52646 - DNA, 201 bp, Homo sapiens
cctcccttgttttgaaatatattctcagtatgcttttaccatttgttacgaacccatattctaactcaatgcgtaagaacctatattctaactcaatatgygtaagaatgatattacagatatatcattctttaagtttttgctatcgtcataacttttttcctttaaaaatatccgtacataacaatatcagttttgttc

SEQ ID NO: 52647 - DNA, 201 bp, Homo sapiens
tttttatcatgatgactctccagaaaggcatgagatcccaaacagacgcatcttgcctcacataaattgtttgttatgctaacgtcaaaaacagacagatrtggaaccaatcaggggaatgtaaattacaggtcgcttgatgtggagtaacttctgcatgttggtcagtgtaggtgcgcagccaaaaatgcactgtgtgaa

SEQ ID NO: 52648 - DNA, 201 bp, Homo sapiens
ttaccctagcctatgttaactatttgtctacacatgtattcctatatcctaatgactttgaactgtggctaagcctgtctgccttccactgctttgtattstgcaatttcacgtgttactgtccacacgcatacatgctttaaatgggaggaatttatttctggcacgttacttagtgtgtctgatctgaagatgtaccct

SEQ ID NO: 52649 - DNA, 201 bp, Homo sapiens
gttactgtgaaaatttatattaaactaagaccggactctgcaaagaaaataaaaccatgtaattccaaggctacatattttcaaaggaatttaattctgtyctctgaatgcaattaagtagtctctctctctctctctctccgtttgaggaagagagaagggaagaagggatgattctcacttttcactaggaaccggtaa

SEQ ID NO: 52650 - DNA, 201 bp, Homo sapiens
tagttgactggtgagagacaagaccattatactataacatatgcctataacatgtataatacatttctgtgaatgaaataataatgaaacaccaggcattrtaagagccaagaggacacctatcaaacacatagcctgagtgtatgagaggtgggagaagcagggagacatgcctggaggacttaggaattaatctggaaa

SEQ ID NO: 52651 - DNA, 201 bp, Homo sapiens
gtgtacccaggattaaagtggcagaaagtggcctgttttattatttttttatatacttcgtggacacttggaattgttgaaagccgtgtttaagtgagacrtcacaacaatattaaatatatctgtttagagcttgagagtttttcttctaacgggcgttttacacaagaacactgtaaaagccggtggcaggtattattt

SEQ ID NO: 52652 - DNA, 201 bp, Homo sapiens
gttccagtgagctatgattgtgcactgcactctagcctgggcgatagagcaagatcctagctcttaaaaaataataggccgagctgggcatggtggctctygcctgtaatcccagcactttgggaggctgaggcaggtggatctcctgaggttgggagttcgagaccagtctgaccaacatggagaaaccctgtctctact

SEQ ID NO: 52653 - DNA, 201 bp, Homo sapiens
gtggctcatcccagcactttgggaggccgaggcgggccgatcacctgaggtcaggagtttgagaccagcctggccaacatggtgaaacctcacctctactaaaaaaaaaaaaaaaaaagccgggtgtagtggtacaggactgtagtcccagcaactcaggaggctgaggcaggagaattgcttgaacctgggaggtggagg

SEQ ID NO: 52654 - DNA, 201 bp, Homo sapiens
cctacagttaacaatatgatattgtgcatctagaaatttgttaagacagtacttctcatgttaagcattcataccacaaaacaaaaacaaataaaaccctraaggtccacatggaagcttttggagatgatgaatatgtttattattctggttgtggtgatggtagcatgaatgcatacatatatccaaactcaccaaatt

SEQ ID NO: 52655 - DNA, 201 bp, Homo sapiens
tgttttctgtaagcctttcagaacagtacttgtcaaaccagtgttaaaaccaggatctgctgactggagttcaggcatatggtgaaacaagatgccttctrggttaaagaggtgactaacggtgggccaactgctctcctttacttgccaaccagagcctgcttctcaaatctcatgggaggcaggcttcaatgagctgag

SEQ ID NO: 52656 - DNA, 201 bp, Homo sapiens
agagtattgaatttctacttctttccttttgatcctatgaaagttgtaaatctctgtagtatgtaagttatgacctaactctccaaattacttgaatatgrttgacattaagctcatattccaaatcactttgctccacagttcagttatttgtaggcaggaagcatatttgtttatgagggagcaggaagtatatttgtt

SEQ ID NO: 52657 - DNA, 201 bp, Homo sapiens
ggccctttttgccttaatagaagagaattgaaatgcacctgaaacgtagcagtaattgaataaatacccttttgccaatacatcattctggcagaggcatsagagagaggtgccaccctcaggtgtggtcctctgtgagtgctgacaggactgtctcgagtgttgctgtagaagggttctttgagtaagggcatgataaaa

SEQ ID NO: 52658 - DNA, 201 bp, Homo sapiens
tctgcttaggcagcattaaatttgtgaattcctgtgtctcaggttctatatgtcagatacattgtggattaagtaaactttggttgaatggcctgagaacytaactacatttctgcattctctctcaataccaatatttctgtgagagaatgttacctagattttggacaaccaacttaacatacactgttcatgttggca

SEQ ID NO: 52659 - DNA, 201 bp, Homo sapiens
taagctttagagaaacaaaggaaaagagacataattcaggaacaacagcctttatatcctcacatagaaacaaaacattgggtaatagagggaatgttttyctataagaaaaactggtaaagatgcaggaaaaataagatgaaaaaaatctgctaagcagctcaaggtctaagaagttttaaaatgtgcagatggcatccc

SEQ ID NO: 52660 - DNA, 201 bp, Homo sapiens
cacgtctcccttagcagatagccccatctttaactttcctcagatgattattttgttcatgtagctgttgtttattgagcaccctgttagaccctgaattrggaaagataaattctgtctcttttaagaagtgtacagtttagtggaaaaaattggtaataaattggttttctaacatgagcagttttaatatatgtattt

SEQ ID NO: 52661 - DNA, 201 bp, Homo sapiens
cgtccctcccttaccttactgcctttcttattcactgtcacctgctgccttttttcttcctcctctctctccattttctcttttcctttccattattctcwctttttattttgcatcctctcatttttgttacaattgattctcatcctctaccgtcacagaaagtgaactgcaattccattttcatttataatgttggtt

SEQ ID NO: 52662 - DNA, 201 bp, Homo sapiens
ttccttctagtactcctcgattccttcctatcacgtctcccttagcagatagccccatctttaactttcctcagatgattattttgttcatgtagctgttrtttattgagcaccctgttagaccctgaattaggaaagataaattctgtctcttttaagaagtgtacagtttagtggaaaaaattggtaataaattggttt

SEQ ID NO: 52663 - DNA, 201 bp, Homo sapiens
aagaatgcctccacctctcagttgtatgtgtgtgtgtgtgtgtgtgttttttttttttttaaatctcagaatgttccctgggagttttattctttttgaaycattcatctactcaccctagaagaatgaagtgctttcagatgttatttcctcaaaactgtgcaaagtttattataagagctacctgctgtcttccagcta

SEQ ID NO: 52664 - DNA, 201 bp, Homo sapiens
gctatgctactgggtctcaaataaagagaaagttttacttataaatgaaaccattaggaatttcttgaataaacaaaggtttttctccctttgatatgcaraggaattttgtttgtaattatagtcatataagtctatgtctaatacatgcaagcatcattcattatcttttatatgagaatgcactcctgtcacctaaag

SEQ ID NO: 52665 - DNA, 201 bp, Homo sapiens
aaggcaacaattctttgggttcttgtttgtttcctctcagatattgaatttgcttcttttgagacttttttgtgcttaatggtggggaactggagggaagtttaacagaaaagctttcaggagatgtcggttctagaggggaaggcacatttgtgtcaacatagtgtacgttttctcatcttttctcattgtccactaatg

SEQ ID NO: 52666 - DNA, 201 bp, Homo sapiens
tcaagggaacagtgaactatgatcgcgccctgaattccagcctgggtgacagagtgagaccttgtctctaatatattttatttatgtttatattctatatrtatattctaaatagaggtatttagcagaattctgccacagggtaatttggctctttcagatgttcaaaagtagacccaaatctttactggcattttccaa

SEQ ID NO: 52667 - DNA, 201 bp, Homo sapiens
aagaggacttggctaaagaaggtagatcatcacatctcattaccatttggataaacaaccaaaacatgtattctagtgacagtacttttataacatcggcktgtgtgcgtgtgtgcgtgtgtgtgtgtgtgtgtgtgtgtgtgtatgtgtatctgagtgatgtgtgcttttctgaaattagtatttagctttttagtggaa

SEQ ID NO: 52668 - DNA, 201 bp, Homo sapiens
cttggctaaagaaggtagatcatcacatctcattaccatttggataaacaaccaaaacatgtattctagtgacagtacttttataacatcggcgtgtgtgygtgtgtgcgtgtgtgtgtgtgtgtgtgtgtgtgtgtatgtgtatctgagtgatgtgtgcttttctgaaattagtatttagctttttagtggaaataggaa

SEQ ID NO: 52669 - DNA, 201 bp, Homo sapiens
tggtgtttttctttctaaatactttttaaaatgtggtcacttcctagttaggctcttgttttgtcataactgtgttactggaatgtgcagggttacttcayggtttccctaagggcgtcttaaaagaaaaaggggaaaggataccgaagtaaaagaaagcagagacattgttgaaaagtttcacagtacaatctgggtcag

SEQ ID NO: 52670 - DNA, 201 bp, Homo sapiens
agaaggtagatcatcacatctcattaccatttggataaacaaccaaaacatgtattctagtgacagtacttttataacatcggcgtgtgtgcgtgtgtgcktgtgtgtgtgtgtgtgtgtgtgtgtgtatgtgtatctgagtgatgtgtgcttttctgaaattagtatttagctttttagtggaaataggaagcctacagt

SEQ ID NO: 52671 - DNA, 201 bp, Homo sapiens
aaaacaaaaaacaaagaaattaacattacctttataattcttgcaactttcatgttcatgttaatttcccattgtgtgcgcccccagcctgtttttttttkgttttttttttaattcatttaagtaaagccatcactggttctttccttctagattttctcataaaacattgaatataggtttggtataaagaagccactg

SEQ ID NO: 52672 - DNA, 201 bp, Homo sapiens
taattatagtccgtgctattggataccttaggcagcttatgttctgctaaagagtaggaggtgcacacataaacaaggaactaatacaaagtggtatgtattttttttttttttttgagatggactttcgctcttatggcccagtctggagtgcagtggcacgatctcagctcactgcaacttctgcctcccaggttcaag

SEQ ID NO: 52673 - DNA, 201 bp, Homo sapiens
tttaaaacacttgaacatcaagaataatctgctatgggaagagaaagtagaaaggaaagacactgaacaaacatccacttgatgttaggcagcaggacagragttggtggtccagggagcagcctgccggcctggtgtccttaggctccagtctgactttagaagtcccatgtctatgaacttacatccataagttcaggc

SEQ ID NO: 52674 - DNA, 201 bp, Homo sapiens
ttttttttttttacaatttttgtagagatggagtaacctaggttggtcttgaactcctgaccgcaagcaatcaaccatccttggcctcccaaagtactggsattacaggcaggagcctgacatctaattaacatcttttgtttgaacattgcattaccactgccatccccaaaagaaggcaaaaggagcatttctaaaaat

SEQ ID NO: 52675 - DNA, 201 bp, Homo sapiens
gaatggagaaattgcacaggaattgtagaacatggattaaaatgtaattagaaagttacgttgaaaatcaaagaactagttaaaatgagtgtcattatgctttttttttttttttttgagacaaggtctcactctcatcactcaggctggagtgcagtggcatgatcatggctcactgcagcctcgacctccctgggctca

SEQ ID NO: 52676 - DNA, 201 bp, Homo sapiens
actttcaggagctaacatttagaccataactgagccaactttacattctcttacagctgaatattttactttcttcagtgtaattaaaaaaaaatttaagkatcacagttttacaaatgttaaagccaaagactggtgtcagatattatgtgttatatcagaaagcattgttgagaaaaattcccggggaagggccctagc

SEQ ID NO: 52677 - DNA, 201 bp, Homo sapiens
atatagttttagttaaaaacagccaagtgtatggcagtagtaactgtgatgataattccagtagtggagcagttttcctttttcatagcatctgcctcatmtaggaaatcttcacattagcagcagagcatttatctctctagtgaataatttttatgtttgcccatgtttgttgcttagtgctgagaaacttcatatgtc

SEQ ID NO: 52678 - DNA, 201 bp, Homo sapiens
gtaactgtgatgataattccagtagtggagcagttttcctttttcatagcatctgcctcatctaggaaatcttcacattagcagcagagcatttatctctmtagtgaataatttttatgtttgcccatgtttgttgcttagtgctgagaaacttcatatgtctttttttaaacacacacacacacatattttattgcgtac

SEQ ID NO: 52679 - DNA, 201 bp, Homo sapiens
ttgtgctgaagacagctgtttgaagatttctttaatataaaatctttaatcttaaaccatgctgaggaaggtcagtttggggcagaaaaagagccatgtatttgtcccatttactccagaagaagctaaaaatgatttttgaatagcagctacccttataagtaccaagaaacatcagatgtgattgctgcttttcacatg

SEQ ID NO: 52680 - DNA, 201 bp, Homo sapiens
caaatggaggaccacatcatcagctgctacttgaagtggccagtctgtgcccaactactgaactgttcagagcccacagaaagggctacggtagagacatktatggtatctcgtatacacaggcatgccttatttctttgtcttctaccccagtgctacctacctaaagacctctggtactcttccctttcctgggaaaga

SEQ ID NO: 52681 - DNA, 201 bp, Homo sapiens
ccaaatggaggaccacatcatcagctgctacttgaagtggccagtctgtgcccaactactgaactgttcagagcccacagaaagggctacggtagagacaygtatggtatctcgtatacacaggcatgccttatttctttgtcttctaccccagtgctacctacctaaagacctctggtactcttccctttcctgggaaag

SEQ ID NO: 52682 - DNA, 201 bp, Homo sapiens
aagtgcggagtgatgttgatccctccttggccgcactggcctaatgctgtgtagactatgttgacagatcataagccacgcgcgctctccctggctctccstccccacgtcagaaggcactggacttctgtgttccgtctagccccagggaatggcatttgcaaagacctggtggcctgaaatacttcagggcgcattctg

SEQ ID NO: 52683 - DNA, 201 bp, Homo sapiens
catctgccacttagaagtaggtattctttttgtactgttttgtgtaagcagaaccagtggtgggagcatcgttggggactctcctttcttcctttcattcrgtgataatggttatactcagtttaaaaaatatatattgtagcatattttctgttggccaaacatagggtgaccaacctgtcctagttcacccatgactga

SEQ ID NO: 52684 - DNA, 201 bp, Homo sapiens
aatgaaaacatcctccataagccatctattcttcaagaaaaggtaaaagagagagaaaaaatatgatctcatccacataccttttattggtttttttttcrtcgtttgacagtactaaatgttctttcctttccagccatctactgaaggctacattgcagttgtgttacccaaatttgaagaaagtaaaagcataacaga

SEQ ID NO: 52685 - DNA, 201 bp, Homo sapiens
tttcaaataaaaggactataaaacgtgttatttttctgtaagggctataacatacatgtcaatatcactgtttttaaataaaatatacttttatacagaaraaatcattcgatgtattaattccattggttatctatcctcttatgctgttgaagtcataagttaccccttcccaacccccacttgctctttctttcacta

SEQ ID NO: 52686 - DNA, 201 bp, Homo sapiens
aaacttttgttttccacattttcctcaaagtgcatgtttttgtttttgtttttcttaactagaaaaaatatcccttactaacacactggggaattacaaaggggggggggggaaagaacaatatcccttcttcaaaaagtcttagtgattgaccctggtaaataagttcctttatctattaagttctaatattaaaatgag

SEQ ID NO: 52687 - DNA, 201 bp, Homo sapiens
gtgaatttatagtttaagagtgatttacactgaatttcaaataaaaggactataaaacgtgttatttttctgtaagggctataacatacatgtcaatatcmctgtttttaaataaaatatacttttatacagaagaaatcattcgatgtattaattccattggttatctatcctcttatgctgttgaagtcataagttacc

SEQ ID NO: 52688 - DNA, 201 bp, Homo sapiens
aaatgaggtagaaatcttaatgaaactaactttatacaatattgctgtcatactgtgtcatgttgaattttatattgtttcttgttgatggattttcccayacttttgaaatctttatacctggttatatgtagctttttcatttacagttgataaaatatattatcagtctgtaaattcccatttatcatgtgtcttagc

SEQ ID NO: 52689 - DNA, 201 bp, Homo sapiens
tccacattttcctcaaagtgcatgtttttgtttttgtttttcttaactagaaaaaatatcccttactaacacactggggaattacaaaggggggggggggaaagaacaatatcccttcttcaaaaagtcttagtgattgaccctggtaaataagttcctttatctattaagttctaatattaaaatgaggtagaaatctta

SEQ ID NO: 52690 - DNA, 201 bp, Homo sapiens
acgtcagaaggcactggacttctgtgttccgtctagccccagggaatggcatttgcaaagacctggtggcctgaaatacttcagggcgcattctggggccrgcgattgcagtgcgagctctagggtgttgctcgcagtaagatgagtactctaaacggaggccccaaaggtaggcggagggctaggttgcaacagtcctta

SEQ ID NO: 52691 - DNA, 201 bp, Homo sapiens
cttctataatgtgcctaccaaaaagcctagtcctagcccatctgcctcaactcctctcccttttaggttgtagggaagaggccggagtgtagagtatattrtatcttctgtcccccttatgccaacaagatggccttcccctctgaaacaaagtaaaactgcaacactgtgacttcttaaatgagggatatgtgaaaaggc

SEQ ID NO: 52692 - DNA, 201 bp, Homo sapiens
agataaagtgatgataggccttaaatgacttttctgatacttctgatgatcattttgatttagttcaaaatatattctactggaatttgccccaccttagyttggccactgaattcttatgctaattagtaatttagtagttgccatttacttagtgcctagaatttaagcactttatgaatgttatctctaatggcaaaa

SEQ ID NO: 52693 - DNA, 201 bp, Homo sapiens
agctggcagaaatgttggatcagcggcaggccattgaagatgaacttcgtgagcacattgaaaaactggaacgacgacaggccactgatgatgcctcactrttgattgtcaaccgatactggagtcaggtagctaacttgtttatttgttcagatttttatttgaccaatttagttctccttactgttctcttcatttcca

SEQ ID NO: 52694 - DNA, 201 bp, Homo sapiens
tgaactcctgacatcaggtgatccgcccgccttggcctcccaaagtgctgggattacaggcataagccaccgcgcccggccttctctcagctttttaagaragcattaaactaaatggggctcctctgacaatttgtgactaccaattagctctcacgtttccatagactgttaggacaccttgtcctcactctttaaaaa

SEQ ID NO: 52695 - DNA, 201 bp, Homo sapiens
atgttgcccaggctggtctcaaacttggcctcaagagatcctctcttctggcctcccaaagtgttaggattacaggcatgagccactgtgcctggactatrtattttaattaaatttttagaaattctaaccttcagtgttactggtaatgtcttcattatggcatattaatcttttatcagtgcttctcattttgagcca

SEQ ID NO: 52696 - DNA, 201 bp, Homo sapiens
tgtatggtgaagtcaccagatatattggcaggaactgggatagacagggacccaggtgctgaagtctttaatgaaggaaggatggtgcttacgagatagawgacagtgttgattggagtcgagggtgatctagctggatggtggccttaaagcagcattactttgtagatgtttatgtgactagaacagcgagatgggttg

SEQ ID NO: 52697 - DNA, 201 bp, Homo sapiens
catctgttttgtatgatgtaaaagggggcagggtttggtagaggttgatgttgccttgctggagaatgggaaatagctcacttgataaagaaatatttctrgacaaattataaaatctgtttaggctaagaattcattttgtaaaggcaccggtttcggtggtttgatgaacttctctagaagtctcagcatactgggtac

SEQ ID NO: 52698 - DNA, 201 bp, Homo sapiens
ttgctactttggccagcagttccagtgaagagatggagtctcagctgcaggaacgtgtggagtcttcccgccgagccgtgtcccagattgtgactgtttaygataaattgcaagaaaaagtggagctcttatcccggaagctaaacagtggaggtgaggcaagaccctggaggccgggagtagtggaggaggaataagaat

SEQ ID NO: 52699 - DNA, 201 bp, Homo sapiens
gactttgttctccacaagcttgaattaaagcaggattcagtttgcatttgtgtttatggtttttctttgaaacttttgtctttattattacaagttgattytatatctgctgttatagaattaaattttcttgcatggaaataatcagcttaggttaagaggttggccttgtttagagtatttagatctttgcttaattga

SEQ ID NO: 52700 - DNA, 201 bp, Homo sapiens
tttgtcctagggaaggagctggagagagaaaaatattgagagggatgtgaaattactaatggagtgagggttttgtagagacagaagagaacaggatcctkagcacaagctgaggttttaagaatgtgtgcataattgtgttaatgggtcaaagagatggggaattgttttccatctgatggcttctattttctcattaaa

SEQ ID NO: 52701 - DNA, 201 bp, Homo sapiens
tttcttgcctcctaaattttacaattttactccctcatgtgcaattaatctctcattcattcagctgtcattcatagagtggcagtaggtctttactctgrtaggtactgggcatataaagatgagatgacaaaattcctgccctcacagatcttgtagtctgcagtaatgggagaatagtatccattagaatgcaatgtg

SEQ ID NO: 52702 - DNA, 201 bp, Homo sapiens
tcttcttggttgtgtagtatatgagagccatttggatcataaactttcatggttgttcaaactctgacatcttttctttttaggcacgcttgacctgtccrtgctgtaacatgcgtaaaaaggatgctgttcttactaagtgttttcatgtcttctgctttgagtgtgtgaagacacgctatgacacccgccagcgcaaat

SEQ ID NO: 52703 - DNA, 201 bp, Homo sapiens
ggcctgtggaatgttgtggaggaaaccactagccccatgggaagttggatttagaggaagttcctctagttgagatgagcagggagcccctgatcccaacyggcttgaggtcctggcaacacaagttgagctctcacagtcattttcagataacaaccaaaaatgatggtgattttttggcagttggcttctctcactaca

SEQ ID NO: 52704 - DNA, 201 bp, Homo sapiens
tctgaggctagtcatgtccccggagattgacgggaccgtcagccaatcggccgtctgaacgagtgatggcaaccccaatgacaagcaacagaatgaggaastttatccccgcagaaagaccagatcgcagtagcaaaggtcaacaagtcaacaaaagccaagggctctccgtcaggcatcagcgaggcccgagtactctta

SEQ ID NO: 52705 - DNA, 201 bp, Homo sapiens
ccatagggcctgtggaatgttgtggaggaaaccactagccccatgggaagttggatttagaggaagttcctctagttgagatgagcagggagcccctgatyccaactggcttgaggtcctggcaacacaagttgagctctcacagtcattttcagataacaaccaaaaatgatggtgattttttggcagttggcttctctc

SEQ ID NO: 52706 - DNA, 201 bp, Homo sapiens
ccagaggtttcataaatctctggcaaggggttgtgtaaaatggatccttcttgatcaccacctgtcctagaagacaggtaagagcaaattctgtgtctttytgtggtcaccagctataatcagcaggatttgcactgaattccacaaagtcatgtggtatgaattaagcaatgagtctaattgaagaatcttactaggtca

SEQ ID NO: 52707 - DNA, 201 bp, Homo sapiens
gaagggagaaatgattcatttttatacagcttacttttctgtactttctaagcatatccaaaagtcttttgatagtctgtgcaaaattttatcttttaggkgtgatatgaaatgtaaaatgaaactgttttaaaatattctgctcaatcaaaattcccttgctctgatgacctttattttcttattacattgttcccctcc

SEQ ID NO: 52708 - DNA, 201 bp, Homo sapiens
agattttggtttatccagccaccacaatcctgtgaaccaattccttataatgtccctctctctctttctcaaatctctttctacacacacacacacacacwcacacacacacacacacacacacacagagttgattttattttctggagagctgtgacacctgtgaaggtgttagataactggaacttttgagaaagacat

SEQ ID NO: 52709 - DNA, 201 bp, Homo sapiens
cttccagggcggcactgtctaaccctgccagggcggcactgtctaacctgccagagcggcactgtctaacctgccagagcggcactgtctaactctgccarggcggcactgtctaacctgccaaggcagcactgtctaaccctgccagggtggcactgtctaaccctgccactgcagtactgtccaaccctgccagagcgg

SEQ ID NO: 52710 - DNA, 201 bp, Homo sapiens
cagggcggcactgtctaaccctgccagggcggcactgtctaacctgccagagcggcactgtctaacctgccagagcggcactgtctaactctgccagggcrgcactgtctaacctgccaaggcagcactgtctaaccctgccagggtggcactgtctaaccctgccactgcagtactgtccaaccctgccagagcggaact

SEQ ID NO: 52711 - DNA, 201 bp, Homo sapiens
ccctgccagggcggcactgtctaacctgccagagcggcactgtctaacctgccagagcggcactgtctaactctgccagggcggcactgtctaacctgccvaggcagcactgtctaaccctgccagggtggcactgtctaaccctgccactgcagtactgtccaaccctgccagagcggaactgtctaacctgccagggcg

SEQ ID NO: 52712 - DNA, 201 bp, Homo sapiens
aaagaaagttacctgtgcacttctcaaaagtgttgcttatagaagcatgtcatagtagaatggagtgatgttaaaacagatggtgttatgtaatgttttartatattatgtaccttgttctataattctgtaaagactcttttggtattatgaaccttctatctttgcacagtattaattgatttttgaaaatgtgttata

SEQ ID NO: 52713 - DNA, 201 bp, Homo sapiens
ctgcttgatccgtttgtctagattaaggtaaatacaattattgtctaatttaactgacgttgagtacagatcaactaataagtatcagaccaacaattggygccagtgacttcagataatagagcttctgtatgcctagtgacaaaacacaacttcttaaaactctgtcactaaattaatttatatctaaatgaacagtgg

SEQ ID NO: 52714 - DNA, 201 bp, Homo sapiens
ggtaaatacaattattgtctaatttaactgacgttgagtacagatcaactaataagtatcagaccaacaattggtgccagtgacttcagataatagagctyctgtatgcctagtgacaaaacacaacttcttaaaactctgtcactaaattaatttatatctaaatgaacagtgggaaaatttagtttcctgtgctcttcc

SEQ ID NO: 52715 - DNA, 201 bp, Homo sapiens
tacagcttacttttctgtactttctaagcatatccaaaagtcttttgatagtctgtgcaaaattttatcttttaggtgtgatatgaaatgtaaaatgaaastgttttaaaatattctgctcaatcaaaattcccttgctctgatgacctttattttcttattacattgttcccctccctctactacgcctgtcataggaag

SEQ ID NO: 52716 - DNA, 201 bp, Homo sapiens
tgtgcctgaaccagaaccagactctgatagcaatcaggagcgtaaagatgaccgagagagaggcaagtgttcgtgatggattctatcactgcatgctatcygggtttttaaagtagagctctgctttgaggctttccatttgagggaaaaaaaatggattttgttatttccagtttataattttggggggcttcttttttt

SEQ ID NO: 52717 - DNA, 201 bp, Homo sapiens
tcctttgaaggtacattggttatagactgaaatcttaagagtctctcactaaagaatctttgtgttctctgtaggtgaattccaaaggttataaggtgtayggagcggggagcagtctgtatggcggcacaatcactatcaatgctcggaaggtaaaatcagtgactcaggacatgttttggactgtatgtcagctttcat

SEQ ID NO: 52718 - DNA, 201 bp, Homo sapiens
aatttttacatgttggctgacttcttccagtgagcatcccaagatcaccaggtagaaccttcatggcctttctgatatagcctcaaaattgtgtagtgacrtttccattgggtctctaaagttgacccagattcaagaggagggaacaaagatcccacctcttgttcagaggactttcaaaggatttttgtgtcatgtttt

SEQ ID NO: 52719 - DNA, 201 bp, Homo sapiens
cccttttatttctccctcttgaactctttaaggcaattttttttttttctggtgtggtatcagaatcatctgagtgacttgtttaaatcacttgtttaaakttttgaactccatccccagacctactgaatctcagttacccagggttgggggccacagaaatttgcctatataacaagtacacaaatgtctgttttataa

SEQ ID NO: 52720 - DNA, 201 bp, Homo sapiens
tagtgattattctgagggcacatagctagaaagtgattgagctgtgttgtgactgtaggtctgtttgacttcaaagctcttgttcttcatatgcctttgtwtactaaaccccagtgttaaggtccatgctggcctggttgcatgaatatcatctggggaatttattaattcatatggattatcctggaccttcaaaggggt

SEQ ID NO: 52721 - DNA, 201 bp, Homo sapiens
atttgactgtggaagtttcctgattccacttaaaaaagtaaggtataaatattaaggataaattattggtagttgaaagtaggagaagaagaattcccggsatgagaacagcacatataaaggtatgagagagcatgagaaatagtttaatatggctagagcttacgtgtatgtgagaaaatagtgggtagaagctgcaaa

SEQ ID NO: 52722 - DNA, 201 bp, Homo sapiens
cttctgcttctacttcttaattacttgtaagattttttaaaagtcaatagctttattcatagaaaataactaatgaataattgtgaccttgttgagtttamcggctcatttttcttatttctttgtggagactaatacgattggtttactgggcaggaggaactagacattagaacactgcaaaccaaaaatcgcaagctg

SEQ ID NO: 52723 - DNA, 201 bp, Homo sapiens
tgttggtcttcaaacctgcccagaagaattttcttcttaggttgttagtgtaggggccagccccacagggtcggtgggtctctccctgtgtgcggagacgrgagagtgtagaaataaagacacaagacaaagagataaaagaaaaggcagctgggcctgggggaccactaccaccaagttgcggagaccggtagtggcccc

SEQ ID NO: 52724 - DNA, 201 bp, Homo sapiens
cttgttctataattctgtaaagactcttttggtattatgaaccttctatctttgcacagtattaattgatttttgaaaatgtgttataactttttattttwgtgcaattcctttcctcttatagttggaagatctaaggcaaagactcaaggatctggaagataaagagaagaaagagaacaagaaaatggctgatgagga

SEQ ID NO: 52725 - DNA, 201 bp, Homo sapiens
aattcctcaaatccctcagattctctccagaactcttcatttcagcacgtaggggtaccaacgaacaattttctgaggtgtctgaggctagtcatgtcccyggagattgacgggaccgtcagccaatcggccgtctgaacgagtgatggcaaccccaatgacaagcaacagaatgaggaactttatccccgcagaaagacc

SEQ ID NO: 52726 - DNA, 201 bp, Homo sapiens
tctgaaattcctcaaatccctcagattctctccagaactcttcatttcagcacgtaggggtaccaacgaacaattttctgaggtgtctgaggctagtcatktccccggagattgacgggaccgtcagccaatcggccgtctgaacgagtgatggcaaccccaatgacaagcaacagaatgaggaactttatccccgcagaa

SEQ ID NO: 52727 - DNA, 201 bp, Homo sapiens
gccagggcggcactgtctaacctgccagagcggcactgtctaacctgccagagcggcactgtctaactctgccagggcggcactgtctaacctgccaaggcagcactgtctaaccctgccagggtggcactgtctaaccctgccactgcagtactgtccaaccctgccagagcggaactgtctaacctgccagggcggcac

SEQ ID NO: 52728 - DNA, 201 bp, Homo sapiens
gaatgggttcccagaagctcaatgaagaaagtatttcaagaaggagctgattaggtgctgctgatgtgttctcattcaggtttcagttggaacaaggggartaaagggaggactgaggtgttatatttaataatagttcactggagataccaaaacacctttgttggtgaaatagtggggatggcaccctgttttcagtga

SEQ ID NO: 52729 - DNA, 201 bp, Homo sapiens
ccagggcggcactgtctaacctgccagagcggcactgtctaacctgccagagcggcactgtctaactctgccagggcggcactgtctaacctgccaaggcrgcactgtctaaccctgccagggtggcactgtctaaccctgccactgcagtactgtccaaccctgccagagcggaactgtctaacctgccagggcggcact

SEQ ID NO: 52730 - DNA, 201 bp, Homo sapiens
ctagagagaggtctgggctaaagctgtatatttgggaatcgtcattttgtaagttgtgtttacatctatgagactacagactcctttaatgaataagcatraagaggtctgctggggcactacaatattttcatgtcaaggaatgagaaaggactaatcaaagatacaaacaaagagggaccaatgaggtaagaggatagg

SEQ ID NO: 52731 - DNA, 201 bp, Homo sapiens
cagggcggcactgtctaacctgccagagcggcactgtctaacctgccagagcggcactgtctaactctgccagggcggcactgtctaacctgccaaggcavcactgtctaaccctgccagggtggcactgtctaaccctgccactgcagtactgtccaaccctgccagagcggaactgtctaacctgccagggcggcactg

SEQ ID NO: 52732 - DNA, 201 bp, Homo sapiens
acagagtttttgctataggaggcctttgcagtaatcttaatgagaaatcatggtggcttggaccactgtggaggtagcattgataagatctgctgatggaytggataactcacatgaaagataggagggaggatcatcccaggattttgaaagtaatggaatttttacttactgagctagagaagtgtatgagaggagcag

SEQ ID NO: 52733 - DNA, 201 bp, Homo sapiens
ctgtctgtttgtttggtctttgattcaaaagaattgcatttatgggcttgtttataaattcactaaacatttattgaattttattgtattctagccctgtyctcagtgcttaggatattgagaggactaaaattcagtctctacttcttaactcaggttatgaatcagaataaccttgggagttttctgagcatattctta

SEQ ID NO: 52734 - DNA, 201 bp, Homo sapiens
ttttcttcttcttactctctttcgctataactgcatctctccaaaggtggggatctgaggcatgtatccactgatccccgctccaattggttgaaggttgycattgaaagcagtccctcctgtgcattttgagattgctgttaggagccagctgtgattgcgggacagaaaaactgagtctccaaagtgtgcttgaagtgg

SEQ ID NO: 52735 - DNA, 201 bp, Homo sapiens
cccttcactaggccctggtttgtgttgctcctctctctctctctctgtgtccatgtgttctcatcacttagctcctacttataagtgagtacgtgcggttktctgttcctgtgttagtttgctaaggataatggccttcagctgcatccatgtccctgcaaatgacatgatgtcattctttttttatagctgcatggtgtc

SEQ ID NO: 52736 - DNA, 201 bp, Homo sapiens
gctggaatctctgcacgggccttggtgagtaactgctgcgagttctgttcccgcgcggcgccagttcaaagaacttaggttagatcacgcttagggcccarcaggactgtgccaggcctcaggagtctccaccctctccagttttggggccgtcagtctcctgggcctgcaattatccacgctgaggctgaggtctttggc

SEQ ID NO: 52737 - DNA, 201 bp, Homo sapiens
tgagttattttttaaaatgatgcaaaacttctacactgcaaaaaacactgttagcaaagccaaaagattaaatgacaaaaagtaaaaaatatttttaactyttattacaaagaaggcttatctgatacaaaaaaaactctccaaaatagggaaaaaaactcaagaatccagtggaagaataggcaaaagaaatgagttggt

SEQ ID NO: 52738 - DNA, 201 bp, Homo sapiens
ggctccatttccctgagattctcttggttctgctcacccctatgtggtcgctccattctcaagaatgatctcaggaagcctccaacagtttcagcctcacwcagaaaatctggaagataaaaatctgcttcaattctagtattcaaagaaattcaccctgattaaagtgtcaattgctgactaggactttggcttgggaaa

SEQ ID NO: 52739 - DNA, 201 bp, Homo sapiens
ctagagcagtgttccttaaatgtgcccagataggaagcataattacaaaagtaagaacttgcattttcagagagctttcccccggaaattctgattcagcmagtctagagcaagggctatggtatctaaatgtttctgtttaacgagtgataccatgctaagtaaaatacaacttgtttaaaataagggagttcctgaatt

SEQ ID NO: 52740 - DNA, 201 bp, Homo sapiens
caggcataagccaccgcgcccggccttctctcagctttttaagagagcattaaactaaatggggctcctctgacaatttgtgactaccaattagctctcaygtttccatagactgttaggacaccttgtcctcactctttaaaaaaggcagacctggctctagctcccctgagtaagccacctccctggtccccagaaatt

SEQ ID NO: 52741 - DNA, 201 bp, Homo sapiens
acattggcccaggtccgcaaggagtatgaaatgctgaggatagaatttgagcagacccttgctgccaatgaacaagcaggtataatgattctcactccatkctgtagtttgctcttaataccttccttgaaagatacaacacagaccccagggtttgttaatgctgacttcaactcagaagtcataagtaccttaaatcct

SEQ ID NO: 52742 - DNA, 201 bp, Homo sapiens
agtcctcagcttgctttctgaatgatggtcatgccatgcttctggaaatggaaattccaaatcttacctttgtaattacatgctgtacccccatccccaaygcctgatgcaagcatttcagtgatgctgttctttctcctccaaggccaggtgggtttctagttgcacagtaacagtaatatggaagagtagacctaccca

SEQ ID NO: 52743 - DNA, 201 bp, Homo sapiens
aaagttgctagtttttactctattgttttactctattgttgctttgcttacatatattatgtcagtttctgcctttttttctatcaggaaaacgactgtcwtcttctgccaaaatgtcaggaattggaaataaaagagcagctggagaacctggcacctccatgcctcctgagaagaaggcagctgttgaagattcaggga

SEQ ID NO: 52744 - DNA, 201 bp, Homo sapiens
agcatctgtgagatgggcattggcatgaggctttggtgagagaatggctgtaaagtgcttgacatggagtaagtgctcagtagtcattagccagtacatayggggttaggtttaggatcagggtcagtgtcagggttacggttaggtatgtcattaagcaacacaagagtacctactgtgtgcaagacactgagttgtggg

SEQ ID NO: 52745 - DNA, 201 bp, Homo sapiens
gtgatgaccagaaaggtgcctcatggggctagaataagagcaaggagaggccgggcgcggtggctcatgcctgtaatcccagcactttgggaggccgaggmgggcggatcatgaggtcaggagatcgagaccatcctggttaacacggtgaaaccccgtctctactaaaaatgcaaaaaattagccgggtgcggtggcggg

SEQ ID NO: 52746 - DNA, 201 bp, Homo sapiens
ggaggcaaaggcaggcggatcacctgaggtcaggatttcaagaccagcctggccaacatggtgaaaccccatctctactaaaaatacaaaaattagctggrcatggtggtgcatgcctgtaatcccagctactcaggaggctgaggcaggagaattgcttgaacccaggaggcagaggttgtggtgagccgagatccgcca

SEQ ID NO: 52747 - DNA, 201 bp, Homo sapiens
acccaggatacacacaggtgcacacgtgtgatgtatgtatctttgtacatgcaacaatctatgacattttcttctttttttttttttttttttttgagacrgagtctcactctgtcacctaggctggagtgcagtggtatgatcttggctcactgcaacctctgcctcccaggttcaagtgattctcctgtgtcagcctcc

SEQ ID NO: 52748 - DNA, 201 bp, Homo sapiens
tgtgatgtatgtatctttgtacatgcaacaatctatgacattttcttctttttttttttttttttttttgagacggagtctcactctgtcacctaggctgragtgcagtggtatgatcttggctcactgcaacctctgcctcccaggttcaagtgattctcctgtgtcagcctcccgagtagctgggactacaggcacaca

SEQ ID NO: 52749 - DNA, 201 bp, Homo sapiens
ttctcctgtgtcagcctcccgagtagctgggactacaggcacacaccaccacaccgagctaatttctgtatttttagtagagatggggtttcaccatgttrgctgggctggtctcgaactcctgacctcaggtgatccgcctgcctcggcttcccaaagtgctgggattataggcatgagccactgcgctcggcccgatat

SEQ ID NO: 52750 - DNA, 201 bp, Homo sapiens
agagaaaaacattatataaaaaaatatgcaagccgggcacggtggaccacacctgtaatcccaacactttaagaggccgaggtgggcggatcacctgaggycaggagtttgaaaccagcctggccaacatggtgaaaccccatctctaccaaaaatacaaaaattagccaggtgtggtggcacgggcctgtgatcccagct

SEQ ID NO: 52751 - DNA, 201 bp, Homo sapiens
ggggctcatttgattcacttactataccttgaatagctgtgactggaaaaagacggctttttgcttctgcgaaacaccttgtgccaggcactttcacaaayttgcccgagtaattttttcaaggaccatatctaataagcagcaaagctaagatgcattcattccatatatacttatatgtgtgtgtgcattgactgtgtg

SEQ ID NO: 52752 - DNA, 201 bp, Homo sapiens
gcacacaccaccacaccgagctaatttctgtatttttagtagagatggggtttcaccatgttagctgggctggtctcgaactcctgacctcaggtgatccdcctgcctcggcttcccaaagtgctgggattataggcatgagccactgcgctcggcccgatattttctatcctatttattttttaagatgctggttgctag

SEQ ID NO: 52753 - DNA, 201 bp, Homo sapiens
ctgtaatcccaacactttaagaggccgaggtgggcggatcacctgaggtcaggagtttgaaaccagcctggccaacatggtgaaaccccatctctaccaamaatacaaaaattagccaggtgtggtggcacgggcctgtgatcccagctactcgggaggctgaagcaggggaattgcttgaacctgggagttggaggctgc

SEQ ID NO: 52754 - DNA, 201 bp, Homo sapiens
acatggtgaaaccctgtctctactgaaaatacaaaaattagctgggcatggtggcgcacacctgtagtcccagctactcgggaggctgaggcaggagaatygcttgaacctgggaggcagaggctgcagtgagctgagatcgtgccactgcactccagcctggatgacagagcaagactcagtctcaaaaaccaacaaaaa

SEQ ID NO: 52755 - DNA, 201 bp, Homo sapiens
aaagtatacatccaaagagtgtaaggttgcagatgactattcccaagacagttctctgcccactttcttgctcaaactttggccaatgaacaagtctttcttttttttttctttgagacggagtctcgctctttcactcaggctggggtgcagtggcacaatctcggctcactgcaagctctgcctcctgggttcacgcca

SEQ ID NO: 52756 - DNA, 201 bp, Homo sapiens
ccattttctgttgcaggatcccatcctgtctccttaggctccactgggggatagctgtttcttaggctttccttggttttggtgacagttttggggagtaycggtcagatattttgtaggatgcccctcaactggaatctgtctgatgttttttctcatgattagattggagttgtgggtttgggaggaagatcacagaag

SEQ ID NO: 52757 - DNA, 201 bp, Homo sapiens
gtagctgggactacaggcgcccaccaccatgttcagataattttttgtatttttttttgagacagagtcttgctctgtcacccaggctggagtgcagtggygcgatctcggctcactgcaagctccgcctcccgggttcacgccattctcctgcctcagcctcccgagtagctgggactacaggcgcccaccaccatgcct

SEQ ID NO: 52758 - DNA, 201 bp, Homo sapiens
tagctgggactacaggcgcccaccaccatgttcagataattttttgtatttttttttgagacagagtcttgctctgtcacccaggctggagtgcagtggtrcgatctcggctcactgcaagctccgcctcccgggttcacgccattctcctgcctcagcctcccgagtagctgggactacaggcgcccaccaccatgcctg

SEQ ID NO: 52759 - DNA, 201 bp, Homo sapiens
gagtggatcacccgtacctgtcgaaagggctaggatgagatcgtgggtcacaggcccgagccgtgaactctgtggctgcctccaccagaggtttccatctrccctactagcattggctgccctgggggacgggctgtagttctagaacctgattttaactcaggaataaagactttctgcggtcagtggccccaggtgtat

SEQ ID NO: 52760 - DNA, 201 bp, Homo sapiens
ctcgctcaaggtctgtgggctagtgacagaattccagtgcccaagctcttaaccatcatgccacactgccccctccctgcgaatcctctgaagagctgatrtttccttgcagctgttctgagactttcaggatctctttttcccccagctgtgcactgacctgcaggctgcactaatgtcacctggtgacctgggcacagc

SEQ ID NO: 52761 - DNA, 201 bp, Homo sapiens
cttttcaaaggtgggaccagctgttggtggaccattgttctaggcagccttccctgaccatctcttctgtcctccactccactgctttgcctgggttgggygtccctcctctgtgctttccaagcctacctcttagcacttagccatggacagtagaagtatctttattagcctatctcccccacaagtctgggagcagct

SEQ ID NO: 52762 - DNA, 201 bp, Homo sapiens
aaaggggcattgtggtagtacctattggagaaattatggttagaaaaaaagattaagtattcaaaatacataggacagcacctggcccaagacaggtgtcstgtgactggtacttgtggctgttatcattatgatgattattgactcaggctggagagaaagaagtgagttagagcctgggatttgttaagctttctctag

SEQ ID NO: 52763 - DNA, 201 bp, Homo sapiens
agtttttgtttggttggtccaattcttgaagctgcttgggttcgagcacctaggtggggccatgcactgcccagatccctcccactcccttctgtgtgacyctagcagcatcagtcatttctggtacccgccttaaagcctttgagctccgggtccttccatctcagacttctcatgcatccagtgagctgggaatgggct

SEQ ID NO: 52764 - DNA, 201 bp, Homo sapiens
tcatgcatccagtgagctgggaatgggctcatcctgagattgggaaactaggtcttggagcgatgaatgacagacatgtgatagtgaagctggaactcaarcccactcccatcttaccacagcccagtggtctctccgctaccctctactgctgcttacattgggaccataaagccttaaatgatagcaactgtagacagt

SEQ ID NO: 52765 - DNA, 201 bp, Homo sapiens
gctgggactacaggcgcccaccaccatgttcagataattttttgtatttttttttgagacagagtcttgctctgtcacccaggctggagtgcagtggtgcratctcggctcactgcaagctccgcctcccgggttcacgccattctcctgcctcagcctcccgagtagctgggactacaggcgcccaccaccatgcctggc

SEQ ID NO: 52766 - DNA, 201 bp, Homo sapiens
agttattacatattctaatcaatactgcaaacacaaaacaaaagagagactgagttaggatctcttgccccacagaggctggggagctgagagaggtgagmgagatggcgtggtgtggtggttaaaagcctggggcctggaatccatgcctcaggctggcctctagtcctagatctaccactgaccagctctgtgatcatg

SEQ ID NO: 52767 - DNA, 201 bp, Homo sapiens
accatgttcagataattttttgtatttttttttgagacagagtcttgctctgtcacccaggctggagtgcagtggtgcgatctcggctcactgcaagctcygcctcccgggttcacgccattctcctgcctcagcctcccgagtagctgggactacaggcgcccaccaccatgcctggctaattttttttttgtattttta

SEQ ID NO: 52768 - DNA, 201 bp, Homo sapiens
caggggtggtggcacacctggagttcagctactgggaagctgaggtaggaggatctcttgaacccaggagttcagaggctgaagtgagccatgatcacacygtgcactacagcttgggtgacagaatgagaccccctgtctataaaaattttttttctttttttattttgagacagagtcttgctctgtcgcccaggctgg

SEQ ID NO: 52769 - DNA, 201 bp, Homo sapiens
cccagaagatgctcttctatggggaaaagccggagcaggcccaaggccttccacctccccgccctgtggcaggctttgcctaggcaatgactcctcagtcaatattgacaatgctgtggccttggcctctggccaccactgccagcaaagttcaaagcctctttcttgtcaggagtggtgatggggatgcctgggcattgc

SEQ ID NO: 52770 - DNA, 201 bp, Homo sapiens
tgatgggaaactggtagactaactctagcccttccccctcctacacgtccctgtcattcctcttaggaaggataagctagagcctcgctggcagtttgtaygagtatctctttcatggggctgttgcttgcctcagtgttactagtagtaatcatctgcaaaataactgtaccactaatctttactccctcctcccaatta

SEQ ID NO: 52771 - DNA, 201 bp, Homo sapiens
ccagaagatgctcttctatggggaaaagccggagcaggcccaaggccttccacctccccgccctgtggcaggctttgcctaggcaatgactcctcagtcartattgacaatgctgtggccttggcctctggccaccactgccagcaaagttcaaagcctctttcttgtcaggagtggtgatggggatgcctgggcattgct

SEQ ID NO: 52772 - DNA, 201 bp, Homo sapiens
gcaagtggcagagctggaattggaagccaggtccagctgacttcaaagctaaagacaatgttagagctgactttgaatgagaagttggagtttactagtgmaagaaagaaagaaccgagggcctgcctagcagccctatattttatagagatataaaaagtatacatccaaagagtgtaaggttgcagatgactattccca

SEQ ID NO: 52773 - DNA, 201 bp, Homo sapiens
ctgggtctagtggtcaacaaatcaaacatggtccctgcattgagagcttacagtctaatgggagagaaaaacattatataaaaaaatatgcaagccgggcrcggtggaccacacctgtaatcccaacactttaagaggccgaggtgggcggatcacctgaggtcaggagtttgaaaccagcctggccaacatggtgaaacc

SEQ ID NO: 52774 - DNA, 201 bp, Homo sapiens
gttatgagccaccacgcccagccaaaatatcttatttcaattaacaaaatgcgtgaagttaccaagacattacattggagggtaggaaaaaagccaataattttttttttttttttgagacagagtcttgctctgtcaccatgctggagggcagtggcgcaatctcggctcactgcaacctctgcctcctgggttcaagtg

SEQ ID NO: 52775 - DNA, 201 bp, Homo sapiens
caccagctgtgtgaccttgagctaggcccttaacttctctgagcttcagtttcttcacctgaaaaaatggggacagaaatagaccccccttccagggctgkggcctgaagtgagatgacatgcatgaggtgagatgacacactccagcaagaacagcggctggccctaaagaagcacctttcggtgcatgttgacaatcac

SEQ ID NO: 52776 - DNA, 201 bp, Homo sapiens
cttgctcaaactttggccaatgaacaagtctttcttttttttttctttgagacggagtctcgctctttcactcaggctggggtgcagtggcacaatctcgsctcactgcaagctctgcctcctgggttcacgccattctcctgcctcagcctcccaagtagctgggactacaggcgcccaccaccatgttcagataatttt

SEQ ID NO: 52777 - DNA, 201 bp, Homo sapiens
atttatttatttatttatttatttagagacaggttctcaactctgtcacccaggcaatcacagctcaccgcagcctcaaccaccccaggctcaggtgatcstctcacatcaacctcccgagtagctgggaccacaggtgcttgccaccatgcccagctaatttttctattttttgcagagaggaggttttgccatgttgcc

SEQ ID NO: 52778 - DNA, 201 bp, Homo sapiens
ggtgcatgttgacaatcacagtcgtgatccttttacacccagggtgaaaaggtgaaaagcaggggcctccttaactccacatcccaaagggaggagccagygttaccatggcaaactgaagtctggcctcctcccatctgcttttaattctaatttcaagactggactagaggtctgtggttttctgatctctctacccag

SEQ ID NO: 52779 - DNA, 201 bp, Homo sapiens
aaagccaataattattttaattatttttctattgtcaatacccattagtgaaagaagatttgggaaataaaagcggaaagagaaactctctcatcccactrtgcagggctattattcacatttcaatttatctttaatttttcttctgtgcacagttatgacataggatatactatgtgtacttttatttcttgtctcttc

SEQ ID NO: 52780 - DNA, 201 bp, Homo sapiens
aaattagccaggtgtggtggcacgggcctgtgatcccagctactcgggaggctgaagcaggggaattgcttgaacctgggagttggaggctgcagtgagcygagatcgcgccattgccctccagcctgggtgacagagcaaaaactccatctcaaaaaaaaaaaaaaggcaaataagtatagattcaaaaattgtgatctg

SEQ ID NO: 52781 - DNA, 201 bp, Homo sapiens
tgatcccagctactcgggaggctgaagcaggggaattgcttgaacctgggagttggaggctgcagtgagctgagatcgcgccattgccctccagcctgggygacagagcaaaaactccatctcaaaaaaaaaaaaaaggcaaataagtatagattcaaaaattgtgatctgaggggaccatgaaagaaaagggagtgaatg

SEQ ID NO: 52782 - DNA, 201 bp, Homo sapiens
tacacaaaacaacagcacatattttacagagcaacatgcattttgaggggtctctatcccaccattggtgtaggtccctgcagtggtggaggaggggcccrgtatgggtttggaggagaaaggaggaaaaatgaaaataaagtaaatccacggaggggtcttgcacagagagatgatggcagcgtgctgtggactgaatgt

SEQ ID NO: 52783 - DNA, 201 bp, Homo sapiens
tatgatcttggctcactgcaacctctgcctcccaggttcaagtgattctcctgtgtcagcctcccgagtagctgggactacaggcacacaccaccacaccsagctaatttctgtatttttagtagagatggggtttcaccatgttagctgggctggtctcgaactcctgacctcaggtgatccgcctgcctcggcttccca

SEQ ID NO: 52784 - DNA, 201 bp, Homo sapiens
tgtagagacagggtttcaccatgttggccaggatggccttgatctcttgacctcgtgatccacccacctcagcctcccaaagtgctgggattacaggcgtragccaccgcgcccggcaaaagccaataattattttaattatttttctattgtcaatacccattagtgaaagaagatttgggaaataaaagcggaaagaga

SEQ ID NO: 52785 - DNA, 201 bp, Homo sapiens
gtgagccactgcaactggccaattttttgtatttttagtagagatggggtttcaccgtgttagccaggatggtctcgatctcctgacctcgtgatccgccygcctcggcctcccaaagtgctgggattacaggcatgagccactgcgcctggccaatgaacaagtgtttcagtgccactgacaaaccaagactcccctaat

SEQ ID NO: 52786 - DNA, 201 bp, Homo sapiens
ctccagcgagacaaaaggcaatttaccgaaatgttataatcacctggaggctggcacgcggggacatccatgctttatctgcggtgttgttagcagcaccrtaatgaaggctttgtggagggataatacgctgtaactgccaaatcaaatgcccgcaccaatcacacatccctgccagcagacgcgcatttgctgtaagca

SEQ ID NO: 52787 - DNA, 201 bp, Homo sapiens
aggaaagaaagttatgagtattgaacgcctccatggtgccagggacttaccacatcccagttctttgaggaatagaccattattcgtatttggcagatgcrgaaactgaggctctgggagtaagttatttactgacaatcaagcagctagtaaagggaggaaccagggtatgaacccaggtccctctgacaccagaggcca

SEQ ID NO: 52788 - DNA, 201 bp, Homo sapiens
ggcctccttaactccacatcccaaagggaggagccagtgttaccatggcaaactgaagtctggcctcctcccatctgcttttaattctaatttcaagactrgactagaggtctgtggttttctgatctctctacccagcccctggcattctgttacggacgtgtccccatcatcctcatcgtttcttatgcacctagagcc

SEQ ID NO: 52789 - DNA, 201 bp, Homo sapiens
ggcattctgttacggacgtgtccccatcatcctcatcgtttcttatgcacctagagccttaggccccctaagctccccctagacacaggcctttgttgagyccctgcatccaccagggtttcacttggggatcagacccagggcctggcccccaccaaaaccagtgcagggctagagggaacatatacataaatagacagt

SEQ ID NO: 52790 - DNA, 201 bp, Homo sapiens
ataagtgctcaaaaagaaaagggggcaccaggaagcaggaggaacagcaacatcaacagtgttggtgattttgcatcccctctccattcagcacacatgcrttctgcagtgaatgtgaggacactgcatcagtcctctccatccctgtgtgcctcctgtccggggagcaccttgctacagaggatgattctagcatttaaa

SEQ ID NO: 52791 - DNA, 201 bp, Homo sapiens
tggggtattgggcattttaggcacaaaaagttgagaaactacattaattttcgatgggctgtatatgggtgagagagaaacacacagacaaggtaaaagayggaaggctttcaaccatttgcctttggccttctgtgtattttcattgggtttgtgtgctgaatcagccatttccatgctttggccctaggaatttgggct

SEQ ID NO: 52792 - DNA, 201 bp, Homo sapiens
atctgtaaaatgggaaagcaatgcacattcagcagcagtgttccaaggaatatgtaatgatcatatatggatgttatttacaaatggtagatactcaatcrattttttttaatttagggaggggatattttcctcttggagtttaaatgaatagagtaacctctctatacagtaggaagttgatatttaacgtttggttta

SEQ ID NO: 52793 - DNA, 201 bp, Homo sapiens
ttttgtcttgattgtgatgatgttttcccaggtgatgtcaaaacgtgtcaaattgtacactttaaacacgtggcctattgtatgtcaattacacttcaatrtatctacttaaaaaaaaaaccttaaaagagacatgatttccctgtaccacgtgtgaatattaaaaaaaaaaaggttaatgtagtatctgtctgacctcaa

SEQ ID NO: 52794 - DNA, 201 bp, Homo sapiens
ctctgggtggctttgcctgcatcttctcttcacagggactctttgagatagatatcattatcctattttacagatgggaaaagtaaggctcggagtaaacytgcccaaagtcacccagttagcatttggcagagcaggtattaaaacccaggtcgatcagactgtaaagcccacaggcttcctacaatagagccctgctgc

SEQ ID NO: 52795 - DNA, 201 bp, Homo sapiens
aaaattttgttttcagcagagtactgctgggatgagaaggatgagaatgctgagaacggggttcctgctcactctgttgcctgccagctctgatcctccasctgtcacacagggctcagtgatttccctgtgtctttacaggatggagggcaaagccaagtacatcctccctaccgaaacaatatatgttggggaaatgaa

SEQ ID NO: 52796 - DNA, 201 bp, Homo sapiens
gtaacaattcctcccctgccgccccccgactcccccatggcagcctcctggaggcattcgaaggacacagcttccccttcagtagctggagtcaacctggrccagcactgtaatggtttgttttgtctcctttaatagaagtgagtggaaagccagaccctatgaggccggagcctactctctttctcagcccaagctctg

SEQ ID NO: 52797 - DNA, 201 bp, Homo sapiens
  misc_feature (1)...(201): n = A,T,C or G, or insertion/deletion polymorphism (see Tables 1-2)
ggcatgtttcacggcgagggaaccctgtacttccccagcggaagccaatacgacgccatttgggaaaacggattggccataaaggtgatcagctggggggncggatgctgtggaggagagatcctcacgcaagaagagcctcaccctctggcaccccatcctccctgtctggtgcccaccttgttccattcactcttctct

SEQ ID NO: 52798 - DNA, 201 bp, Homo sapiens
ccccaccccagttccaaaggccctggaaattccccttccagccatggtgcccatcagattctggtaacaattcctcccctgccgccccccgactcccccayggcagcctcctggaggcattcgaaggacacagcttccccttcagtagctggagtcaacctggaccagcactgtaatggtttgttttgtctcctttaatag

SEQ ID NO: 52799 - DNA, 201 bp, Homo sapiens
acgcaaagggggagcaagggcacatcttacatggcagcaggcaagagagcatgttcaggggaattgccctttataaaaccatcagatctcatgagacttaytcactatcatgagaacagcatgggaaaaacccacccccatgattcagttacctcccactgagtccctcccatgacatgtggggattatgggagctacaat

SEQ ID NO: 52800 - DNA, 201 bp, Homo sapiens
aggggactaagtttttctccaggaaaagcatctatagctttcatcagtttcactaagagcatcttggggcctgactcatgacctaaaaaaggttaagaaakgctccttgttttatagcttggagagtctaagccccaggaaggggatgtgactttcccgaggtcacacagtgaattaatagtatcattggaatttccaccc

SEQ ID NO: 52801 - DNA, 201 bp, Homo sapiens
ttggtcatgggggacagagaaatcacagaactagctgccagaaaacctgggctctagtgtccacagtttttactgtgtgtggttttgggcacatctctacrctctctgggcctactaggggggtttatttcagggagcagtgtgaactccaaggtgagagtgagcctctaggtgaaggggagaatgaacagagcaaactct

SEQ ID NO: 52802 - DNA, 201 bp, Homo sapiens
gccaaaggagatcagattaggtaggagatccttctggtaagatgatgggagagaggagcatgtgaagggcatgggctcagggtgatgggataggtgacctsggatcctggtcctggccccagctctcaggctgcctgctggatgaccctgggccaatgccttccctctctgggcccctttctcttcatctgtaaaatgaga

SEQ ID NO: 52803 - DNA, 201 bp, Homo sapiens
gccaggatggtctcagtctcttgaccttgtgatccacccgccttggcctcccaaagtgctgggattacaggtgcgcaggtgtgagccaccgcacctgacctttttttttttttttttttttgaaaacgagtctctgtcgcccaggctggagtgcagtggtgtgatctcagctcaccacaacctctgcctcctgggttcaag

SEQ ID NO: 52804 - DNA, 201 bp, Homo sapiens
aagcagtctgtccacctcagcctcccaaagtgttgggagtacagttatgagccaccacgcccagccaaaatatcttatttcaattaacaaaatgcgtgaarttaccaagacattacattggagggtaggaaaaaagccaataattttttttttttttttgagacagagtcttgctctgtcaccatgctggagggcagtggc

SEQ ID NO: 52805 - DNA, 201 bp, Homo sapiens
ggcatgagaatcgtttgaactcaggaggtggagtttgcagtgagctgacatcacaccactgcactccagcctgggcgacagagcgacactctggtctcagaaaaaaaaaaaaaaaaatcaaaatggggtcaatagcatcatctacctcccaagattgttgtaaataagataattcatgtcaggtgtttagaacagtgcctt

SEQ ID NO: 52806 - DNA, 201 bp, Homo sapiens
tgagcctcaagacgaggggaggagagggatagtattaggagaaatacctaatgtagatgacaggttgatgggtgcagcaaaccaccatggcacgtgtatamctatgtaacaaacctgcacattctgcacatgtaccccagaacttaaagtataataaaaaataaataagtaataaaaaaataaaaaaagaaaagtgtagtt

SEQ ID NO: 52807 - DNA, 201 bp, Homo sapiens
ctggggagcctgctttgcagtgcaccccccatcccagcctggagtcctctgaggatgggcctagacccccccaaaagacgacagcccctatgacagaagcktccttcctccaggtcctggtccagccctgtgctcactgccaccctggcattcggcataagccctgggctgtctctgtgggttggaagtgcctctgctctc

SEQ ID NO: 52808 - DNA, 201 bp, Homo sapiens
cttgatgacctgactccggagatccccacttggcgcccttgaggtcattctccattctgcagtcacttccatctttttttttttttttttttttttttgaracagagtcttgctctgttgcccaggctggagtgcagtggtatgatcatagctcactgtaactttgaactcctgggctcaagcgatcctcctgccaagtga

SEQ ID NO: 52809 - DNA, 201 bp, Homo sapiens
cactcccactaggaatatcaaaagatacggaccctcttgccagaaaaatgtccaatgcatgcacacacacacacacgtgcacccacacgcgcacatgcatmcacacacacattttgcagatagtcttaaggggtgaatggtccctctaaagacctaggtcaagaaaccttgctctataatgagaaagaaactgccaggtag

SEQ ID NO: 52810 - DNA, 201 bp, Homo sapiens
tcctcatgcaagccttcaagacaggcatctttgtagatgaggaaatgagacctagggaggtgtgaggccactcgctcaaggtctgtgggctagtgacagarttccagtgcccaagctcttaaccatcatgccacactgccccctccctgcgaatcctctgaagagctgatatttccttgcagctgttctgagactttcagg

SEQ ID NO: 52811 - DNA, 201 bp, Homo sapiens
agagaacatgaggatctcaccttttagggagcacactgggttttcatgtatttcttaaactgtttatttgaaagcagttaaattaagagaattctcgcaargatagtacagagttgtcaatgtaccccacgctcaatttccctgttatgactgtcttacattggatggtacatctgtcacagttagtgaactaatattgat

SEQ ID NO: 52812 - DNA, 201 bp, Homo sapiens
tcaccttttagggagcacactgggttttcatgtatttcttaaactgtttatttgaaagcagttaaattaagagaattctcgcaaagatagtacagagttgwcaatgtaccccacgctcaatttccctgttatgactgtcttacattggatggtacatctgtcacagttagtgaactaatattgatgttatgattcactaaa

SEQ ID NO: 52813 - DNA, 201 bp, Homo sapiens
cggtgcaggaaggatgagcaggactcgttgaccctcctcctggaaggaacgtaaccccagagacattctccacgtatctgtgaaggagtgtggccaagaaygcttgtcccagcattgttcctggtagtgggagttgcaggcaacctccgcgtccaccaccggcatggagaggaaaatgtgacggaagccaagcatggaata

SEQ ID NO: 52814 - DNA, 201 bp, Homo sapiens
accttgggaggctaaagtgggaggattgcttgaagccaggagtttaagaccagcctggacaacaatccaagaccccatatctacaaaaaaaagattttttwaaattagccaggggtggtggcacacctggagttcagctactgggaagctgaggtaggaggatctcttgaacccaggagttcagaggctgaagtgagccat

SEQ ID NO: 52815 - DNA, 201 bp, Homo sapiens
cttccttcctccaggtcctggtccagccctgtgctcactgccaccctggcattcggcataagccctgggctgtctctgtgggttggaagtgcctctgctcyctgcacgtgatgacacacactgagactttagggactcacatcctgccacactcagccagtcacatgagccacacaccatgtgcacgcctcccctcagctg

SEQ ID NO: 52816 - DNA, 201 bp, Homo sapiens
ccccactttttttttttttttttagtctcactctgtcaccaggctggagtgcagtggcacaatctcggctcactgcaacctccgcctcctgggttcaagcragtctcctgcctcagcctcccgagtagctgggactacgggcgtgcaccaccatgcccagctaatttttgtatttttagtagagattgggtttcaccatgt

SEQ ID NO: 52817 - DNA, 201 bp, Homo sapiens
ctcacatcctgccacactcagccagtcacatgagccacacaccatgtgcacgcctcccctcagctgcagccactcccacactcacgcacacatctcttcaygcttatgctggtgtgagagcagttggatgggaatacacacacacctgtgtctgtgcacacactcgcagcttcactgagcgtaactctggtgccagacaca

SEQ ID NO: 52818 - DNA, 201 bp, Homo sapiens
gtagggctgcccaatctattgccccaaatcacaaaaggaaccagcagctggcggtcttggacttgcccttggcgtgcctgccttgccctctcacaagctcygtttgcccagggtggggaagaaattcctccccctttgtcaaaaccccacagggtaaacctgttgcttttatgtccccaaatttacatttctttattcatt

SEQ ID NO: 52819 - DNA, 201 bp, Homo sapiens
agggtggggaagaaattcctccccctttgtcaaaaccccacagggtaaacctgttgcttttatgtccccaaatttacatttctttattcattattcaccasgtacttatgaaatactttaagtgctagatctgtgctgggccctgaccatcaaaagtaaatggtacaggctggagggggtgactacaacgaacactgtgac

SEQ ID NO: 52820 - DNA, 201 bp, Homo sapiens
ccactgcactccagcctggcgacagagcgagactccgtctcaaaaaagaaaaaaaagtaatttgtcaaatgtaaatgtttaaactatactgtaattgttakcaccttgcttaggcctgttttcaattttatatacactaatactacaaaatggaaagtaccttgggtctctgttgtgttctgagaggccctgaacccaaac

SEQ ID NO: 52821 - DNA, 201 bp, Homo sapiens
ctagtcccatgtcactccaggttgaggctgtggagttcagacatggttccctgtggcagagctcacactggtagcccagtcttcctctctgaggtcctctktatcatgctacctccctgcaaaaaccgtgtctcatcatggagggctacatttggactataagtctggattcagagagtggcaccttaaaattttgagacg

SEQ ID NO: 52822 - DNA, 201 bp, Homo sapiens
agggagaccagagttaagaggacatcatctctcccttcaaagagctgccagtctagctgcagcttgagaaccttgcaaatcactcctcccgaattagttawgatgggaggcctggactttgccatgggctcttcaccccaattaaggctgtaggcaaaaagccctcagccttaagccttagctctcacacaatggctggtt

SEQ ID NO: 52823 - DNA, 201 bp, Homo sapiens
gagtcaaagttctccaccacctgccccttgtccacctgatccatttcttttctgctgttctccttcatacgtgctctgctctacaaggtttccagagtggkgcttaaggatccatgcctctggcctctgcccacgctttgaatgccacccctcttctggatctgatgctctcctatccatttgccaactctgacttaccct

SEQ ID NO: 52824 - DNA, 201 bp, Homo sapiens
atgcctgtaatcccagcactttgggaggccgaggagggcggatcatgaggtcaggagatcgagaccatcctggttaacacggtgaaaccccgtctctactraaaatgcaaaaaattagccgggtgcggtggcgggcgcctgtagtcccacctactcaggaggcaggatgagacaggagaatggcgtgaacccgggaggcgg

SEQ ID NO: 52825 - DNA, 201 bp, Homo sapiens
gagttggagatgtctgtgagaggtctgaacagtgatgtccagttcaaggtaagaaaaggggtggggtctaacctcagagaagggtgtagaacttgaatatrgagatggtgcttagaaatgatagatgtgagctcaagcaaagagtacaggagggaaggagaagaggaattctcccttccccccatgtcttgcactagaata

SEQ ID NO: 52826 - DNA, 201 bp, Homo sapiens
gatcgagaccatcctggttaacacggtgaaaccccgtctctactaaaaatgcaaaaaattagccgggtgcggtggcgggcgcctgtagtcccacctactcrggaggcaggatgagacaggagaatggcgtgaacccgggaggcggagcttgcagtgagccgagatcgcgccactgcactccagcctgggcgacagagcaag

SEQ ID NO: 52827 - DNA, 201 bp, Homo sapiens
tagccgggtgcggtggcgggcgcctgtagtcccacctactcaggaggcaggatgagacaggagaatggcgtgaacccgggaggcggagcttgcagtgagcygagatcgcgccactgcactccagcctgggcgacagagcaagactccgtctcaaaaaaaaaaaaaaaaaaaagagcaaggagaattgtcagctgatcctat

SEQ ID NO: 52828 - DNA, 201 bp, Homo sapiens
tctgcctcagcctcccaagtagctgggattacaggcacctgccaccatgcccagctaatttttgtatttttagtagaggcggggttttgccatgttggccrggctggtcttgaactactgacctcaggtgatccatccacctcggcctcccaaagtgctggaattacctgacactgcacctaaccaggtgtcaatagcttc

SEQ ID NO: 52829 - DNA, 201 bp, Homo sapiens
taggtgacctgggatcctggtcctggccccagctctcaggctgcctgctggatgaccctgggccaatgccttccctctctgggcccctttctcttcatctktaaaatgagagagttgaactggataatttctagggcccttccaaccttaagtaagagtctatgatggaggagaaaggtagccaaggagtattttggtcct

SEQ ID NO: 52830 - DNA, 201 bp, Homo sapiens
ggcagggagaaggcagcgtggtgtgaaaaaagcatgggcagctggaaggacggtgcaggaaggatgagcaggactcgttgaccctcctcctggaaggaacrtaaccccagagacattctccacgtatctgtgaaggagtgtggccaagaacgcttgtcccagcattgttcctggtagtgggagttgcaggcaacctccgcg

SEQ ID NO: 52831 - DNA, 201 bp, Homo sapiens
gctcaagggatcctcctgtctttgcctccctaagtggtgggattacaggcgcgagccactgtgcccagcaggggaactctgtactttaagattttttttgttgtttgttttgagacagagtcttgctgtcaccccaggctggagtgcagtggcgccatctctgctcactgcaagttcggcctcccgggttcacgccattct

SEQ ID NO: 52832 - DNA, 201 bp, Homo sapiens
aaagcaaattaggactctttctgagcctctttcattgtcagaaatagaatcactttccatcagcttccaggaaattgtgtatctggagtcgaagagatttracatcaagaatccagatttttaaatgtaattgttttttaaatgctaatgtttgtaaagcaccttcagttcttcggatgaaaggtgctatattccctcagt

SEQ ID NO: 52833 - DNA, 201 bp, Homo sapiens; identical to SEQ ID NO: 17943

SEQ ID NO: 52834 - DNA, 201 bp, Homo sapiens
atgtgctctaaacactgttctaatagtattaaacgcaggagaaagatctagaccagtcgttctcaactgggggcaattttgccccccaaagaatttttggyagtgtctggagacatttttggttgtcacagctgggtcaggggaggggtgggaagttactatgggtatctagtaggcgtagatgtcggagattttgctaaa

SEQ ID NO: 52835 - DNA, 201 bp, Homo sapiens
ggctcaagggatcctcctgtctttgcctccctaagtggtgggattacaggcgcgagccactgtgcccagcaggggaactctgtactttaagattttttttkttgtttgttttgagacagagtcttgctgtcaccccaggctggagtgcagtggcgccatctctgctcactgcaagttcggcctcccgggttcacgccattc

SEQ ID NO: 52836 - DNA, 201 bp, Homo sapiens; identical to SEQ ID NO: 17944

SEQ ID NO: 52837 - DNA, 201 bp, Homo sapiens
ggaatcacttgaactgggaggcagtttgcagtgaactgaaattgtgctactggactccagcctgggcaacagaccaagactctgtctcaaaaaaaaagggraaaaaagaaggttatataaatggaattatacagtatataaccttttgggacagttttctgttgtttcatttttttcactcaacataaatgccttgagatg

SEQ ID NO: 52838 - DNA, 201 bp, Homo sapiens
gtcacagctgggtcaggggaggggtgggaagttactatgggtatctagtaggcgtagatgtcggagattttgctaaacatccacaagacagcaagcagtcmcctgcaatgaataattagtagtgccatggttgagaaactctgatctggcctgaggatacagatactaccttctggatcataagcgtgtgaatatcatggt

SEQ ID NO: 52839 - DNA, 201 bp, Homo sapiens
ttaaagaaaatgtggcacatatacaccatggaatactttgcagggacatggatgaagctggaaaccatcattctcagcaaactaacacaggaacagaaaaygaaacaccgcatgttctcactcgtaagcgggagttgaacaatgagaacatatgggcagaggggaggggaacatcacatgctggggcctgtcagggggtcc

SEQ ID NO: 52840 - DNA, 201 bp, Homo sapiens
cttcaagataggcagtactttgaactttcaactgttttcagttaaaacacacacacacactttgaactttcaactgttttcaattaaaacacacacacacwcacacacacaccccttatattgggaagtgctccagcatcataatgaagtcaaaaaactagattctgatcctgcatcagtgtatcttaatttagataagtt

SEQ ID NO: 52841 - DNA, 201 bp, Homo sapiens
agttttctgttgtttcatttttttcactcaacataaatgccttgagatgaatccaggttgttgtgtggcagtattcgtttctttttattgctgagtagtaktacatggtgtggatgtaccaaaatgtgtttaaccattcactcattgaaggatatctgatttgtttttagttttgggctatgatgcattaggcttctgcga

SEQ ID NO: 52842 - DNA, 201 bp, Homo sapiens
ctcaaactcctgggctcaattgatccttctgcctcagcctcaaaagtagctgggagtacaggtgtgcaatagtgtgcccagctgattaattattatttttwtttttgagatggagtctcactctgtcaccaggctggagtgtaatggcgcgatctcggctcactgcaacctctgcctcctgggttcaaacaattctcctgc

SEQ ID NO: 52843 - DNA, 201 bp, Homo sapiens
tttggggagcaggggttctataacttggaggttgtctaatctcttggacagttcttaagggtgacatgtttacctgaggttttttttttttttttttttttgagactgaatctaactctattgcccaggctggagtacagtggtaccatctcagctcactgcagtctccacctcctgggttcaagcagttctgcctcagct

SEQ ID NO: 52844 - DNA, 201 bp, Homo sapiens
ccatctaggtttatgtaaggacatccgatgatgttcacacaacgatgaaatcacctaacaatgcattttttagaatgtatccccatggttaagggacatayaactgtatgtagttagtcactagcgttcttttggctctatgtggaggtcctagcaggactaaatatgtgtcatatcttgctatcctagtttaagctgaat

SEQ ID NO: 52845 - DNA, 201 bp, Homo sapiens
ataaaggatattaatataagcagtgtcttaacacattcctgaaaactggaataaaccaagtcatgttttcccccagtgtagtgtttcccccagttgtagastttttaagatgtgaagtacagccatgatcaaaggtcagaaagttagagaccaacctcgaactactaaaattggaagcataaaattgaacttttgtattat

SEQ ID NO: 52846 - DNA, 201 bp, Homo sapiens
taaacaccagtgatatcaagtgcttgtttaaaatggaaaggatctgacttattaaatgtaaattgcataataattctttaccatgtgacagtccctatttmagtatattaaaagatgtgtattagtccgttttcacgccgctgataaagacatacctgagactgggcaatttacaaaagaggtttaatggacttaacagtt

SEQ ID NO: 52847 - DNA, 201 bp, Homo sapiens
ctgtagaaaagaagacagaaatttacttgtgttttaaattgattagaagataaaatactaaatgcatacgatgttccagatttaatcacaatttctgtttygctaagttggaaatggtcacatcactagtactggatcaaatctacataactgtttttgtttgtttgttcgctcttgttgctcagggtggagtgcaatggc

SEQ ID NO: 52848 - DNA, 201 bp, Homo sapiens
agggacatgactgaataggtaagaaacggattcttcattgtgaattttcctgatggcttctgcaaggctcatagagatgttgatcacctgtattttggaayggtgcttcatcttgtcctcctggggtatgttattggtgactactactgctttaaagcatgcgttgttgatgtgagaaatagctggaccagagaagattct

SEQ ID NO: 52849 - DNA, 201 bp, Homo sapiens
tcaaataccaagggaaaacaaggggtggggtggattttattcttaaaaagcctcagaagttactgtattataaagggacatgactgaataggtaagaaacrgattcttcattgtgaattttcctgatggcttctgcaaggctcatagagatgttgatcacctgtattttggaatggtgcttcatcttgtcctcctggggta

SEQ ID NO: 52850 - DNA, 201 bp, Homo sapiens
gcttccatactctccctgtttaaaataacagcacctactctccaccccagcaccccatccctcttctagtgtgtctgtttgctctatacttccttgatatyactatgtgacaaattactgttatatattttacttatttattgtctgtctcattctattagaatgtaagccccttgagagcagagcttttagtctgttttg

SEQ ID NO: 52851 - DNA, 201 bp, Homo sapiens
ttgtttaagaagccatttcagctagctcacaaattcgttaagtgtggcctgtggacccttgggtctctaaggtggtacagaggcaatggagggtaaaactrctcgtgccttagcatgaaccaagggaatgacactagaatatactgattatcattgagttcttcaccaacatgcctgcacagtaaaataaaatgccagttt

SEQ ID NO: 52852 - DNA, 201 bp, Homo sapiens
agccagaatgagacaatgcagataggaagtcccagcagttaatctcaatccttctttcttcatttcggataagctcagatatacctgatgtgggatatagmaagctacactggagcaagctgggtcttctgctgaattcgtcatcaaataccaagggaaaacaaggggtggggtggattttattcttaaaaagcctcagaa

SEQ ID NO: 52853 - DNA, 201 bp, Homo sapiens
aagccagaatgagacaatgcagataggaagtcccagcagttaatctcaatccttctttcttcatttcggataagctcagatatacctgatgtgggatatasaaagctacactggagcaagctgggtcttctgctgaattcgtcatcaaataccaagggaaaacaaggggtggggtggattttattcttaaaaagcctcaga

SEQ ID NO: 52854 - DNA, 201 bp, Homo sapiens
cataatatttgaggccacacgtgctgttgtgaatgtgactgaattgtacttacctgttaattttatgtggcatatgataggggagtcattcttgtgcattytcccgtttttaatagaataatttcaaataaggacagccttcgttagtagtaatgtagcatttgtgctcatctgagtccttcagacattccttttgtggct

SEQ ID NO: 52855 - DNA, 201 bp, Homo sapiens
tgctaaaaaaaaaaaaaaaaagaaaaagaaaaatacttgtgaaattctttgagtcatgagttaaaataactgcttttttatggaacactatttttacttgrgaatgactgacaaactgtgattatttagacttgggtatttggcaactatatttgcaaaagtgaaggaagtgggccagtcacttcaaggagaacaattgac

SEQ ID NO: 52856 - DNA, 201 bp, Homo sapiens
ggctaattttgtatttttagtagagacggggtttcaccatgttggtgaggctggtcttgaactcctgacctcaggtcatctgcccaccttggtctcccaargtgctgggattacaggcgtgagccaccgcgcccagcctacgtcaaatcttttttttctttttaacagaaatctctgttcatttgaaaagccaaatagatc

SEQ ID NO: 52857 - DNA, 201 bp, Homo sapiens
ttccacgtacacttttgccaatttccacacaggtctcctagttgctgaatttctcaatcactgccttgccgagctccaggcccaggcgatcggcagttttytgagataagccctggtgggagctgccgctgaagattttgatattcaggatcctggccaactaccctaagcactcttcactaagtgatcactgctgctgca

SEQ ID NO: 52858 - DNA, 201 bp, Homo sapiens
gagacaatgcagataggaagtcccagcagttaatctcaatccttctttcttcatttcggataagctcagatatacctgatgtgggatatagaaagctacastggagcaagctgggtcttctgctgaattcgtcatcaaataccaagggaaaacaaggggtggggtggattttattcttaaaaagcctcagaagttactgta

SEQ ID NO: 52859 - DNA, 201 bp, Homo sapiens
ccccttctggccttcgggctgccccaggacccgcagctgtaacagctttatttagaaggctcggctccccaccccatccctgggtctcccgcagtcggagscgagcccccgcggcagtgccctcgggatggggtcgcctccaccggaggtgacaggagcgcggagtggccggcgtctgacaggagatgccaccggctaccg

SEQ ID NO: 52860 - DNA, 201 bp, Homo sapiens
tgagacaatgcagataggaagtcccagcagttaatctcaatccttctttcttcatttcggataagctcagatatacctgatgtgggatatagaaagctacwctggagcaagctgggtcttctgctgaattcgtcatcaaataccaagggaaaacaaggggtggggtggattttattcttaaaaagcctcagaagttactgt

SEQ ID NO: 52861 - DNA, 201 bp, Homo sapiens
gccccttctggccttcgggctgccccaggacccgcagctgtaacagctttatttagaaggctcggctccccaccccatccctgggtctcccgcagtcggarccgagcccccgcggcagtgccctcgggatggggtcgcctccaccggaggtgacaggagcgcggagtggccggcgtctgacaggagatgccaccggctacc

SEQ ID NO: 52862 - DNA, 201 bp, Homo sapiens
cccgttacactcagtagaagcccaggtccttattttcaccaccagtgacctaaataattctgtgatgctctcctgtttttcttctcattcagtttactctraacacaccagccttgatgatgtttcttagacacaagcatgcttcacatcaggacttttggtctttatttctctgcctgtagtattgtgtccccatagcct

SEQ ID NO: 52863 - DNA, 201 bp, Homo sapiens
tagcgcggctgtgcaagtacctgccagagaacgacctgaaggtgagccctatttgcgggctcgccccttccggctgtggggcgcccgccggccggcccttyctttctccaggacccccgccgggtatccagtccagtcgcggtggagggcctcccccattgccagtcgacccggtcctacccggcgtcacgccgagggtct

SEQ ID NO: 52864 - DNA, 201 bp, Homo sapiens; identical to SEQ ID NO: 17961

SEQ ID NO: 52865 - DNA, 201 bp, Homo sapiens
aggattataaatcattctactataaagatgcatgcacttgcatgtttactgcagcactattcacaatagcaaagacttggaactagctcaaatgcccatcratgatagactggttaaagaaaatgtggcacatatacaccatggaatactttgcagggacatggatgaagctggaaaccatcattctcagcaaactaacac

SEQ ID NO: 52866 - DNA, 201 bp, Homo sapiens
tcgctctgtcacccaggctggagtgcagtggtgcgatcttcgctcactgcaagctctgcctactgggttcacgccattctcctgcctccgcctcccaagtwgctgggactacaggcgcccgccaccatgcccggctaatttttttgtattttttagtagagacagggtttcaccgtgttagccaggatggtctcaatctcc

SEQ ID NO: 52867 - DNA, 201 bp, Homo sapiens
gggtggctcacacctgtaatctcagcactttgggaggctgaggcaggcggatcacaagatcaggagatcgagaccatcctgaccaatatggtgaaaccccktctcttctaaaaatacaaaaatgagctgagcgtggtggtgtgtgcatgtaatcccagttactcgggaggctgaggcaggagaattgcttgaaccaaggag

SEQ ID NO: 52868 - DNA, 201 bp, Homo sapiens
cagctacttgggaggctgaggtgggatgattgtttaagctcaggagttctagaccaacctgggcaacatagtgagaccccatctctaaaaaaaaaaaaaaattgaatttttaaaaattaaattacttggccgggcgcagtggctcacgcctgtaatcccagcactttgggaggccgaggcaggtggatcacctgaggtcag

SEQ ID NO: 52869 - DNA, 201 bp, Homo sapiens
tgtgaattctcctctcactaaacaatttttttgttttggaaaagttaatttttcattaaaatgtgtttgtgatactttttgatgggtatgttattgatttktttttttgagatggaatttcactcttgtcacccagactgcagtgcaatggtgtgatctcagctcactgcaacctctgcctcccgggttcaagcgattctt

SEQ ID NO: 52870 - DNA, 201 bp, Homo sapiens
atcctcctgtctcctgtctcggcctcccaaagtgctgggattacaggcgtgagtcaccatgcccggccttttttttatttcttttttttttttttttttttggacagggtctcgctctgtcacccaagctggagtgcagtggtgtgatctcagttcattgcagcctctgcctcccgggttcaagtgattcttgtgcctcag

SEQ ID NO: 52871 - DNA, 201 bp, Homo sapiens
gctcctcagttttagatttgaattttataattaattatagttagcctttttatttcaaaataacccagttttccccagtggtaacattttgtagaactatrgtgtaatgccacaaccaatacaacatcagccaacattgacactgatacaactcatgatctttaggtacaacccaagatcatcacctcatgatgttcagat

SEQ ID NO: 52872 - DNA, 201 bp, Homo sapiens; identical to SEQ ID NO: 18030

SEQ ID NO: 52873 - DNA, 201 bp, Homo sapiens
cgcgcctggcaaaaaaaaaatttttttaagggatagcgtcttgctatgctgtccaggctggtcccaaatgcttcaggtgattctcctgccttggcctcccmaaatgctgagattataggtgtgagccactgtgcccagccaacaaacacttatttacatggttccttgtgttgagtactgttccctgtgggtgccaggggc

SEQ ID NO: 52874 - DNA, 201 bp, Homo sapiens; identical to SEQ ID NO: 18031

SEQ ID NO: 52875 - DNA, 201 bp, Homo sapiens
tgtttatgtagctgtacagtttccatagttgtgcacttgactcaggccaaaattgctgtttgcctaaacttattaaattgttggagataattatagagtgygttctataatcttgatgcctttagtagtaataggatttggtattttatttaaatgattatgtaggccgattgttttttaagtgctaagtacttacagtgc

SEQ ID NO: 52876 - DNA, 201 bp, Homo sapiens
tgcagggattataggcgttagccaccgcgcctggcaaaaaaaaaatttttttaagggatagcgtcttgctatgctgtccaggctggtcccaaatgcttcargtgattctcctgccttggcctcccaaaatgctgagattataggtgtgagccactgtgcccagccaacaaacacttatttacatggttccttgtgttgagt

SEQ ID NO: 52877 - DNA, 201 bp, Homo sapiens
acaaagactgtaatagaggctgaccagggtgttggcaaacagaagaagcagtatgtaactttagagtcagagatgatttcataaaggagcagttacgaggrgcagagttcaggtagacaaaatgagaaggaaagaacatgcaaacagaataaacaccatgtgcaatagtataatgtaatttgcaagaacatggctggttcg

SEQ ID NO: 52878 - DNA, 201 bp, Homo sapiens
aaacaccagtgatatcaagtgcttgtttaaaatggaaaggatctgacttattaaatgtaaattgcataataattctttaccatgtgacagtccctatttcrgtatattaaaagatgtgtattagtccgttttcacgccgctgataaagacatacctgagactgggcaatttacaaaagaggtttaatggacttaacagttt

SEQ ID NO: 52879 - DNA, 201 bp, Homo sapiens
tggaaaatgcctgtactgtgaaagcaaattaggactctttctgagcctctttcattgtcagaaatagaatcactttccatcagcttccaggaaattgtgtrtctggagtcgaagagatttgacatcaagaatccagatttttaaatgtaattgttttttaaatgctaatgtttgtaaagcaccttcagttcttcggatgaa

SEQ ID NO: 52880 - DNA, 201 bp, Homo sapiens
ttaaaataacagcacctactctccaccccagcaccccatccctcttctagtgtgtctgtttgctctatacttccttgatatcactatgtgacaaattactrttatatattttacttatttattgtctgtctcattctattagaatgtaagccccttgagagcagagcttttagtctgttttggttgttgctatttactttg

SEQ ID NO: 52881 - DNA, 201 bp, Homo sapiens
agtagagatgggatttcaccgtgttggctaggctggtcttgaactcctgacctcaggtgatccacccgcctcagcctcccaaagtgctgggattataggtrtgagccaccgcacccggccagcccctttcctttcaagtactgtagttaagtaacaaaatggcaagaccaagataggcaatacttttttttttttttctca

SEQ ID NO: 52882 - DNA, 201 bp, Homo sapiens
caccaaaccgtgaacaattgtttatgttgtatgtgttccttaaaaaacaattgttccaggtgcagtggctcacgcctgtaatcccagcactttgggaggcygaggcaggcagatcagaaggtcaggagttcaagaccagcctagccaacatggtgaaaccctgtctctacgaaaaatacaaaaattagccaggtgtggtgg

SEQ ID NO: 52883 - DNA, 201 bp, Homo sapiens
aactctttgttatccttttttgctagttaatagatgagcagattttgtgtgtccatggtggtttatctcctgatatcaaaacactggatcaaattcgaacyatcgaacggaatcaggaaattcctcataaaggagcattttgtgatctggtttggtcagatcctgaagatgtggatacctgggctatcagtccccgaggag

SEQ ID NO: 52884 - DNA, 201 bp, Homo sapiens
cagtagcagctgtaagtttctatttttaaagtctcatgtacgttcctgccaataacacattgcatatttttatctagttgtcatctcaattatattgatakctttagtattcactgatgagtttagatatgcctgaggttatatgttcaactctttgttatccttttttgctagttaatagatgagcagattttgtgtgtc

SEQ ID NO: 52885 - DNA, 201 bp, Homo sapiens
ggaaattagggctagggtaataatctagtggactgaaatttgacaaatgcacaatttgccagttaccaaatttcagtaaatagaaatatgatgaaatatcmttgggtgtcatggatcacacttgtaatcccagcactttgggagactgaggtgggaggattgcctgaagccagtagtttgagaccagcttgggcaaaaaag

SEQ ID NO: 52886 - DNA, 201 bp, Homo sapiens
aggaggggcatacctcatatttagattctgttgtcagtgtttagtctcatgtatatttgtagaattttttcactgggaaatgaaagctgaacagattactyatagagtgctatatgcatacagtgtagttggggccataagacttaataatacattgcaaacaatgtagtctttaaaggatgccaacaggacttactgtca

SEQ ID NO: 52887 - DNA, 201 bp, Homo sapiens
cccactcccattgagttctgttcttgctactgtgtagctattgttgtagctgtaactgttaaagtgtttctcatatattaatgagattatagcatttagaktccttaattaatgtttaagtgatttcattatgcttgttagtttaatttctcctttcttggcagacctatcgtaaaatccaataagcctttggcaatagta

SEQ ID NO: 52888 - DNA, 201 bp, Homo sapiens
gtatagacagggttttgctatgttggctaggctggtctcgaactcctgacctcaaatgatccacctgcctgagcctcctaaagtgctggaattataggtgygagccaccacggctggcctgtttttgttattttttttaatgagtgatggatgtactatatggcaggaccatggattgatttgttgaagcatataggtgtg

SEQ ID NO: 52889 - DNA, 201 bp, Homo sapiens
gcaaaatggtacagccactttggaagacggtttggcagtttcttataaaactaaacaaactcttcatataatccagcagtcctgctccttgatatttaccsaaatgagttgtaaacttatgtccatacaaaaacctgtacatagatttttatagccactttattcataattgccaaaacttggaaggaaccaagatgtcct

SEQ ID NO: 52890 - DNA, 201 bp, Homo sapiens
gttgatgcggggaggctgtggggaggggcagggggtatatgggaactctgcacttttttctttttttctttttctttttttccctttatatggagaacgargtctctctatattgctgagggcggtcttgaactcctgggctcaagggatcctcctgtctttgcctccctaagtggtgggattacaggcgcgagccactgt

SEQ ID NO: 52891 - DNA, 201 bp, Homo sapiens
cagtatggtctgctcctaattactgctatcgttgtggaaatattgcttcgatcatggtcttcaaagatgtaaatacaagagaaccaaagttattccgggcrgttccagattcagaacgtgttattcctcccagaacgacaacgccatatttcctttgaggccttcgcccatcctgctgacccatttttctgccctcttctt

SEQ ID NO: 52892 - DNA, 201 bp, Homo sapiens
gacctcaggtgatccacctgccttggcctcccagagtgctgggattacaggcgtgagccactgcgtccggcctgagactccccatctctaaaaaaaaaaawttttttttttttgagacagagtttctctcttgttatccaggctggagtgcaatggcacgatcctggctcactgcaacctctgcctcccaggttcaagcga

SEQ ID NO: 52893 - DNA, 201 bp, Homo sapiens
tctgcacttttttctttttttctttttctttttttccctttatatggagaacgaggtctctctatattgctgagggcggtcttgaactcctgggctcaagsgatcctcctgtctttgcctccctaagtggtgggattacaggcgcgagccactgtgcccagcaggggaactctgtactttaagattttttttgttgtttgt

SEQ ID NO: 52894 - DNA, 201 bp, Homo sapiens
acgccattctcctgcctcagcctttcaagtagctgagactacaggcgcccgccaccacgcccggctaattttttgtatttttagtagagatggggtttcaytgtgttagccaggatggtctcactctcctgacctcgtgatccgcctgcctcgaccccccaaagtgctgggattacaggcgtgagccaccgcgcccggccg

SEQ ID NO: 52895 - DNA, 201 bp, Homo sapiens; identical to SEQ ID NO: 17942

SEQ ID NO: 52896 - DNA, 201 bp, Homo sapiens
ctcaagggatcctcctgtctttgcctccctaagtggtgggattacaggcgcgagccactgtgcccagcaggggaactctgtactttaagattttttttgttgtttgttttgagacagagtcttgctgtcaccccaggctggagtgcagtggcgccatctctgctcactgcaagttcggcctcccgggttcacgccattctc

SEQ ID NO: 52897 - DNA, 201 bp, Homo sapiens
cctggtgcttcgtatgtttctttttccctgccttcattttttctggcttttagagccgatggagcagcacatctgtggacaaccttgtccccaatgaccastttccccctgtgccttattaggaaaggcctcatcaccccagaggagcttatgcaatgactcagagccaattcctgtaagaaacactgtggacagagctgg

SEQ ID NO: 52898 - DNA, 201 bp, Homo sapiens
cgctcctccccacccgaggagtcagctagaggaagtgggcctagatcagggtgccgggcttgtgtgcaggctgtgtgcacgtgcggtgttttccctccttscccagctctggttaacaagatcctctttcccttacagatccccagacgaggccttgcctggaggtcttagtggctgcagcagtgggagtggccactcccc

SEQ ID NO: 52899 - DNA, 201 bp, Homo sapiens
tatgtatccaaacacgtttcagcgtcagggtcactttgtttttcccattcatctgtccaaaggcaaaacaacgagtggatgagaaacccagcctgggagcygtgaagctgcaggaggccccctcggctgcctcccagatgaagcgaaccggagcgatcaagcctcgggctgtcaaagtggaggagagtaaggcctgacagt

SEQ ID NO: 52900 - DNA, 201 bp, Homo sapiens
tggtcactggggatgcggctcgttgctcagccaccagtggccttgcggtattgtccaccatccactagagtgggatgaagtccagagtgtgggtatacatytcagatgcccatctacccactggggacttcaatgccagctgcatttggtttggttttcttaactgttggcttctccccacagcgttttttgttttttttt

SEQ ID NO: 52901 - DNA, 201 bp, Homo sapiens
gtggtggcgcgcacctgtaatcccagctactcgggaggctgaggctggagaatcacttgaacctgggaggcagaggttatagtgagccaagattgtgccastgcactccagcccgggcgacagtgtgagcctctgtctcaaaaaaagaaaagaaaagaaaagatggagggcattaaagaaaacattgtacaagcaggttaa

SEQ ID NO: 52902 - DNA, 201 bp, Homo sapiens
tcagcgtcttttgtctcactttttttggcccctgtttgtaatcgattttcgctccctatgtttcatttggatcataatatagttgtgtgtgtgtgtgtgtktttttgatggagtcttgctctgttgcccaggctggagtgcagtggtgcgatctcagctcactgcaagctctgcttcccgggttcacgccattctcctgcc

SEQ ID NO: 52903 - DNA, 201 bp, Homo sapiens
tagctttgttttccagtgagaagtgatgatcacttatacaagtgttttatttttttgttgtttttgttcttgttgttgagatggagtcttgctctgtcacycaggctggagtgcaatggcacaatctcggctcactgcaacctctgcctcctgggttcaagtgattcttctgcctcagcctcctgagtagctgggattaca

SEQ ID NO: 52904 - DNA, 201 bp, Homo sapiens
tctcgaactcctgaccttaagtgatctgcccaccttagcctcccaaagtgctgggattacaggcgtgaaccaccacgcccagccaggcgcttagtattttdagtgagtgagtgagtgagtgagtgagtgagtgaactgatgaggagagcactagtagactcatggacacctgtagcacattagaaagtggcagaggaggga

SEQ ID NO: 52905 - DNA, 201 bp, Homo sapiens
tgcttgaacccgggaggcagaggttgcagtgagccgagatcatgccactgcactttagccagagtgacagagcgagattccatctcgaaaaaaaagaaaaraaaaaaaagttcttattgtaggtcgggcgcagtggctcacacctgtaatcccagcactttgggaggctgaactgagcagatcacatgaggtcaggagttc

SEQ ID NO: 52906 - DNA, 201 bp, Homo sapiens
cgggcgcagtggctcacacctgtaatcccagcactttgggaggctgaactgagcagatcacatgaggtcaggagttcaagactggcctggccaacatgttraaaccccgtctctgctaaaaatacaaaaattagccaggcgtggtgctgcataactgtaatcccagatattcgggagactgaggcaggagaatcgcttgaa

SEQ ID NO: 52907 - DNA, 201 bp, Homo sapiens
gcctggcaaaataataacacataataccctttgacctagcaagtgcaccctgaggaaattgctctacaaattatactcgcccgtgtgtgaaatgacttgcrcataagattattcactgcaacattataatagcaaaagattgcaaacagtcccttgaaatgcctgtaaaattatggtactttaatgaaatgtgatttggct

SEQ ID NO: 52908 - DNA, 201 bp, Homo sapiens
tctcggctcactgcaagctccatctcctgggttcacgccattctcctgcctcagcctcccgagtagctgggactacaggcgcccgccaccacgtctggctratttttttttgtatttttagtatagatggggtttcaccatgttagccaggatggtcccgatctcctgacctcatgatccgcccgcgtcggcctcccaaag

SEQ ID NO: 52909 - DNA, 201 bp, Homo sapiens
ccaggctggagtgcagtgcatgatctcggctcactgcaacctccacctcttgggttcaagtgagtcctgtctcagcctcctgagtagctgggattacaggyatgcactaccacgcccagctaatttttgtattttcagtagagtcagggtgtcgccatgttggccaggctggttccgaactcctgacctcaggtgcacctc

SEQ ID NO: 52910 - DNA, 201 bp, Homo sapiens
catgtgccaccacacccagctaattttgtatttttagtagaggcgggtttctccatgttggtcaggctggccttgaactcctgacctcaggtgatccgccygtctcagcctcccaaagtgctgggattacaggcgtgagccaccgcgcccagcctgtttgcatcattttaagggacacgaattatgtctttctggggttaa

SEQ ID NO: 52911 - DNA, 201 bp, Homo sapiens
gactctttacactgtggtacttgtttcctaccaagatggggacattccacccaggtaactacagttacttccaggaaattagccttgataattgattgtcrtttaatctgcaggccccattcagcttttaccagttgtcccattaatgtccttactcgaaataatccagttcagaatcacacacctctagccttctttatc

SEQ ID NO: 52912 - DNA, 201 bp, Homo sapiens
tataagagaaactgtagggagcatctcggcatgttaagtcttggtccacgtggctgattatctcccataagtggaatttctggggtcagaggattgcaggyttgttcttctcttctggacaggatcggttgtctccttcagtctttgtcacctccctctccagccttgagcccaaggcagtctctttcttagttttttctt

SEQ ID NO: 52913 - DNA, 201 bp, Homo sapiens
tcctgttatccagcctttactctgcctttgcggctccagtgagggctagttgtgctggagcacatccgccagggaagaggtgaggatggagtgttggtgarggcatagacccccgtgtagttctctgctgccccaggccacatcctcccaccaaggtatcaggtggcaagtgggcccacaacgtggggactcagtgcttag

SEQ ID NO: 52914 - DNA, 201 bp, Homo sapiens
aaagattgcttcactgacaccagacaggccagtgatcttccctgtttctgtcaggccacccaagggacagggagaaagaagtgaggctggcgtcctgtctyctgtgccgtggggaaaatctggccatctcgctcatatgtggctccagtgaatgctgctcagtggagtttttgagtcgcggaaactgcatcacgttaatgt

SEQ ID NO: 52915 - DNA, 201 bp, Homo sapiens
atcatcttcctcaattcctgggacagtagaagctagagagtgtggtcattccagtctgtgtgtctccacctctctgcttttttatcaaggattcagaacarggctctggacagagcaaggagcacagaccaggacccatcggcaacgagcgttctctgaaaaacagaaagggctcggagggggccgagcggctgcaagggg

SEQ ID NO: 52916 - DNA, 201 bp, Homo sapiens
tcaaggattcagaacaaggctctggacagagcaaggagcacagaccaggacccatcggcaacgagcgttctctgaaaaacagaaagggctcggagggggcsgagcggctgcaaggggctgtcgtcccgcctgttaacggggtggagattcacgtggactccgtgctgcctgtgccacccattgaatttggagtcagtccaa

SEQ ID NO: 52917 - DNA, 201 bp, Homo sapiens
cagcacatgtatttcaggctgacctgggctggcacgtgactcagttgctagcagctccatgtccttaaaaggtgcttaaatgttcctgcccaggttttgtraccttccagtggggatcatacagttcctaagggctggtttatttggctctctttggttccattgtctcctctgtgccaggtgcgagcccagactcaggct

SEQ ID NO: 52918 - DNA, 201 bp, Homo sapiens
atcagtcatggtcctggctgccatcagtttcatctgggtggtcttgggtacatgtggccaatactgaagatgcatttggacaattcatagacacggagctstaggtgcttttgggaaaagccatggatgggtttgggcaagtcatagatacatttggacgagccttgagtgtgttcaggagagccatggatgggttttggc

SEQ ID NO: 52919 - DNA, 201 bp, Homo sapiens
ctgaaggataatactctggctgccctcctttgatttggttttgcttgcccttgagatgaacagccgtggtgtaagtgggttgtgtacctcccctattctgstagccttattttcagtgttatacatggatgtgttaaagtactgagcatttatttttccatcttgagctgtccttgacttggagagggctctgttgaagtt

SEQ ID NO: 52920 - DNA, 201 bp, Homo sapiens
tgtggaaatcagaaatgtatgggtcccagaagagaacttgtgggtcagcctgctttccagagagtgccgaggccctttgaatggtgaacattatgcaagcrttcttgtatggccagtggccagcagggaggagggcagagaatgactgtgcctccgggaagccggcgtcaacttcccgacacgcttcaggatcatctcttt

SEQ ID NO: 52921 - DNA, 201 bp, Homo sapiens
cagcctcccaaagtgctgagattataggcatgaggcactgtatttgtcttcttgttatagttaaaaaaaattaaaacagccaggcatggtggctcacacartttgcaaggctgaggcagggggattgcttgagaccaggagttcaagaccatcctggccaacacagtgaaaccctatctccaaaaaaaaaaaaaaaaaaag

SEQ ID NO: 52922 - DNA, 201 bp, Homo sapiens
tctgtacacacgccctcgtccccactgagtcccctgggtagagcagacctgtagactgtttccctcagggacattgagaagtagtgaggcttgatcctctwctacgtcccttttgccgctctgtttccaggcagccacctcccgcccctgtacctggatggccatgtgtttgcaagtcagccccggctggttcctcaaacg

SEQ ID NO: 52923 - DNA, 201 bp, Homo sapiens
ttgaattttgggcagtgttccagcagccatgtggagaggggcaggggaggtgggaggggaagaaccacctggatgggccttgcggttacctccccgacccygttttcccgttcacaggccgccgctgcccagcagatcccgatctcccttcacacatctctgcaggcacaagctcagcttggactgaggggtgggcttcct

SEQ ID NO: 52924 - DNA, 201 bp, Homo sapiens
ttattatatttagatattccaactatgatatttcatgcattccattcttattcttctctttctgtgccttttcttctaattcctgccttttcttggtcctrttgtttttcttttgcttctacatttcatttctatatgttagtggttacatgaaaattctaacatgcaccttcaacttagcaaagcatttggggaggtaga

SEQ ID NO: 52925 - DNA, 201 bp, Homo sapiens
aacctgaagggccttgacgatctggacgccgatgccgatgatggctgggcaggtgggcagagaagcacgggtggtttagacgggcaggaccaaagtccatmtgtacttaccagggatggaaaccccctggcaccaccgtgtgttttcccttggcaagatagggatgaagagccggacagggaagcagacctgatgccctcc

SEQ ID NO: 52926 - DNA, 201 bp, Homo sapiens
ttctgagaatctccctgcatctctgtcttcctgagaattaaaggggtccactagcagatcctaaacacctgggagtttgtcctcatggtgtttgaaggtcygctctctgtaccagcacccttaaactgtgacacttaaactgtgacacaccaacgtggggacgggtccccagtgcacaggaggaggtagaagcacaggtgc

SEQ ID NO: 52927 - DNA, 201 bp, Homo sapiens
attcttctctttctgtgccttttcttctaattcctgccttttcttggtcctattgtttttcttttgcttctacatttcatttctatatgttagtggttacrtgaaaattctaacatgcaccttcaacttagcaaagcatttggggaggtagaaatctgaagtctctgtcccttaaacctccatgaaagtaagcatgtgagt

SEQ ID NO: 52928 - DNA, 201 bp, Homo sapiens
ccctggcaccaccgtgtgttttcccttggcaagatagggatgaagagccggacagggaagcagacctgatgccctccttcctcatttactccctgactagmggttccttcctggccaagccattagcttcttttggtctttagtcttgatcttagagttttgttgttaactttttaaaaattattgatgatgcaaaattta

SEQ ID NO: 52929 - DNA, 201 bp, Homo sapiens
gctgaggcaggagaatcacttgaacctgggaagcagaggttgcagtgagccaagatcgcaccactgcactccagcttgggcgacagagggagacactgtcycaaaaaaaaaaaaaaaaaacaaaaaaaaaaaaaaaaaaaaaaggaaagagaaagagtctggctgtgtttcccattctggagtggagtggctgtttgcagg

SEQ ID NO: 52930 - DNA, 201 bp, Homo sapiens
tcagccttccaagtagctgggattacaggtgtgggccactatgccctactaattgttgtatttttagtagagacgaagtttcaccatgttggccaggctgrtctcgaactcctgacctcaggtgataggtccgccttggcctcccaaagtgctgggattacaggtatgagccaccatgtccagtccttaattttgaatctt

SEQ ID NO: 52931 - DNA, 201 bp, Homo sapiens
tcccagctacttgggaggcggaggcaggagaattgcttgaactcgggaggcggaggttgcaatgagccaggatcgtgccactgcactccagcctgggtgayagagcgagactccatctcaaaaaaaaaagaaaatacagttgatttttttgtgttcactggtaccagacactttgttgaatatacattagttttactagtt

SEQ ID NO: 52932 - DNA, 201 bp, Homo sapiens
ttgatggtggcattcagatcttactgtatatttactgatgtttttgtctgcttctatgagttaaggaaagtgagatgttaaactccaattatggatttatstgttcctccctttaatactgttggtttctgcttcatttattttgaagctgctattaggcatacacacatttatagtttctatgcctttctggtgtgtttc

SEQ ID NO: 52933 - DNA, 201 bp, Homo sapiens
ttaccttttaaatttttttaattttaatttaatttattttttctagagttgggatcttgctctgttgcccatgctggtcttaaactcctgggctcaagcartcctcccaccttagtctcctgtgtagccaggactgcaggcatacatcatggtgcttagttagccttgtgtttgaggcaagatcttgctctgtcgcccaag

SEQ ID NO: 52934 - DNA, 201 bp, Homo sapiens
tgttatgcagaccacgtcttcatggattgcttgtggctgtcgtgcccaaaaaggctgctgtggccaagcaagtttgggaaacctccctgggttcaacttctttttttttttttttttttttgagacaggctctcactctgtcacccaggctggagtgcggtggcatgatgtcagctcactaaaacctccatctcctgggct

SEQ ID NO: 52935 - DNA, 201 bp, Homo sapiens
tctagcagtggagcgtacgggccaacaggaagaagtacttgtttgtaaacacttggttggctgagcttctgtgagctcactgtgtcatttctctgctggtrtattctctaggctccccagaattccctgcccaagagacccccaccacattcccagaagaggcacccacagtgtccccagcagtggcacagagcaacagca

SEQ ID NO: 52936 - DNA, 201 bp, Homo sapiens
tctactaaaaatacaaaaaactagctgggcatggtggtaggtgcctgtagtcccagctactcgggaggctgaggcaggagaatggcatgaacccgggaggmggagcttgcagtgagccgagatcacgccacatgccactgcactccagcccgggcaacagagcgagactccacctcaaaaaaaaaaaataccccacaatta

SEQ ID NO: 52937 - DNA, 201 bp, Homo sapiens
gatgtactcgtttgctcattatatatttcttttaaaggaactgatagaaataattaaatcaaacatgaacctttgcagtgtggaatttatttttggaaagrtatttgattttgcttccgtctgtatactggacatgattccatcatcttttcttttatcagaaaagaaaacaggctgggattgtctcgcccactccgccca

SEQ ID NO: 52938 - DNA, 201 bp, Homo sapiens
ttctagcagtggagcgtacgggccaacaggaagaagtacttgtttgtaaacacttggttggctgagcttctgtgagctcactgtgtcatttctctgctggyatattctctaggctccccagaattccctgcccaagagacccccaccacattcccagaagaggcacccacagtgtccccagcagtggcacagagcaacagc

SEQ ID NO: 52939 - DNA, 201 bp, Homo sapiens
ctgtcctccatggcccgtccttgacaccctgcccatagtcatcttctaaaaacacaggtcttttagacaggtcagcagctttactgtggtctccatttctsacaaagtcagataggaatcaccgttgtcccctctgtaattgttgtcccctctgtaattgtcccctctgtaatctcctaagctatgttacctgcctcgtct

SEQ ID NO: 52940 - DNA, 201 bp, Homo sapiens
taccccgtcttcttgacaggtttaaggggctcaagccgactgttatccttctctcccgaggaatttccgacgctgaaagcagctggagggcaggacaaggstggcaaagaaaagggcgtcttagatctgtcgtatgggccaggaccaagcctccgccctcagagtaagtgactgcagcctctgggcactcgatggagtaac

SEQ ID NO: 52941 - DNA, 201 bp, Homo sapiens
agagcccacctgcctcctccctcctcctaggtctgacgctgcaccctccctacgttccctgaggtgcgtgccaggcgtgttgtgagcaggcgtgtgcttcmggcacacagggaacctagcagcctctgtacacacgccctcgtccccactgagtcccctgggtagagcagacctgtagactgtttccctcagggacattga

SEQ ID NO: 52942 - DNA, 201 bp, Homo sapiens
cagacggcgggggcaggtccagggtgaggctgggtggagggctgaccaaggtccaaagggcctgcgcagcctccgggagggcagcttctccagccagaggyttgtgtgagccatcgtgtgctgggcttgtttttaagtaagaaacaaggaaatcactccagattctgtcattccaaggaaagggaaggggacagttcaggt

SEQ ID NO: 52943 - DNA, 201 bp, Homo sapiens
accctagggggcagagggtggcatggtgctgtcaatcagagaaacagcccctgtgtggtgggctgaaaacacagggcctggctgcctggggcccacttggwtggctgcacctttgtctcctgctgcaagtcctctctgagtgtttagccagtgctaagacaattcagggaaggggatgtgttcagggagggacagggcctt

SEQ ID NO: 52944 - DNA, 201 bp, Homo sapiens
tgtttgtctgctgccctcctgtgaggagcagcagaagtggggggcctgaagcttctgaggtttgccactcaggttctctcttcacttttttggggggtctyctttccccaccccttccccctctgaccctggtgttctcaagtctagacttctcttgtttaatgtatccagtgggggagggaaggggccgtaggtgtctag

SEQ ID NO: 52945 - DNA, 201 bp, Homo sapiens
agcagtaggacactctgtgttccttgtctctttgaggcgatgggaactgcatattcccctgaaggaactggacattggttttggagacagttttgcccctractttgaccaagggcacttcaaaatcagagtgcccgaacgatctcctcctgaaacctgctctttttcttcatgttctctgagctggttggtgacctggta

SEQ ID NO: 52946 - DNA, 201 bp, Homo sapiens
agaaccggcccttcaggagaaggcgccccccacgccaagataagccccctcgattccggcgcctccggcaagagcgggagtccctgggcctgtggggaccygaggaggagccccacctgctggcaggtcagtggccaggcaggcccaaactgtgttctggggacaagagtggcactgtgggccgcaggtcccctgagctct

SEQ ID NO: 52947 - DNA, 201 bp, Homo sapiens
agcagaacaacttatgtctggagcaaggtgacgtgaccgtgcctggcagcagcctgggcactgagatctgggagagcagcagccagggtgagagttggggrtgtgaccccagctgtggcacccaaggtcacatcacacactgggtttgcttctggggaggatcctgcttttgagctacgaatatagatggaatacagatgg

SEQ ID NO: 52948 - DNA, 201 bp, Homo sapiens
ctggctggaaatttctccttggaagccgagggtggctggaggttaaggtggtgtttaggaatgtgattttccacgtgttctactcagggattttgaagtgkctcatgtagtccaggggtcttgatcaggtcttaaattgtgaggccttttgtttgcttgccttgatgtatccccaaggcctctcccattcaagtcataagt

SEQ ID NO: 52949 - DNA, 201 bp, Homo sapiens
cttttagacaggtcagcagctttactgtggtctccatttctcacaaagtcagataggaatcaccgttgtcccctctgtaattgttgtcccctctgtaattktcccctctgtaatctcctaagctatgttacctgcctcgtcttccctccctcgccacgtacgtgtgtgggtagacacacaggcccacacatctgccatccc

SEQ ID NO: 52950 - DNA, 201 bp, Homo sapiens
tgaatttactgggaggacatagttcaaggaatagttgcagacagactgacatctcgtaaacacaattctaaatttctaggagagtgtctcatgtttgggcraggttttttgttttttgagatggattctcactctgctgcccaggctggagtgcaatggcgcaatcttggctcactgcagcctctgcctcctgggttcaag

SEQ ID NO: 52951 - DNA, 201 bp, Homo sapiens
gaaggggtggaaaacatttcacctggaacacagaaggtgcccagttaatatttgttgggtggttgaatttactgggaggacatagttcaaggaatagttgyagacagactgacatctcgtaaacacaattctaaatttctaggagagtgtctcatgtttgggcaaggttttttgttttttgagatggattctcactctgct

SEQ ID NO: 52952 - DNA, 201 bp, Homo sapiens
cctccctcgccacgtacgtgtgtgggtagacacacaggcccacacatctgccatccctgattcccgcttttctctgatctgcagtattaccgggcccttgyaaatgctttgccccagcaccattgcttccattgtgaggcgtccagacgagcatggcacccatccccttcttgtccagccacccctgcagctctgtttgga

SEQ ID NO: 52953 - DNA, 201 bp, Homo sapiens
ctatttctcattgtctgtctggttttccatccccctcacatgtggtgaccagcacctggcccgccacggcagccaggaggcatttgttaagcgaataatcsagacagggaagaggagtggagttggctgctccagactctgcttagttttcctttctcaaagttctccctcctgtgtcctagccggggaattagctaaaat

SEQ ID NO: 52954 - DNA, 201 bp, Homo sapiens
cagggtctcactatgttgcccaggcttgtctcaaactccagctcaagtgatgccaaagtgctaggattacaggtgtgagccaccatgcccggctgttcttmctttttttaagataaggtcttgctctatccttcacctcccaccctcaagcgatcctcccacctcagcctcctgagtagctgggactacctgtgtgctgcc

SEQ ID NO: 52955 - DNA, 201 bp, Homo sapiens
cctgtccatattggaaactgtgttctcattgatacctccagttccacagactttgttccacttcctcccagtgcatgtttgcacctcctttctgtgacagkgagaatctatctctcatcgtccctcgtatttatactcacttggtcagtctccccatgtatgaccaatctcatttctgctgccacactctctcccttgcac

SEQ ID NO: 52956 - DNA, 201 bp, Homo sapiens
gacaagaacgggagccccaacaaacagccatcctcggagcctgaatggactcccgagccccggagctccagcagccagcacccggagcagacgggcaggasccggaggtcgggacccatcaagaaaccagtcctgaaagccctcaaggtggaagacaaggagaaggagcttgagaagattaagcaggagctaggggaggag

SEQ ID NO: 52957 - DNA, 201 bp, Homo sapiens
agcccctgtggccacatccctgcctaggtgctgcctgtgcccctggggggccctgccccagcacatctccctctctttcatgcatcagatatcccttcccrtcagtacacagacgagctgcagtgctgaccccgtaatcccgccccccacacccctcgaaccactttcttcacccagtttccaggccgtcgctcctggctt

SEQ ID NO: 52958 - DNA, 201 bp, Homo sapiens
caccaaggcagaagttcattcagtcagagatgtccgaggcggtggagcgagcccgaaagcgccgggaagaagaggagcgccgagcccgggaggagaggctrgccgcctgtgctgccaaactcaagcagctggaccagaagtgtaagcaggcacgaaaggcaggtgaggcccggaagcaggcagagaaggaagtgccctggt

SEQ ID NO: 52959 - DNA, 201 bp, Homo sapiens
gctcctctaaagccagtggatgtgctgggcaccagagacaaatcatggagatggctgctggtggctcccaggttggcccagatggggtgagctgacatacyacaggcccatcccaggccccgtgggctctgcttctggggctccataccctgccctgcaggggtgctgtgtttttcacacatttctttccctgaagccttc

SEQ ID NO: 52960 - DNA, 201 bp, Homo sapiens
ccttgttaaacgttgacatcagtgctctccagccgtgctgtcaccctcctatcttctggatctgccttcgggatggtcagtgacagcttctggaagctgascacacacaggtgcacagccatgctgtggtctggcctgctacggcagcatggcagctctggtggagccttctcccttgccatttggttcccctgtgccaag

SEQ ID NO: 52961 - DNA, 201 bp, Homo sapiens
tccttccagccacttctagggacactggggaaccttgttaaacgttgacatcagtgctctccagccgtgctgtcaccctcctatcttctggatctgccttygggatggtcagtgacagcttctggaagctgagcacacacaggtgcacagccatgctgtggtctggcctgctacggcagcatggcagctctggtggagcct

SEQ ID NO: 52962 - DNA, 201 bp, Homo sapiens
tggtggctcccaggttggcccagatggggtgagctgacatactacaggcccatcccaggccccgtgggctctgcttctggggctccataccctgccctgcrggggtgctgtgtttttcacacatttctttccctgaagccttctgtaacctgtcattttccttccttcctcttccggagcctgctgctttctctggacctg

SEQ ID NO: 52963 - DNA, 201 bp, Homo sapiens
aagtgaggctggcgtcctgtctcctgtgccgtggggaaaatctggccatctcgctcatatgtggctccagtgaatgctgctcagtggagtttttgagtcgsggaaactgcatcacgttaatgtatgcctctggggaatgtagggccaggaggatctcagtgggctgtgtggccttttttattttttcaggactccgatttc

SEQ ID NO: 52964 - DNA, 201 bp, Homo sapiens
gaaggattcctccgcccgggtcccagccgccagtcctgaacaccagcagagaggtaaggggaccccatctgcctctgaccctagggagggggccttgtgtmaccaactttttctagcaagctaagtacccctgtgtggtagaaagagccagtggcgtgggactgccagggcagaaaggaaggtgaccatgtgtggggccat

SEQ ID NO: 52965 - DNA, 201 bp, Homo sapiens
gccactgcacccggcccccagttgactttttaaaaagaaaattcaagttgctcagggaggtataaaggctcttccccactctctctgaaaaaaaaaaccastgtgaggaagttcttgggattcctcccagaaaaaaacccacattatccacatgcacgtttgtattcttcaagcatgctgctgccctttcacgtgataaaa

SEQ ID NO: 52966 - DNA, 201 bp, Homo sapiens
gggtgccgggcttgtgtgcaggctgtgtgcacgtgcggtgttttccctccttccccagctctggttaacaagatcctctttcccttacagatccccagacraggccttgcctggaggtcttagtggctgcagcagtgggagtggccactccccctatgccctggagcgggcagcccatgccagtgctgaccttcccgaagc

SEQ ID NO: 52967 - DNA, 201 bp, Homo sapiens
ccaaagtactgggatttcaggtgtgagccactgcgcccggcctgctctttgctattgaaagggcttctattccacattcttataaaatgaaaatgcccctyagctacagtcttcttattgaatatttattgtatgccaggcacatacatatgtgctgggtacaagagatacagaagtgaaacaaaatagacacaatgccac

SEQ ID NO: 52968 - DNA, 201 bp, Homo sapiens
gcctcagaccagctggagagctgttctcttgcctcagccggcttcctgcttcacacttggatgctcaccggtgctttctccctgcctccggataggctagyttagcttggggtatgcatgtgtgttgatggatggaaactcggcaggtatttgaagcctggtaaagccctgctaacagcgccctggcctgatgtttgtgaa

SEQ ID NO: 52969 - DNA, 201 bp, Homo sapiens
gctgtagtgcagtggcccaatctccgttcactgcaacctccacctcccaggctcaagcagttgtcctgcctcagcctccccagtggctgggattacaggcrtgcatcaccacgcccagctaatttttttaaatatagttttagtagagacagagttttaccatgttgctcaggctggtcttgaactcttgggttcaagtga

SEQ ID NO: 52970 - DNA, 201 bp, Homo sapiens
gtttgacttatgctaacctgcgaggacttggtgcgtctatgccgggtctagtcccacagacctaggggtgagtcagagctggatggaaatgcctcagaccmgctggagagctgttctcttgcctcagccggcttcctgcttcacacttggatgctcaccggtgctttctccctgcctccggataggctagcttagcttggg

SEQ ID NO: 52971 - DNA, 201 bp, Homo sapiens
aaaggaaaaagaaaaaaaaaattaagtgcactggggaggtgaagaagcagaatgcatgccagctttcctgaatttatttgaccatgttaattttgtctctytttttttttttttttggatcatttccttggactagtttagttttgtttaatttcctttagaaaatactgcattgtactctcatccctctagtttttataa

SEQ ID NO: 52972 - DNA, 201 bp, Homo sapiens
cagctgtaggagcagagctggggtttaagctctttgcgtgttctctcagttgtgcccttgggcctctttggtttggggtaacaatgtgttagatcagaggyggcctgagaaaagtgcggaagtcctgtccaggtttctgtcgagcctgatgctagatctcaggcgcctgttgaattgggttgttcttgtctcctggtgagt

SEQ ID NO: 52973 - DNA, 201 bp, Homo sapiens
tctcacaagtcaagcttctgtattctaagggtagacaactacttggtttctgcctgctttgttcatcctcttgggccttgaaatagattttaaagatatawtgttcagatttaagaattgttacctgtgggagggttagtctaaccaagctgccctgctcttaccagaagccaaaactgcccttcagtcacaggggtaggc

SEQ ID NO: 52974 - DNA, 201 bp, Homo sapiens
tggtgccgcacacctgtaatccgagctactcaggaggctgaggtaggagaatcgcttgcacccaggaggtggaggttgcagtgagccgtggtcgcaccackgccttccagcctgggtgacagagcgagactccatctcaaaaaataaaataaaataaaataaataatagaaggaagtctgaaagcaccagggcagcctgtc

SEQ ID NO: 52975 - DNA, 201 bp, Homo sapiens
actcagggcttatggggagggagcagagacggcactcgcgccactttccttactaggaggggggtttctaagtctggtccttcaaccaagggactgacaayttaggggagctttccctgcaactcaggagcaggaagggagtggtgggaactatgtatccaaacacgtttcagcgtcagggtcactttgtttttcccattc

SEQ ID NO: 52976 - DNA, 201 bp, Homo sapiens
ttagtagagacagagttttaccatgttgctcaggctggtcttgaactcttgggttcaagtgatccgcctgcttcagctccccaaagtgctgggattacaarcgtgagccccggcgcctgggtagtaaaccattatttctgtggctgtcagttgtcaacattgatgggcttgattttagggtcagtgcttgtctaggccact

SEQ ID NO: 52977 - DNA, 201 bp, Homo sapiens
ccatcatgcctggctaattttttgtatttttagtagagacagggtttcaccgtgttagccagattggtcttgatctcctgacctcgtgatcggcttgcctyggcctcccaaagtgctgggattacaggcgtgagccaccgtgcccagcctaattttgtatttttaatagagatggggtttctccatgttggtcaggctggt

SEQ ID NO: 52978 - DNA, 201 bp, Homo sapiens
aactgagctgggcagcaggaactcgagtacgggagatggagccccctcctcggcatgtaccagcgattctaaggacccctctctccgcccggctcagcctrtccgaaaaggggcttcacagttcatgggaaatgtataccacccacctacataccatgacatgcttcctgcttttgtaagtcttcagagtgtacttttttt

SEQ ID NO: 52979 - DNA, 201 bp, Homo sapiens
cccgggttcacgccattctcctgcctcagcctcccaagtagctgggacgacaggcgcccaccatcatgcctggctaattttttgtatttttagtagagacrgggtttcaccgtgttagccagattggtcttgatctcctgacctcgtgatcggcttgccttggcctcccaaagtgctgggattacaggcgtgagccaccgt

SEQ ID NO: 52980 - DNA, 201 bp, Homo sapiens
cagtgagatcagaaatgcttggcctgagtgcaaaaacttaacatcaaatgtggtttgtcctaggaacagttgggaccctaggaggcagcggcagttgtcartgagctctgcagacagtgcggacgctaagcggactcgagaggaagggaaggactgggctgaagcagtgggtgcgtcccgtgtggtccgaaaggcgccaga

SEQ ID NO: 52981 - DNA, 201 bp, Homo sapiens
aaagccctcaaggtggaagacaaggagaaggagcttgagaagattaagcaggagctaggggaggagagtacccggctggccaaggagaaggagcagagccycacggcagaaaaggatgaggacgaagagaacgatgcctctctggccaactcctccaccaccactttggaggacaaaggccctggccatgccacttttggc

SEQ ID NO: 52982 - DNA, 201 bp, Homo sapiens
gctcttttccccttcctcagctccgccttgaacctcgagttccttttagacagttccagatgaatgaccaagacgggtgagtccattgcattacagtcacstgtgtagagatgagtgcggtggtgattctggtcaagatgaggggctgatgaatagaagtgctgtgtctcctggagaccacagagaacttaaccagctcag

SEQ ID NO: 52983 - DNA, 201 bp, Homo sapiens
tccacacccctgcatgctgtccagctcctgtagggactcctacctggcctccctgcaagtcagatcataccccaagtcagcactctataaatggcagcatsttcccatcattttcatcctgcaccattttggtgctccaaggaggagcatggtgttttgcggctctggccaccacaagtctcagtgatgtaattccaatag

SEQ ID NO: 52984 - DNA, 201 bp, Homo sapiens
ccacttgatgcaaaacagtaagagtcttgaacgtgtgtgctgtacaaaggaatgcagagatatacgtccgatgcagctttcatcttttgggacttggcttsgccattacttctgactttcctcactcgtcctctccttgcccaccccgccccgtgtgcacccataaatctggtgtgcacccacagatcctatgccgctctg

SEQ ID NO: 52985 - DNA, 201 bp, Homo sapiens
atgttagccaccagccagagaccgctgacacagcccatggtgttgagcgggagacaccccgggaggggacggcctttaacatctcctcctgggacaagaaygggagccccaacaaacagccatcctcggagcctgaatggactcccgagccccggagctccagcagccagcacccggagcagacgggcaggagccggaggt

SEQ ID NO: 52986 - DNA, 201 bp, Homo sapiens
ctttggggccagtggggcggggaggggtgggagtttgctctgaatcactcttcagtccgttgttaactgtgctctaggagaggcctggggcgagctgataygtggtgggccgtgttttgcttttccatgtcatcttgcctcctttccttgctccttcctcctcctctccccttgactccctgtctcctccccaccgcgggc

SEQ ID NO: 52987 - DNA, 201 bp, Homo sapiens
ccaccaaaagttctagagaggacaaagcattactccctcctgttatccagcctttactctgcctttgcggctccagtgagggctagttgtgctggagcacrtccgccagggaagaggtgaggatggagtgttggtgaaggcatagacccccgtgtagttctctgctgccccaggccacatcctcccaccaaggtatcaggt

SEQ ID NO: 52988 - DNA, 201 bp, Homo sapiens
ggaccacagcggtctagatgccaagagccgaggccctcgggcctttgggcgagccctccctccccggctgagcaattgcgggtatggacggagaaccttcrtctccaaagagtcaccccactggcagagcaaaagtccaggcagctcttggcaggaatatggcccttccgacacatgcggatcccggcgacctacagacag

SEQ ID NO: 52989 - DNA, 201 bp, Homo sapiens
gaactgggggataacagcgaggcactcctgcctactggtgacaggagcgagcaaaggcttgactttgagtcagacctgggtcatgtgctggagccgtgtcrcctcggctggtgagcagctcttgccgagccacagtgtcctctcctctcttacatgaaactccgtggggtggccacacccgtgaggccaggtcttacctgg

SEQ ID NO: 52990 - DNA, 201 bp, Homo sapiens
tatagcccattgcagcctcgatctcccgggctcaagcaatcctcccacctcagcttcctgagtagctgggactacaggtgtgtaccacgacatctggctgmtttttttttttttctttccattctgagtagagacaagatttcactatgttgcccaggctggtctcaaactcctaggctcaagagatcctcccacttcagc

SEQ ID NO: 52991 - DNA, 201 bp, Homo sapiens
tcccgcccctgtacctggatggccatgtgtttgcaagtcagccccggctggttcctcaaacgatacctcagcagcagagttaccaacaggtgacagcagcwagccaggtggcctggctgggggtggtggggaggagccagtgcaggacggaattggcttgctcatctatttctcattgtctgtctggttttccatccccct

SEQ ID NO: 52992 - DNA, 201 bp, Homo sapiens
ctatctctcatcgtccctcgtatttatactcacttggtcagtctccccatgtatgaccaatctcatttctgctgccacactctctcccttgcacatatgcyctccttgcccactcagatgtcattgtccccactcctggatgccctgaatgtccctgctgggccaactctgcctatgaatgtccccctcatctagcttggg

SEQ ID NO: 52993 - DNA, 201 bp, Homo sapiens
gctggttcctcaaacgatacctcagcagcagagttaccaacaggtgacagcagcaagccaggtggcctggctgggggtggtggggaggagccagtgcaggrcggaattggcttgctcatctatttctcattgtctgtctggttttccatccccctcacatgtggtgaccagcacctggcccgccacggcagccaggaggca

SEQ ID NO: 52994 - DNA, 201 bp, Homo sapiens
ctgacataggtccccaagtctacttactggcagcaggaatgaaatgggagagatggtggtaggattaattaggaaaccccatgactttcctgtttcttttycccattttccactttataaaacacattctgatttaagtggaaattgcagtttcagccattaccagcaaatcctgttcattgatgttatgtttcagatgtg

SEQ ID NO: 52995 - DNA, 201 bp, Homo sapiens
agagtgaagtgactggatttgccttgggtgagaatctggctgttggtggcatggcgtaaataaaatgcttgtttttgaagctgtccaggatcatcatctgyacagttggccagaaagcagctgttgagcctgggctgacttatatcagaacccattgtgccgcctttcgtgtctgcaccggtactcccactgggaaagcag

SEQ ID NO: 52996 - DNA, 201 bp, Homo sapiens
tggatatgattttagcctttggttctttagaaacaggagaggcaggttttccctgacataggtccccaagtctacttactggcagcaggaatgaaatgggrgagatggtggtaggattaattaggaaaccccatgactttcctgtttctttttcccattttccactttataaaacacattctgatttaagtggaaattgca

SEQ ID NO: 52997 - DNA, 201 bp, Homo sapiens
acattagttttactagtttttgttgatttcttagagttttctacataaacccttatgtagtttgtaaataaggagttttacattgtctttttcagattacrtgccttttatttatttatttgtattttgccttattgcactgtggtatacttctagtataatattaacctcaagttctttctggtctgaggaagaaaatgt

SEQ ID NO: 52998 - DNA, 201 bp, Homo sapiens
gctctgtgtggccagcaaagctgagtacatttactgtctggccctttacagacaaactttgcagatctctcctgctgcaggagtgcagggtggagtctcckgtctccatgtccccagcaccaagtgacacagggtctggcacacacattggtcagtaaacgtttgagtatttgaagtaggtgaggtcgccttacttacgtt

SEQ ID NO: 52999 - DNA, 201 bp, Homo sapiens
ctaattgttgtatttttagtagagacgaagtttcaccatgttggccaggctgatctcgaactcctgacctcaggtgataggtccgccttggcctcccaaaktgctgggattacaggtatgagccaccatgtccagtccttaattttgaatctttaggtccaggaacctggtgtatctctttattagggctttcatttctct

SEQ ID NO: 53000 - DNA, 201 bp, Homo sapiens
ctgtgttagccaggatggtctgtatctcctgacctcgtgatccatccgcctcggcctcccaaagtgctgggattacaggtgtgagccaccgcgcctgtcatttttttgtactttcaatagaaatggggtttcaccatgttggcgaggctggtcttgaactcctgacctcaagtgatccacccgcctcagcctcccaaagtg

SEQ ID NO: 53001 - DNA, 201 bp, Homo sapiens
tcaagcaatcctcccaccttagtctcctgtgtagccaggactgcaggcatacatcatggtgcttagttagccttgtgtttgaggcaagatcttgctctgtygcccaagctggagtgcagtggcacagtcacagctcactgcaacgtcaacttcctgggcttaggtgattctctcacctcagcctccggagtagctgggact

SEQ ID NO: 53002 - DNA, 201 bp, Homo sapiens
ggctgggtggagggctgaccaaggtccaaagggcctgcgcagcctccgggagggcagcttctccagccagaggcttgtgtgagccatcgtgtgctgggctygtttttaagtaagaaacaaggaaatcactccagattctgtcattccaaggaaagggaaggggacagttcaggtttctcagctgttcttaggggtcactga

SEQ ID NO: 53003 - DNA, 201 bp, Homo sapiens
ctccaagaaagaaaagtgacccccatcgactcaccccctgtgtggagcccagagggctacatggcactgcagagcaagggctacccgctcccgcacccgargtcgagtgacaccttggctatggacatgcgtgtcaggtgagatgaagcctggtcctgctgccttgccactgaaggaagactccaggtcctaattgagagg

SEQ ID NO: 53004 - DNA, 201 bp, Homo sapiens
aacccagtgttggccacaagtgaggactgagacccaggtcacctcttggctgaacatgttagcttgttggtaaatggctctgcagtggttctgcattttaktggggaatttgttttggttcattttggcattcccgcaaccatcttgttggttttttggtaaaatgtggcaccccctccagacctcttagctgtggaactg

SEQ ID NO: 53005 - DNA, 201 bp, Homo sapiens
ctgaatgctccatgctaaaaatgtttaataataaacaggatgtcgccactcggggcctgccagatgggtttttttttttttcctcctcttttgcctccccycaacccccaggagagaaattcagccctgttgaaactgtgggcctctgaagagtggatttgccttaagaggtggatttttttcctttttcttttttcctcc

SEQ ID NO: 53006 - DNA, 201 bp, Homo sapiens
ggccaggcccccgctcccctggggctggggctgggtcagcctccctcaggctccatcaggaaggaggaagggagaattaactgctgggtaggcagacaggrgtggtcccactaatattgccagtccctcggtttgctctcttgtaaaaatcctattttgagtccttatgtaggtctgaaaaagtctttttctgtccctaca

SEQ ID NO: 53007 - DNA, 201 bp, Homo sapiens
ttcagagagagctcgctgggagagttgggaatgccatgccccctcttcctggtggagagtagctctcccttgcaggcacagtgcagcaccccacactggargccctgctttggggtcagctgccttcaagtccaggttctaccacttagaagctgggtgacctggggccagcttttaaatctttttgaatctccattctct

SEQ ID NO: 53008 - DNA, 201 bp, Homo sapiens
tggcttttagagccgatggagcagcacatctgtggacaaccttgtccccaatgaccagtttccccctgtgccttattaggaaaggcctcatcaccccagargagcttatgcaatgactcagagccaattcctgtaagaaacactgtggacagagctggggcttgaggacttcattcctggtgatgggtgtccctgtgagct

SEQ ID NO: 53009 - DNA, 201 bp, Homo sapiens
cgaatttgtgttgcgctgcatccagagcccagggccatcctgggccacatgtggttggacaagcttgctttaaagtgaggatcatgaggacttttttttgyatcggtgaaatagtgtgacatatcgtgcctggggctctgtttaatgagagtgacttgataaatggtggggctgaaccgtggaattcacatggaagtagtg

SEQ ID NO: 53010 - DNA, 201 bp, Homo sapiens
cttccagccacttctagggacactggggaaccttgttaaacgttgacatcagtgctctccagccgtgctgtcaccctcctatcttctggatctgccttcgsgatggtcagtgacagcttctggaagctgagcacacacaggtgcacagccatgctgtggtctggcctgctacggcagcatggcagctctggtggagccttc

SEQ ID NO: 53011 - DNA, 201 bp, Homo sapiens
aagaaaatgttcaggatgcaggtgctcctgggggtcacacccaaaacctcaggtgttccccattggagcctgactttgtcccagatgagaaaaagccagartgtggcagttgggatgttagccaccagccagagaccgctgacacagcccatggtgttgagcgggagacaccccgggaggggacggcctttaacatctcct

SEQ ID NO: 53012 - DNA, 201 bp, Homo sapiens
tacaggtaaagccactccctggggactgcgtgctgtgtagctgagcagttgccagagctgcggcccagtgactcagaagaatctgggcccagggagagcckccagagacctggtccctctatgggccatgtgtcactgtggtgtttcagcactgggatgcacttgtgttccagttaaatttgggggagtgaggagtcagga

SEQ ID NO: 53013 - DNA, 201 bp, Homo sapiens
cctcaccaccgcaggcttcctcattgcttctccagtgctctgccctgccaccgctcaagggcctgctgctcttctgattcactttaccctagattagtttwgcctagttaacagacttcagatgagtggagtcatacagtttttactcttgtatggttttcatattcatcaatgttgtttatatgccagttgcttttagtt

SEQ ID NO: 53014 - DNA, 201 bp, Homo sapiens
gctctaggtgcttttgggaaaagccatggatgggtttgggcaagtcatagatacatttggacgagccttgagtgtgttcaggagagccatggatgggtttkggcaaagccatctctgcacctgtttgtgttccatggtttccttttcctcctctccaggcagggttaacacagagtatccccatcctgcggcgggaccatc

SEQ ID NO: 53015 - DNA, 201 bp, Homo sapiens
ccccgccgtcccacccccagcgcaccttttacccacaccacccccagatgttgggcttcgatcccaggtggatgatgatgccttcctacatggacccacgyatcacgcccactcggaccccggtggacttctacccctccgccctgcatccctcaggtaagcactgtggtctgacggtccatacctgtatcacccaggata

SEQ ID NO: 53016 - DNA, 201 bp, Homo sapiens
gtgtatagctttaccactctgaaagtctatgacttttaattgcaaaagttggtccttttagatttattgggatgatgattattattattattatttgagayagagtcttgctctgtcatgcaggttggagtgcagtggtgcaatttcaactcactgcaacctccgcctcccgggttcaagcgattcttctgcctcagcctc

SEQ ID NO: 53017 - DNA, 201 bp, Homo sapiens
atatttctgtaaggttagaattttttgttttgtttttgttttttttgagacagagtcttgctttgtcacacaggctggagtgcagtggcacaatagctcaytgcaacctccataaggttagaatttttaaaaatagatagaatatattaatttttatttaaaaagaactacaaaaattaaaagaaaaacttctgtataaat

SEQ ID NO: 53018 - DNA, 201 bp, Homo sapiens
ttctaacatgcaccttcaacttagcaaagcatttggggaggtagaaatctgaagtctctgtcccttaaacctccatgaaagtaagcatgtgagtctgaatycctgggagggggacaattgtttccctgccctggtccaggccagacagacccgccagtctgttcctggtagtaaagcgcatgtgtctatctaatgtgcctt

SEQ ID NO: 53019 - DNA, 201 bp, Homo sapiens
gtagctgggactacaggtgtgtaccacgacatctggctgatttttttttttttctttccattctgagtagagacaagatttcactatgttgcccaggctgrtctcaaactcctaggctcaagagatcctcccacttcagcctcccaagtagctggggctgggatcacaggcgcatgcaccaccacgcctggcttattgatt

SEQ ID NO: 53020 - DNA, 201 bp, Homo sapiens
ttgcccttgcactgagtaccttagctttcggaacagctcggccaggccctgggctgggttctggggctgtagaggtgagcagagtaggtaggattcccacygagtgttgctcacagcccgttgaatccccgtgacaccctgcagcttccgggctttaaagagaggaagcctggggcccagagacgttcggtggtgtgtccg

SEQ ID NO: 53021 - DNA, 201 bp, Homo sapiens
gcttttagcattgttcattttctccattgtttgacttgttttctgtatctattttaaatgattttttaaatcattgaggcaattttttattacggggacawttctagattgctaatttagttgtcttacagccagagagcacattctgtatgatttcagttgttttcaagttagtaagacttgttttatgactaggatatg

SEQ ID NO: 53022 - DNA, 201 bp, Homo sapiens
cagacgccatgaggtatccccacgactacacaggtacttgtgggcctgaggagcgctctgcaagccgggcccccatggtctgcaagttgctccagctgcaycccctctgcctcgctgccctccctctgccctttgcctgtcctccatcacagcattccactcttgtaccttcatttccagagaaaggggtttttgtagatt

SEQ ID NO: 53023 - DNA, 201 bp, Homo sapiens
gtctcctggagaccacagagaacttaaccagctcagcgtggcagggtgtgtggggtggtggctgggatttggagctggatgacagattgagtcatgatttsaagtgcctggtagagttgaagttctggcacgtgtgtgttgctgctgccctaggccttagcaaccagcatgtaaaactgcaggacaaggcagaacttcttt

SEQ ID NO: 53024 - DNA, 201 bp, Homo sapiens
acgggtgcaggacagcgctcaggcttgggctctaagctctgtgtctagtgtagaacatggggaaggagcatcttaggaactgctgaagtaacttcttactkctctcacaattctaaggaagcgggagaacggcctcctaccaacagcgcccaccccagagctgcctgggaaagggcagttttactgaaaggtgctttactg

SEQ ID NO: 53025 - DNA, 201 bp, Homo sapiens
cctcagggctcgcccgccacccccgtacccccgaggccgggccgggctgcagaggccggaggggcgggggtcccgggcccgcagccgggtctcggggttcyggggccggcgtctttgctccccgccccgcccaattgacggagcagcgcgcccgaggcgggatcctgcggggtcgggccttgggtccggggcgctgagcgg

SEQ ID NO: 53026 - DNA, 201 bp, Homo sapiens
gagaaattcagccctgttgaaactgtgggcctctgaagagtggatttgccttaagaggtggatttttttcctttttcttttttcctccttctaaatatcgkgggaggtcggagcccacctttaggcaagaattggaggtgttttcagtggtgagcttgaaggaagtgggagaaggggggctggggagtgtcttttgctaaa

SEQ ID NO: 53027 - DNA, 201 bp, Homo sapiens
ctctggccctggtgcttcgtatgtttctttttccctgccttcattttttctggcttttagagccgatggagcagcacatctgtggacaaccttgtccccartgaccagtttccccctgtgccttattaggaaaggcctcatcaccccagaggagcttatgcaatgactcagagccaattcctgtaagaaacactgtggaca

SEQ ID NO: 53028 - DNA, 201 bp, Homo sapiens
atctatagatatctatagatagatagatagatatctatctatagatatctataggtgtgtgtgtatgtgtgtgtgtgtgtgtgtgtgtgtgtgtgtgtgtrtatatatgttttggagacagagtctcactctgtcacccaggctggagttcagtggcatgatctcagctcattgcaacctccaccttctgggctcaagcga

SEQ ID NO: 53029 - DNA, 201 bp, Homo sapiens
tgtgtgtgtgccttcagaggtcctcaggtcaggaaagattaagagccctatgatgtgtaggtgggtggggtgctgtatccacatgaaagtcagggtaactrttaacttctttggcctttggttgaccctgagattggagcagggctttctaaatgagatgatgtagatcagtctttgccttcttcaggactgatgaagccc

SEQ ID NO: 53030 - DNA, 201 bp, Homo sapiens
ggagttaactgggtcatgggtgagcatatggtggctgcatgggcagctgccagctctcagtgatggcaccaggtacatgagggtcatccttgctctgctgrcgctgtaaagatgttgcttctttgcaaattaaccgctggattccctgtaattctagtgaaaatcccagcagcttttcttttgttttagctgtttatttca

SEQ ID NO: 53031 - DNA, 201 bp, Homo sapiens
agaacaagcctgggttagagggtctgctggaaatggcctttgaagaccaaggataccaggatgtgtgcactctgtcgtgttctgtgatgaatgggaaacgbaggcttccagaaagccagctctcttctgaaatgtgacggacctaagcaggaagtcatccaggacaggagtggctcagtgttggggatggacgctgtcgcc

SEQ ID NO: 53032 - DNA, 201 bp, Homo sapiens
ggctccagtgaatgctgctcagtggagtttttgagtcgcggaaactgcatcacgttaatgtatgcctctggggaatgtagggccaggaggatctcagtggrctgtgtggccttttttattttttcaggactccgatttcagcttgccacctggttctgcctctggtcctactgggagtccagttgttaaacttcaggatgc

SEQ ID NO: 53033 - DNA, 201 bp, Homo sapiens
cattaggtcatagcctgttcctttttcttatttgaaggtgtttttacctttcttagcattccacaagttactttctccttcctttgttctcctctgccttygcctcttttaaaaagttctaagttcctagccaatcgggacagatacagaatgtgaggtcctgttccagccaatggaaactgaacgcagtagggtggacgc

SEQ ID NO: 53034 - DNA, 201 bp, Homo sapiens
ggtatccccacgactacacaggtacttgtgggcctgaggagcgctctgcaagccgggcccccatggtctgcaagttgctccagctgcatcccctctgcctygctgccctccctctgccctttgcctgtcctccatcacagcattccactcttgtaccttcatttccagagaaaggggtttttgtagattttcctcccattc

SEQ ID NO: 53035 - DNA, 201 bp, Homo sapiens
accttactctgaaggtaacaccagccctgagctgggtgagggcccacccagtaccttagcttacaaagaggcagaagggaggagtccccgaacccctaaascttagattggctctgtccactgccagcgtgatagtaattttcatccctccccctccccttgcttctgaagatggagtctgcgcgcaaggcttgggaaaac

SEQ ID NO: 53036 - DNA, 201 bp, Homo sapiens
ggcaggtggattgcttgaggccaggttaagaccagcctgggcaatgtgatgaaaataaaaaaatgcctcttaaaagaaaaaattagtagggtatagtggcrcatgcctgtagttctaactacttgggaggctgaagcaggaggatcacttgagcttgggaggttgaggttgcagtgagccgtgatcatgccactgcactct

SEQ ID NO: 53037 - DNA, 201 bp, Homo sapiens
agaggggctccgagaacgggaatgaaggctcgctcctggagagggaggagagcaccttgaagaagggcgactgcagagattcttggcggtccaacaagggktgctctgaggaccacagcggtctagatgccaagagccgaggccctcgggcctttgggcgagccctccctccccggctgagcaattgcgggtatggacgga

SEQ ID NO: 53038 - DNA, 201 bp, Homo sapiens
atggagtaacagaacttcctcctctcatctctctgcactcctaaaagggtgctgatgccactggggtctccggttcgagctggaaacgtggtctttgactmgccacgtgatctgtgcatccattggacttgctgcctaggccattggattgggccttgtgccttttttgtctcttgggttgggccaggcctgtcccctccc

SEQ ID NO: 53039 - DNA, 201 bp, Homo sapiens
cttaagattcacagtgaattgttttctctccataggaaggtgatgaaatgtatgtgtttgttgattatctgtttttctggttcctttctccttccttcctyccttgccctcttcctctctccctccctccctttcccttccttttccttccttcccttccttcttttttcttttcttttctttttttttttttttgagaca

SEQ ID NO: 53040 - DNA, 201 bp, Homo sapiens
tgttattaattttttttttcctgttcaacactcctaacctcttttgaatttcagttctctttttttatcctgaaggattattttattgtacttttgagggtttttttttttttttttgccttgcacaaagtactgactcatgttgctaatggctgtggctgtatgctagttatatgtctcattatcctaccccttaagatt

SEQ ID NO: 53041 - DNA, 201 bp, Homo sapiens
agtcttaccgtcaggtttatttgaccctggacctttttactaagggagtggcaagcgaattgctgccacgtgcttgtgtggtgatccagccgcgcctttcyggcacagtcggctttagtgaacaggcccgtggatcagtggtgctaagaataatttaaactacttaggggaagatttgggtttagctgtatagggaacaag

SEQ ID NO: 53042 - DNA, 201 bp, Homo sapiens
tgggaggctgaggtgggcggatcacgaggtcaggagatcgagaccatcctggctaacacgatgaaaccccgtgtctactaaaaatacaaaaaattagccgrgcgtggtggcgggcgcctgtagtcccagatactcaggaggctgaggcaggagaatggcatgaacccgggaggcggagtttgcagtgagccgagatcacga

SEQ ID NO: 53043 - DNA, 201 bp, Homo sapiens
tcgtgaacgctatactaaaatggagtcagggctggacctgcacacagattacagtccgttggcctttcaggtctttcttggggggtgctttgcttggcatygcagttctgcttgaggttttgggagacgagcgttccacacatctctggagcattttcaggtggtgtgatttttggtacctgggatacttatcctggggag

SEQ ID NO: 53044 - DNA, 201 bp, Homo sapiens
ggagacggggtttcgccattttgcccaggctgtttgtttttcttttcttttctttctttttttttttgagatggcatcttgttctgttgcgcaggctggastgcagccgtgcgatcttggctcactgcaacctccacttcctgggttcaagcaattctcgtgcctcagccttcgagtagctgggattacaggcgtgcacca

SEQ ID NO: 53045 - DNA, 201 bp, Homo sapiens
cttcctgggttcaagcaattctcgtgcctcagccttcgagtagctgggattacaggcgtgcaccaccacacctggctactttttgtatttttagtagagayggggttttgccatgttggccaggctggtctcgaaatcctgacctcaggtgatccacctgccttggcctcccaaagtgctgggatgacaggtgtgagccac

SEQ ID NO: 53046 - DNA, 201 bp, Homo sapiens
gttttttgtttgtttgtttgtttttggtaaaatgttaattgcagaagtatacaggttattttatttatttatttatttttttttgaggtggagtcttgctstgttgcccaggccggagtgcagtggcatgatctcggctcactgcaacctccacctcccaggttcaagcaattcccctgcctcagcctcttgagtagctgg

SEQ ID NO: 53047 - DNA, 201 bp, Homo sapiens
ttttgccccctccttgccaaaactgtccctgttgtttgggttcttcgctgttttcattttcgggggttggaaggatgagctgtacaagccctcagtctttytgccatgtttaaccagaagccccctgtattctaaatagtgtgtctgtgagttggatggaattgaattaagggccatctgtgggatgtgtgtgcgtggaga

SEQ ID NO: 53048 - DNA, 201 bp, Homo sapiens
tttttttcttccttagggatgtgggggtgggtctcgctatgttgaccaagcttgtcttgaactcctggcctcaagctgtcttcccatcttggcctctgaargtgctaggattacaggtgtaagccaccacacccagccatttttccatattcatgtgaacagacctgccacactaagtgttttaaaaataatgttaggttt

SEQ ID NO: 53049 - DNA, 201 bp, Homo sapiens
tcttttgttactaaaaatgtgatggagaaataaatgagcagtactgggattatccacttccataaggccatctattgtaacatcagagggtgactgcagtraatagctacgtttattgccccaaagtgggaagccttgaaactggggcagtttagtgtggtttaaattagtcacagtagagtgtttatctcaagagggttt

SEQ ID NO: 53050 - DNA, 201 bp, Homo sapiens
gcactctgtgcggtgcctgaccccactgccctgcctttgtctagttccagtgcgacggcctctcagccgccggagtcgctgccgcagccgggtttgcagaratctgtctccaatttgcagaaaccgacacagtcaatcagtcaggaggtaggtgctgggaccccatcccaactgtttcctgggcatggtagcccctaaatc

SEQ ID NO: 53051 - DNA, 201 bp, Homo sapiens
tttttttggtggtggggacagagttttgcttgttgcccaggaaggcaatggcgtgatcttggctcactgcaacctccgcctcctgggttcaagcaattctyctgcctcagcctccctagtagctgggattacaggcatccgccaccatgcctagttgatttttttgtatttttaataaagacgagatttcactatgttggc

SEQ ID NO: 53052 - DNA, 201 bp, Homo sapiens
atgttaaactccaattatggatttatctgttcctccctttaatactgttggtttctgcttcatttattttgaagctgctattaggcatacacacatttatrgtttctatgcctttctggtgtgtttccacatttccctcgttatctctagtagtctattatcttgcagtctgttttgtcctgtgttcataccattgctctg

SEQ ID NO: 53053 - DNA, 201 bp, Homo sapiens
aagtgatcctcctgcctcaccttctgagtggctggggttacaggtttgggccactgtgcctggccagtattactttaccagtgaaacaattttgcccctgsagttttcattgtggaaatgttttcagtaatttattttatttgattagttatgagactgtgcagtttccctatgtcatttcgtgtgagtttttcggtaagt

SEQ ID NO: 53054 - DNA, 201 bp, Homo sapiens
aggcaggagaatggcgtgaacccgggaggcagagcttggcagtgagtggagatcgcgccactgcactccagcctgggcgacagagcaagactccgtctccaaaaaaaaaaaaaaaaaaaaaagaaagatatattttttaatgtaaaaaaagagaagctaccaacttttagaaatagtataagtgaaaagaagcatgagcat

SEQ ID NO: 53055 - DNA, 201 bp, Homo sapiens
gggctacccgctcccgcacccgaagtcgagtgacaccttggctatggacatgcgtgtcaggtgagatgaagcctggtcctgctgccttgccactgaaggargactccaggtcctaattgagagggccctgggatgagctaccatcctaggagacactgcccacgggagacgtgctccttgaagggactcctggttcctctg

SEQ ID NO: 53056 - DNA, 201 bp, Homo sapiens
gactactggaatccagaaggtcgaggctgcagtgagccatgattgcaccactgcactccagcctgagtgacagagtaaggccctgtctcaaaaaattaatrataacaatcatacctatggttgtcataatttgtattttttgagtactagcaagtaagactttttcctttgcttcctttgtataatgcctgtttccttcac

SEQ ID NO: 53057 - DNA, 201 bp, Homo sapiens
ggatgacaggtgtgagccaccgtgcctggacacccaggctgtttcagactcctggactcaagtgatccctccgcctccgcctatcaaagtgctgggattayaggcatgagccacggcacccagcaaggcagcctctttcatgagccactaggttctggggggtctcagtcctggttaagccctttgatgagtggggcttga

SEQ ID NO: 53058 - DNA, 201 bp, Homo sapiens
gtattgcccagactgatctcaaattcctcacctcaagcgatcctctcacttcggactctcagagtgtggggattacaggtgtgagccactgtacctggcckgaatttttcttaaagtctaatatagtcacttttagaacatgtttgctcatctacgttgaccgtctctatcttgatgggcttgatctaccaaggtggacag

SEQ ID NO: 53059 - DNA, 201 bp, Homo sapiens
atttgaattttaaaaattgtggtgaagtatacataacataaaatttaccatttttaagtgtacagttgagtggcgtgaagcactttcacagtgttgtgcarccatcaccaccatccatctccagaacgttctcatcttcccaaactgaaactctgttcccattagatgccaactcccctcccccatccagtggcggcggcc

SEQ ID NO: 53060 - DNA, 201 bp, Homo sapiens
ttaaaaagaatgaggtagatcactatgtgtatttttatcttttaatttttaagtctgaactaaacagaacttatgtatatttttagaaagatgaccatgtrtagaaagagaagaacccaggttgaataatacagtagcttcctgcatttgtagagaagaccatgactgctaatatgaatgtgtataagcctggaggctgtc

SEQ ID NO: 53061 - DNA, 201 bp, Homo sapiens
cgtggtgtgggcagacgattcaaaggaatgtactggggaaagcccacaattcactttctcctgtaaagcagcactggctgccctttattaccctttgccaycatcctgatatcgccttctgcttcctgcactacccctgccagccaaggcttcaccagacttggtctttagtagcctgtattagaaaaccagctgcacatc

SEQ ID NO: 53062 - DNA, 201 bp, Homo sapiens
atgtctcattatcctaccccttaagattgatcatttctgtgttggtttctatttcaaaccagaataggccaggtgggtcaattcatgtatttctgaattcrataatgaggcttccctaccgtgaaatgtacatatcttgtcatgggcggacaggtactaaatagagcctatctatactagattttaaaacaatggatttct

SEQ ID NO: 53063 - DNA, 201 bp, Homo sapiens
tggttagagactcgaaagggcactggacataggcaggctggagactggtcctggtcctgctgttctgcatctgactcagtcactcttctctgagcctcagkgggggatgtgactagagccttctcagggggtggtgagcattcagtcaggctgggtgtgcttcgcataatgctgaccctggcgagttttcagcagaggtga

SEQ ID NO: 53064 - DNA, 201 bp, Homo sapiens
aggacagccgcgtggaggacaagagatccttcttccaagatgaacacgtggcagattctgaaaatgcagagaaccggcccttcaggagaaggcgccccccrcgccaagataagccccctcgattccggcgcctccggcaagagcgggagtccctgggcctgtggggacccgaggaggagccccacctgctggcaggtcagt

SEQ ID NO: 53065 - DNA, 201 bp, Homo sapiens
aagtgccctggtctccaagtgctgagaaggcatctccccaggaaaacggccctgctgtccacaaaggtaagagctgggccgtcttcccaccaactggaaaycctggcctgttgtcctcgtcttgttacttgcaactgccttccttcttagctagcagaacgtatggcttacaacgagatcgtattgggaagcatcagttat

SEQ ID NO: 53066 - DNA, 201 bp, Homo sapiens
aaagctgtctggcggcagcgccctcctggcctgcatctctggtggcctccctgctgatgtaggaaaccagacggtaaaagggacccagatctcagcctgcygaccccagcatccttttcttacaagtctgtgctagaaatgaccatggtagcttttgtaaaattgttgcctgtatttacttcagacaggatgtagagagtg

SEQ ID NO: 53067 - DNA, 201 bp, Homo sapiens
gccacttttggccgcgaggccaccaaatttgaagaggaggagaaacctgacaaggcctgggaagccagacccccacgagagtccagcgatgttccccccaygaagagaaataactggatctttattgatgaggagcaagcctttggggtcagaggacaggcccggggccggggccgtggtttcagagagttcacttttcgt

SEQ ID NO: 53068 - DNA, 201 bp, Homo sapiens
agtgttaaggaccaagcctatatctgacaaatgtgcttttcttgcccccttccttggacaggtctttgaaccaggcagggtgcatgtgtgtgtgccttcaraggtcctcaggtcaggaaagattaagagccctatgatgtgtaggtgggtggggtgctgtatccacatgaaagtcagggtaactattaacttctttggcct

SEQ ID NO: 53069 - DNA, 201 bp, Homo sapiens
gacacatgcggatcccggcgacctacagacagagactatgtcccagattcctacagacaccctgacgcatttggtggccggggctttgaggacagccgcgyggaggacaagagatccttcttccaagatgaacacgtggcagattctgaaaatgcagagaaccggcccttcaggagaaggcgccccccacgccaagataag

SEQ ID NO: 53070 - DNA, 201 bp, Homo sapiens
agcggcgggagcggcgggaaggccctgggtccgagcccgactcccaggtggatggtggcctgtcgggggctagtttgggtgagaagaaggagctggccaaraggagcttctccagtcagagacccgtggttgacagacagagccgaaagctggagccgggagggtttggggagaagcccgttaggccaggtggtggtgaca

SEQ ID NO: 53071 - DNA, 201 bp, Homo sapiens
aggggccgctgcagcgaggaacgttgcctgtgcacagtgccaggtgccggtcagtccaccagagtcctctgctccggagttgctgccaggcggcgtcctagggggcatcgctggcctcgtggctgcatggaagtggctcttcctaggtggttctgcttctccactgtgaggagacgtggccccacggtggggttgccacct

SEQ ID NO: 53072 - DNA, 201 bp, Homo sapiens
ccccacggtggggttgccacctcagcatggcaggagcccagcaaacgcagaggggagcaggctgcacatggtctggcgagcacctcttccacagccagagrcattcgggtgatgacctctgctcagggaccaggagagggtcccctgcacagtctgggttgactgactgcacttggcttgtgcctcggacagggaggtgca

SEQ ID NO: 53073 - DNA, 201 bp, Homo sapiens
tggcacagtcacggcttactgcaaccccaaactcctggattcaagggagtctcccaagtagctgggatccaggcatgtgccaccacacccagctaattaattttttttttttttctgtagagatggcgtcttgctgtattgcccagactgatctcaaattcctcacctcaagcgatcctctcacttcggactctcagagtg

SEQ ID NO: 53074 - DNA, 201 bp, Homo sapiens
ggttctgcattttagtggggaatttgttttggttcattttggcattcccgcaaccatcttgttggttttttggtaaaatgtggcaccccctccagacctcytagctgtggaactgagatattttagcagggtcctgtcatcctttgatttttcctcgcttcctgcctcttggcccttcctttttgtctgacttcactcggg

SEQ ID NO: 53075 - DNA, 201 bp, Homo sapiens
ctctatcttgatgggcttgatctaccaaggtggacaggcttctgtttgttctaatgtttgtactttcattgtgggtggtcctcttggccctttaaaactaccctgctctgctgcttgctcttttgtgtctgtctcctttgattcaacattttttttgtgcgtttcatctgtatagttgtgtatgtttatttgttcttattg

SEQ ID NO: 53076 - DNA, 201 bp, Homo sapiens
ttttgttttagctgtttatttcagaaattgacaaactcattctgaaatttatatgaaaatgcaaaagggccaagaataatcaaagcattctctctctctcttttttttttttttttttgagaaggagttttgctgttgctcaggctggagtgcagtgagacgattataggtcactgcagcctaaaactcctgggctcagga

SEQ ID NO: 53077 - DNA, 201 bp, Homo sapiens
tttgttttagctgtttatttcagaaattgacaaactcattctgaaatttatatgaaaatgcaaaagggccaagaataatcaaagcattctctctctctcttttttttttttttttttgagaaggagttttgctgttgctcaggctggagtgcagtgagacgattataggtcactgcagcctaaaactcctgggctcaggag

SEQ ID NO: 53078 - DNA, 201 bp, Homo sapiens
caccattatcaatgcggaaaacctgaagggccttgacgatctggacgccgatgccgatgatggctgggcaggtgggcagagaagcacgggtggtttagacrggcaggaccaaagtccatctgtacttaccagggatggaaaccccctggcaccaccgtgtgttttcccttggcaagatagggatgaagagccggacaggga

SEQ ID NO: 53079 - DNA, 201 bp, Homo sapiens
gctggtcttgaactccggacctcaggtgatccacccgccttggcctcccaaagtggtgggattttcaggcctggccaacagcaactatcttaataagaacrttcattgactcaagtaattgcaagtccagaagtagacaggtttgggattatttgggtgcacccattctgaaccagtcattagaaccggagctgggcttct

SEQ ID NO: 53080 - DNA, 201 bp, Homo sapiens
ggattacaggcgcatgccaccacgcctgactaatttttgtatctttagtagggatggggtttcactatattggccaggctggtctcgaacccctgacctcrtgatctgccgcctcggcctcccaaagtgttgggattaacaggtgtgagccactgcgcctggcctcttctacctcttctaattggattattttactttaga

SEQ ID NO: 53081 - DNA, 201 bp, Homo sapiens
tttgtcacaactaatgaaccagtattgatacattattattgactaaagtttatgctttattcagatgttcttagcttgtacccagtgtctttttttttttccgttctaggatgccacattaaatttaatcatgtccccatagtttccactaggttgtgacaattaagtttttgatgaccatgacagttttgaggcataccg

SEQ ID NO: 53082 - DNA, 201 bp, Homo sapiens
caggtgctccccgtggtctgtgttgctgtgtgagccgtggctctggtggaggggacccagctgaccatgtggttccggcaaggggcttgcaactaagtgcyggagaaccccccagttctccactgggggtggggagtgcttcttgtgtcctcaccatacgcctcaatgcttctttgtttttcctttcctcttattttaaat

SEQ ID NO: 53083 - DNA, 201 bp, Homo sapiens
tgactgccgtaaagcaggtgtgtatacacaaactttgtaaaggaccaggcagtaactgttctgggctttgtgggccatagatggcctcttgcttatttctsttcaggctgccggccccttctctgatggaacgttgaggctggaagattctccacttgtgcagtcttcactgtggagagtgtaattgtcctcgtaggggct

SEQ ID NO: 53084 - DNA, 201 bp, Homo sapiens
tgtcctcaccatacgcctcaatgcttctttgtttttcctttcctcttattttaaatttgttgcttcctatatatgctgtctccttggggtgcgtggtcttytggggatggctcatgtctcccataaggaacactgggttaccaggaaccccactttccccactctgtggtttcctcaaaccttattttcaggctgtttatt

SEQ ID NO: 53085 - DNA, 201 bp, Homo sapiens
aatgaaaggatggtttgcgcacttgcgtgtttgacacggcaccagctcagtcagcgtcttttgtctcactttttttggcccctgtttgtaatcgattttcrctccctatgtttcatttggatcataatatagttgtgtgtgtgtgtgtgtgtttttgatggagtcttgctctgttgcccaggctggagtgcagtggtgcga

SEQ ID NO: 53086 - DNA, 201 bp, Homo sapiens
gtgtatacacaaactttgtaaaggaccaggcagtaactgttctgggctttgtgggccatagatggcctcttgcttatttctcttcaggctgccggcccctkctctgatggaacgttgaggctggaagattctccacttgtgcagtcttcactgtggagagtgtaattgtcctcgtaggggctgctttcattcactgcagca

SEQ ID NO: 53087 - DNA, 201 bp, Homo sapiens
tccagatgagccagtgcctcgctcttagggaacagaaatgtgggcgctttagggctctttgaaagccacctctgcttttcttttttctttttctttttctytttctttctttctttctttctttctttctttctttctttctttctttctttctttcttttctttcttttttttttttttttttgagatggaggctccctc

SEQ ID NO: 53088 - DNA, 201 bp, Homo sapiens
caagtgatcctcctgcctcaccttctgagtggctggggttacaggtttgggccactgtgcctggccagtattactttaccagtgaaacaattttgcccctkgagttttcattgtggaaatgttttcagtaatttattttatttgattagttatgagactgtgcagtttccctatgtcatttcgtgtgagtttttcggtaag

SEQ ID NO: 53089 - DNA, 201 bp, Homo sapiens
gcttggaagcacttttgctggtatgtttcttcattgtgccagactctcttacgccctctagtacattcagcatccttgggcttggccactgaatgtgggcrgcagtcccatcattgtgacatcaaaaatgctcctgcacatttgcaaacaccctggtattccttggcccatggcagcagctgaataaactgggatttgggt

SEQ ID NO: 53090 - DNA, 201 bp, Homo sapiens
ctcaatttgttaatatgttttaaagttctgtcatgagggatattagtttgtaattttctgttcttttaatgtctttgtcaggttttggtatcaagttatgstgggcttataaaatgagttgtggagtgttcttctctactttcctaaagaataagattggtatttttgtaagatcagtattatatatttttctttttcttt

SEQ ID NO: 53091 - DNA, 201 bp, Homo sapiens
cagctcacatctgtggtagtacccattgcttcagaaaaacccttaatcacagctccctgccctgtgacttttccctgtcttcctgaacacagattgttttyttctcattcactaactatatcctgtcattggcttttactcctgctagcttctgatgcttctaccttaatctttttcttccatagtgtccttgaagtggag

SEQ ID NO: 53092 - DNA, 201 bp, Homo sapiens; identical to SEQ ID NO: 36589

SEQ ID NO: 53093 - DNA, 201 bp, Homo sapiens
ggagtgctgatgagaggcagaggctcttctggtctggggtggagacagtaagtacgcactatccccgtatttagtttgtctttcctgtttcacagctggargaagcctgggtattttgacacgggatcatctgtaaggccccatcctccctgtgccctctctgctgctcctccattcctaacgcttcaccccactttacct

SEQ ID NO: 53094 - DNA, 201 bp, Homo sapiens
aaatctgtgtacagacttggcgaggacgtggtggggaccttaaacttaggggaaggaaccgtagcttgtttgcaggtaagaagggagcagagcttcttacytgctggggtgctggggttgaagggctagggtggaaggcctgtataaagaggggtggcatgtagaaggggatagtggggtcatccagggtccctttgtaaa

SEQ ID NO: 53095 - DNA, 201 bp, Homo sapiens
tcactgttactggagaagggagagggggacagtaaaatgctgtgctaagggagggtgtaatggatcctgattccttatacacactcccagacatacccacrtctagcctctgacccggaacagtttctcagaccttcaacctcttcctgtttcttagatgcactgacccctaaactcctaacagcttgatagaactccttc

SEQ ID NO: 53096 - DNA, 201 bp, Homo sapiens
cggaggcccggccgggcggcgctccagcctcggggcaggtgcgcggagaggaagtgagagcattccggcccccccaccccaaccccggccgctggccctcyggtgagtcacagccgacccccgccgccggagggagaggggagctgcgggccagagccccggagggtctggaggagccaggagggtttctgggagcagagg

SEQ ID NO: 53097 - DNA, 201 bp, Homo sapiens; identical to SEQ ID NO: 36620

SEQ ID NO: 53098 - DNA, 201 bp, Homo sapiens
gggacagtaaaatgctgtgctaagggagggtgtaatggatcctgattccttatacacactcccagacatacccacatctagcctctgacccggaacagtttctcagaccttcaacctcttcctgtttcttagatgcactgacccctaaactcctaacagcttgatagaactccttccccacacctacctactaggaccctg

SEQ ID NO: 53099 - DNA, 201 bp, Homo sapiens
agggggtgagtggtgaggaccaggcccgctgggtcctgggggcgcggtggctggcgcgcaggtcccggagggggcggctggcgcgcactacacgcttgggracaaggaaaacatccgccggaggcccggccgggcggcgctccagcctcggggcaggtgcgcggagaggaagtgagagcattccggcccccccaccccaac

SEQ ID NO: 53100 - DNA, 201 bp, Homo sapiens; identical to SEQ ID NO: 36622

SEQ ID NO: 53101 - DNA, 201 bp, Homo sapiens
ggaggagccaggagggtttctgggagcagagggtcacttagtgggcttctgtcgtggtgtcgctacgggcgcgaaacggacactgaacacagtctgactgwatggaggcaggtggggagggatcccctgggagaacttggcgggccgagagcagaccccagggcaaggaggggcccccgagggggaaaccgggagtcgggc

SEQ ID NO: 53102 - DNA, 201 bp, Homo sapiens
cagcttgatagaactccttccccacacctacctactaggaccctgtgatacactgatttttgattacttcatgctacctagacttgactgcctcactcttrggttattaggtacttaatactgctatcttcagctcacatctgtggtagtacccattgcttcagaaaaacccttaatcacagctccctgccctgtgacttt

SEQ ID NO: 53103 - DNA, 201 bp, Homo sapiens
tgtgagagctgattcatgccccggcacagctagagggagggaggtggccatggagggggcactggactgggcacttccccagcaaggaggcaggaggggcragggcccccaggtggtccccagatctcttccctgacctggagagaaggaagcattccaccttccccctttctcccccactgccaccaccaggggtgtgta

SEQ ID NO: 53104 - DNA, 201 bp, Homo sapiens
agtcagcagatggatgatcagttgagtttagctggagtggggagcaggagccccaggaacaggggtgttggctgagccccattctgggtcaggccctcccmctttgcagggcagccgagggtcagatttttgcaccaaggagaactggcaggttcctgcctcctgacgtacctcacacccagccgggaagtcgatgggatg

SEQ ID NO: 53105 - DNA, 201 bp, Homo sapiens
ggagggttctggagatagagatgtaaacctcagccctggcaccccttacctttagccatctcatgttagaatctaaaaccctaacctctactctcatctcygttccctctcagcattacctctccactcattctttctctaggccttcaggatgtccggtttccccaggatgaggctgtagccccatccagtccattcttg

SEQ ID NO: 53106 - DNA, 201 bp, Homo sapiens
gatgcttctaccttaatctttttcttccatagtgtccttgaagtggagattgcattttgaatttgtaacgtcccgagaaccaggattggtactcctacccsctgtggaacagcccgaacctaccacctggacaggacctgagcaagtacctgtagacaccttcagctgggacctgcccatcaaggtgctgcctactagccc

SEQ ID NO: 53107 - DNA, 201 bp, Homo sapiens
cccgcatctggaataggctggcgagatacttagtatccgagggctcgggacttggcgccatcgaggtcatggggacccaggatccagggaacatgggaacyggcgtcccagcctcggagcagataagctgtgccaaagaggatccacaagtttattgccctgaagagactggcggcaccaaggatgtgcaggttacagact

SEQ ID NO: 53108 - DNA, 201 bp, Homo sapiens
tcgccgcccccactgaagcaagagctccccggctccactgaaacaccagctcatttaagctttccccaacgcccggccctccgggacgatacctaacaacsaccggcgcccgcatctggaataggctggcgagatacttagtatccgagggctcgggacttggcgccatcgaggtcatggggacccaggatccagggaaca

SEQ ID NO: 53109 - DNA, 201 bp, Homo sapiens
tggacaaaatgcctgaagttcctcattaaaacaacaacaacaacaaaaagcaaaaacaaaacaaaacaaaaaaactctgccaggacttaacctcctttgcraatatcatcagtcgttccccactgtctgatcagctatgcacataatcctcaccaggcattttctatgttctctaccttctgtcccagctcatgtgtgtta

SEQ ID NO: 53110 - DNA, 201 bp, Homo sapiens
gggaaactgtccgggggctgctcctgcatcatccaacccttccaaacccctacacgatggctgtggctgcacgagtcacggtaaggaaagagcctgccctrtaccttagcccctgaaccccacctccaccccagcatggtctcttcatccaccctcatcatactcctgtaagcccctgggcctgggaggttaagagtaagt

SEQ ID NO: 53111 - DNA, 201 bp, Homo sapiens
acagcccagcctccagcctggcctttcctccttcccctctgaacctcctgcaaccctgagccatcaggacaatcataccccttcccttctctccacccaaytgtgccagtaaatgggggttgagggtgacctaggcagcattagaatcacttatttatttctttcctcacctgttccctgactgcgtgaaatgttcaggga

SEQ ID NO: 53112 - DNA, 201 bp, Homo sapiens
tcttgcctttctcctgggcactcactccaaatgggactcctcgatttactctccacccaccaaagtcagtagacttgcactgggattcatttgatgatccyactctgctgaacccccaaatcctttccatcttgggaggtacatgttccttaaaccatttcctcctcctcgcttcccagatcactgcctgcctggtacaaa

SEQ ID NO: 53113 - DNA, 201 bp, Homo sapiens
tgtgaaaaggaggaacgtcatcccccatgatattggggacccaggtaaaagtccaccccaaggtcagcttccctccctcaacttttgcaccctctaccctrtccaccaatgcaagtgacccaagtcccctcctctcccacagatgatgaaccatggctccgcgtcaatgcatatttaatccatgatactgctgattggaag

SEQ ID NO: 53114 - DNA, 201 bp, Homo sapiens
agggaggacctgacacggcgacggtacctgatgagtggggtgatggcacctgtgaaaaggaggaacgtcatcccccatgatattggggacccaggtaaaartccaccccaaggtcagcttccctccctcaacttttgcaccctctaccctatccaccaatgcaagtgacccaagtcccctcctctcccacagatgatgaac

SEQ ID NO: 53115 - DNA, 201 bp, Homo sapiens
ttggatatagggctgtaccaagcccaggaaaatgttgggattttttgaaggctttaccaagagcaaaatcagaaagcttcacagtttaaatgttgaatttaaaaaaaaaaaaaaaaaaggcttgagaggaaatgtccagaaataaatataaacactgattgtctatgggtgagattatttttttccccctttcacctttca

SEQ ID NO: 53116 - DNA, 201 bp, Homo sapiens
tggtgattcactgagcctgggggatgacttgaagctgatggtgcagtggtaacagttgcaggctctgaaaggggaggagctgatttgaggagagggaagayttagtctgtggtccctgtggtttaccccgttccagcctatctgccctcttaagttcacagtgtgcctgcgtcgggaagggcagactgtgtaccagcaagt

SEQ ID NO: 53117 - DNA, 201 bp, Homo sapiens
agattgtctcttctttcccttcccttcatacgtatctgcatgctgcttactggttccccactgcagtcacacacatagctgtgtgcccctcctcaggcatrcccattccctgcctcccttctgtgtctgctcccccagctctggccactctcagggaggacctgacacggcgacggtacctgatgagtggggtgatggcac

SEQ ID NO: 53118 - DNA, 201 bp, Homo sapiens
ggtaccggaagacccatgtggaaaagaagacacctttcatcgacatgatcaattctgtacccctaagacagatttatggtgagccccaccccatctctgcyctgctcagagaaggcctagcctccaggtctaccacagttaggaagagacttccagcttatgcaaattgcactgttccatcccctaggttttcagaggaac

SEQ ID NO: 53119 - DNA, 201 bp, Homo sapiens
caccgtagtggagaagggagagaaagcttgggagatagatggatggggaggtagcaggacttggtgattcactgagcctgggggatgacttgaagctgatrgtgcagtggtaacagttgcaggctctgaaaggggaggagctgatttgaggagagggaagacttagtctgtggtccctgtggtttaccccgttccagccta

SEQ ID NO: 53120 - DNA, 201 bp, Homo sapiens
aagaagggctctggattgccctgtccccaccaactgagaaaaggatttctcccctcatcaccatcctcaccaagatgcaggtgctgctgctgctggttttrtttgatatctcaatcaccatggcctggagtttcctcagttgatctagaagggacctagaggaagagaggggccaatagtgagcatcccctggcctagcat

SEQ ID NO: 53121 - DNA, 201 bp, Homo sapiens
tacgtatctgcatgctgcttactggttccccactgcagtcacacacatagctgtgtgcccctcctcaggcatgcccattccctgcctcccttctgtgtctgctcccccagctctggccactctcagggaggacctgacacggcgacggtacctgatgagtggggtgatggcacctgtgaaaaggaggaacgtcatccccca

SEQ ID NO: 53122 - DNA, 201 bp, Homo sapiens
ggtattggttaggatgagggggtgttgggtgtggactagtaacaatgccccacctctaaatctagaggacaagctacagaggggtttgaaggggaagcagsaattctggcaacagtgtgtctcattcattcctccaggccaggagtaccgcatgtacaacacatatgatgtccacttttatgcttcctttgccctcatcat

SEQ ID NO: 53123 - DNA, 201 bp, Homo sapiens
gatatctcaatcaccatggcctggagtttcctcagttgatctagaagggacctagaggaagagaggggccaatagtgagcatcccctggcctagcatcctragacacagtgaaactcctgttcaggccacctcctccatctctgcactggatcctctctcttacttttcattctatttttgcaaacgacttcttcctctct

SEQ ID NO: 53124 - DNA, 201 bp, Homo sapiens
gtgcagtctgatgaagtctgggtgggtgtggtctacgggctggcagctaccatgatccaagaggtaatgcactccttttcccatctctccaccatctgtakcctggcccagaaaacttcctcaaccaccaaatttcttcaaggcataacccaatgccatcttgtccgtctataaagcctcccatttttccctggtatgcat

SEQ ID NO: 53125 - DNA, 201 bp, Homo sapiens
ttccccaggacctgcctctgctagaaactgcatggcctgcgaggcgcggtagctcacgcctgtaatcccaacactttgggaggccaaggcaggcggatcaygagatcaggagatcgagaccatcctggctaacacgtgaaaccccatatctactaaaaatacaaaaaaaaaaattagctgggcgttgtggcaggcacctgt

SEQ ID NO: 53126 - DNA, 201 bp, Homo sapiens
gtgagatttgcctgcagggggaggatgggacctcggcagagaggctctgagaagaggtcagggaatggccactccaggggaggctctgcactgggagcctraggcatgtaatgcagcaggcaggaagtgttgccaggggcctggagtacacagtctgagccgtccaaccactggtgtgtgctgtctttcggcacttctgac

SEQ ID NO: 53127 - DNA, 201 bp, Homo sapiens
aggttaagagtaagtaagaggagctggggagctagccgggacccagtgtactcgtggagcctgccctcacagtccctgaccccttcacaggcagctaccayggtaacccacatcacagcctttgaccctgacagcacggggcagcaggtgtggcaggatctacttcaggatggacagctggactctcccactggtgatggg

SEQ ID NO: 53128 - DNA, 201 bp, Homo sapiens
aagcctcttacctccatgctcagctggcaggctcccccttgtgtcagaggagtacatagcaggtacaaggaggaggcagaaggagactagtaggacctagrgcacaggaaaaaggagatgaagaagggctctggattgccctgtccccaccaactgagaaaaggatttctcccctcatcaccatcctcaccaagatgcagg

SEQ ID NO: 53129 - DNA, 201 bp, Homo sapiens
agctggcaggctcccccttgtgtcagaggagtacatagcaggtacaaggaggaggcagaaggagactagtaggacctagagcacaggaaaaaggagatgargaagggctctggattgccctgtccccaccaactgagaaaaggatttctcccctcatcaccatcctcaccaagatgcaggtgctgctgctgctggttttgt

SEQ ID NO: 53130 - DNA, 201 bp, Homo sapiens
cgtgaaatgttcagggaggtcagttgatttccccaggtacattcatggtgtgacagacacatgggtacaaataaaagacccagaaagccattaagtgtggkgtgtttgagccctcagtcgtcctgacagggcacaggagctgcggccagcccttgcccaccgctttttatttggacacagatggggagccccccaggctcc

SEQ ID NO: 53131 - DNA, 201 bp, Homo sapiens
tgggggacccggtgccgtggcccaggggccgggccgaggtcccgggggcggtgccttgcgggcccgtcccggggcggtgcctggtgggctggccccgcggytcctcccctctctgcgggcccagtcgccctttggccgggcgagctaatcgtcggctcaatgacgacgaggcccgacccttcccgtccaggacctacagag

SEQ ID NO: 53132 - DNA, 201 bp, Homo sapiens
tgaaatgttcagggaggtcagttgatttccccaggtacattcatggtgtgacagacacatgggtacaaataaaagacccagaaagccattaagtgtggtgkgtttgagccctcagtcgtcctgacagggcacaggagctgcggccagcccttgcccaccgctttttatttggacacagatggggagccccccaggctcctg

SEQ ID NO: 53133 - DNA, 201 bp, Homo sapiens
ctcctcgcttcccagatcactgcctgcctggtacaaatctgcgctgttcaatgaactatacttcctggctgatggaggcacagtgtggctggaagttcttraggactccctaccagaggagctgggcagaaacatgtgtcacctccgccccaccctacgggactacggtcgatttggctaccttgagggtacaggatgctg

SEQ ID NO: 53134 - DNA, 201 bp, Homo sapiens
aagacagatttatggtgagccccaccccatctctgctctgctcagagaaggcctagcctccaggtctaccacagttaggaagagacttccagcttatgcarattgcactgttccatcccctaggttttcagaggaaccaggctttatagtctagaaagttagaaatgggcttattttcctctcccaataccccactaacca

SEQ ID NO: 53135 - DNA, 201 bp, Homo sapiens
aaggagagcccaaggcggcttctttgctgtcgccgcccccactgaagcaagagctccccggctccactgaaacaccagctcatttaagctttccccaacgmccggccctccgggacgatacctaacaacgaccggcgcccgcatctggaataggctggcgagatacttagtatccgagggctcgggacttggcgccatcga

SEQ ID NO: 53136 - DNA, 201 bp, Homo sapiens
agtcttaaggcagctgagaggacaccaggagccttatttttctcttcctcgactccaggccgctattacaactatgacagcagctctcggcctcagtctcrtagtgttatgtctgaccagtgtgctggacagtggttcctgaaggcctgtggcctaggagaaggagacactgaggtgagagaggaggaggagcagccagag

SEQ ID NO: 53137 - DNA, 201 bp, Homo sapiens
tggccaaaagtcaaacagggcacaggactaaggacagggcctatgtttggaccaaaggaagccatggcaaacctgagcccagagtgagccgtctgaactgkgggagggaagtgctaacagcccagcctccagcctggcctttcctccttcccctctgaacctcctgcaaccctgagccatcaggacaatcataccccttcc

SEQ ID NO: 53138 - DNA, 201 bp, Homo sapiens
ggacatctgttcagagctgaataagctctgccagcactttgaggccgtgcactctggcaccccagtcaccaacaacctcctggagaaatgcaaaaccctcrttagccaaagcaacgacttaagcagcctcagagcaaagtaagtccctctgatgctgctcttgaggccccgtgtgtgcctgtggggaggcctctgtcctgc

SEQ ID NO: 53139 - DNA, 201 bp, Homo sapiens
cctcgtatctgagacccccgacgaaacccagaaggggcaagtcggccctccgaggggacgggaggcagaacctgcttctggttctgtcagtgctccccggyccggctccctgtgcctcagtttacccatctttaaaacagacgcgggaataaatgtgggggagggtgtttgaagggggaggggcgtccatgagatgggccg

SEQ ID NO: 53140 - DNA, 201 bp, Homo sapiens
aaaccactggggcccagagaggggaaggacgtttgcgccagaattaggacccggacccagaacctaaatgatgtaatgagtccttcattcgtttctctacyaaatatgtaagtgaataacaacaagtgaataaagaggcaggtttaaaactcagccggccagggcttaagtcctagctctaccatgtgccactgctgtgat

SEQ ID NO: 53141 - DNA, 201 bp, Homo sapiens
ttcacagcgtagtcgaaccccaaacattgtaaaatgtgtccctggcttctgagcttgcccaaagtaatgtctgactgttggtttttcccttcacaggggaygacttagcttctgtattattgttgcttcctcagggggagacagtcaagaataaaaagtattctaccacctctctgcctgacttggtttcctgggatttat

SEQ ID NO: 53142 - DNA, 201 bp, Homo sapiens
gagcctcactttccccatagcagctcaagggagctggttttctcagtcccttccagctctaacatgaatagaaatctgtggtctggagcattttgcacgcrctcagcaaaactgtgatgtcatggagcacacacccacagacttttctgctcacaggaggattgtagatgctctgtggagcacctaaatcacagcagggac

SEQ ID NO: 53143 - DNA, 201 bp, Homo sapiens
gaataaatgtgggggagggtgtttgaagggggaggggcgtccatgagatgggccggaggttcgaggatcgggtggaaatcctcagcccaactcctagagtsgagccccggtagacccctcccagctccccggctctggccaagccgccaagtgacccgattgctatggcaccggcggtaacaatcacgcccgcggccccgc

SEQ ID NO: 53144 - DNA, 201 bp, Homo sapiens
ggtcccaggacctcatcactatcctctgtctccccatagattcctcttctcctgtaaatgaccacagaggaagacaatgaatgaggtgaaagaatcccttygcagcatcgagcagaagtacaagctcttccagcagcagcagctcaccttcaccgccgctctggagcactgcagggagaacgcccacgacaagatccggcc

SEQ ID NO: 53145 - DNA, 201 bp, Homo sapiens
ccttgatcccaggttttgctgacaccacagcaagggattggagggcgtgtgtgtacacgcgtgcgtgtgtgtgtgtatgcatgtacctgtatgtgtgtgcrcatgcatgtgtgtgcgtgtgtgtgtgcgcgcgtgtgtgtagatacccacatctggagaaacagaaccagagaaactctgtccacagctgagggaagaagt

SEQ ID NO: 53146 - DNA, 201 bp, Homo sapiens
tgagcaagggcgatgacctggttttcacagcgtagtcgaaccccaaacattgtaaaatgtgtccctggcttctgagcttgcccaaagtaatgtctgactgytggtttttcccttcacaggggacgacttagcttctgtattattgttgcttcctcagggggagacagtcaagaataaaaagtattctaccacctctctgcc

SEQ ID NO: 53147 - DNA, 201 bp, Homo sapiens
ggcccggaaccactacggcggcgtggtcagcctcatccccctcatcctagacttaatgaaagaatggatcgcccactccgagaagttgccgcgcaaggtgytgcagcacgtgagtgagccccaggcgcaccaggagagcaccaggggagccgctcgtcctgcccaggccatagggacccagcccagggccactaaacacaa

SEQ ID NO: 53148 - DNA, 201 bp, Homo sapiens
gtcatcagcacgcgccgcggccccgccctgcaggctccgcgccgggcccagatacccgatcctcggtcgcgcgggtcgcccccgccccgacctccccggcygacgcgctctgcggctcgggcaagttctttccccaaccccggcctcgcttttcccatttgcgcatcttagcgggggacaccctcaggtggcttccagctg

SEQ ID NO: 53149 - DNA, 201 bp, Homo sapiens
tcaagaataaaaagtattctaccacctctctgcctgacttggtttcctgggatttatccctgaaagaaaacctacatctcccctaagacatcaaaggacaytgggcagtaagcctcagcagacagcagagagagaggccaccctaggcaagggggcatgcctgtctcaagtcggcttctaagaggctcatgcccaagctcc

SEQ ID NO: 53150 - DNA, 201 bp, Homo sapiens
cctggtgggaaattgtaactcagagccaggagctccgtcggcggagagctttgctgtttaatttggattttactggttggtccttttttcactggtacccrtggaccctgccacttactaaccccaagggaatcagccaatatattactgagacttcctctctctcttcttgctttaacttcttttttttttgagacggag

SEQ ID NO: 53151 - DNA, 201 bp, Homo sapiens
accatggggcagtggtttgcatctcctgtctttcacaccagaattacctggggcttgtggcaccccaggcctggtctgccagaatctctggggacagagcrcctcagcgtgctgtgtgtccagttctaaagcctccccaggtgactctgctgtgcctgaggtgtggcagctgcttgccacggcatggcaagtcccgggagc

SEQ ID NO: 53152 - DNA, 201 bp, Homo sapiens
ctcctgacctcaagtgatccccgcccacctcagcctcccaaagtgcggggattacacgtgtgagccactgtgcccaaccgatccattaatttcatatcatrtctatccatccatccatccatccatccatccatccatccatccatccatctatagagagagagataccactatatagagtggtctgtaccttaaaatgct

SEQ ID NO: 53153 - DNA, 201 bp, Homo sapiens
gctggagtgcagtggcatgatctcggctcactgcagcctcctcctcccgggttcaagtggttttcctgcctcagcctcccgagtagctgggattacaggcrcgtgccaccacgcctggctaattttttttttcctagtagagatggggtttcaccatgttgaccaggctggtctcgaactcctgacctcaagtgatccccg

SEQ ID NO: 53154 - DNA, 201 bp, Homo sapiens
cctcaagtgatccccgcccacctcagcctcccaaagtgcggggattacacgtgtgagccactgtgcccaaccgatccattaatttcatatcatgtctatcyatccatccatccatccatccatccatccatccatccatccatctatagagagagagataccactatatagagtggtctgtaccttaaaatgcttaagcgt

SEQ ID NO: 53155 - DNA, 201 bp, Homo sapiens
ccttcgcctttacttgggagagggagaccatgacagaagccagaattctgattttgtggctcctgagcaagggcgatgacctggttttcacagcgtagtcraaccccaaacattgtaaaatgtgtccctggcttctgagcttgcccaaagtaatgtctgactgttggtttttcccttcacaggggacgacttagcttctgt

SEQ ID NO: 53156 - DNA, 201 bp, Homo sapiens
cccagcacattgggaggctgaggtgggaggatcgctggagcccaggagttcgagaccagcctgagcaacatagggagaccccatctctacaaaaaaaaagaaaaaaaaaaaaagaaaaaaaagaagaaaaaaaaaaaaagaaaaaaggtagtcaggcatggtggcacatacctgaggtcccagctactcaagaggctgagg

SEQ ID NO: 53157 - DNA, 201 bp, Homo sapiens
gaggatcgctggagcccaggagttcgagaccagcctgagcaacatagggagaccccatctctacaaaaaaaaagaaaaaaaaaaaaagaaaaaaaagaagaaaaaaaaaaaaagaaaaaaggtagtcaggcatggtggcacatacctgaggtcccagctactcaagaggctgaggcgggaggatcacttgagcccaggagg

SEQ ID NO: 53158 - DNA, 201 bp, Homo sapiens
cactgtgtcacccaggttggagtgcagtactgcgatcatggctcactgcagccttgacctcctgggttcaagcgatcctcctgcctcagcctcccaaagtkctgggattataggcatgagccactgtgcctggcctattttcatcttgattgccgagttttttggcgcctccttaagttttgcatgggggcaagtgtctcc

SEQ ID NO: 53159 - DNA, 201 bp, Homo sapiens
gagcacacacccacagacttttctgctcacaggaggattgtagatgctctgtggagcacctaaatcacagcagggacagtctgtgaggcgccaagagagartcctccccacagcctccatgttactgatcatggcattccagcaattaacagggtcagggggcagtccactagccaccagccctgccctgagaatgcgcaa

SEQ ID NO: 53160 - DNA, 201 bp, Homo sapiens
tacatctcccctaagacatcaaaggacactgggcagtaagcctcagcagacagcagagagagaggccaccctaggcaagggggcatgcctgtctcaagtcrgcttctaagaggctcatgcccaagctccagaggaccagcaatcagatcttcctccaaggatgggaagtctagttaagagacctagtcagataagaaaacc

SEQ ID NO: 53161 - DNA, 201 bp, Homo sapiens
tccttcgcctttacttgggagagggagaccatgacagaagccagaattctgattttgtggctcctgagcaagggcgatgacctggttttcacagcgtagtygaaccccaaacattgtaaaatgtgtccctggcttctgagcttgcccaaagtaatgtctgactgttggtttttcccttcacaggggacgacttagcttctg

SEQ ID NO: 53162 - DNA, 201 bp, Homo sapiens
tcatggtgctcctattagaccaccccgggcaggaaatcccagtctccactcatttattggaatgactcggattcaacaaaaccttttctttacaaccatcrtagacatggcaggacaccaggtgtctcacgggtgttagcaccaggcaggtggagaagggggtgtagagcccagagcagttgcccccagaagcccacagag

SEQ ID NO: 53163 - DNA, 201 bp, Homo sapiens
tggcacagtcaatgcagacagccccagcttcaagttctggctccgcttcttactgtgtgagcttggcaaactctctgcttgctccgtgcctcactttcctsccctgtgaagagggaactgctgaaggatttcaggagctaatgtattggagagtaattggcatgcagtaagcacacaatatatggggctactattagtagt

SEQ ID NO: 53164 - DNA, 201 bp, Homo sapiens
gcctctgtcctgcttctttcctgttgcctggatcatggtgctcctattagaccaccccgggcaggaaatcccagtctccactcatttattggaatgactcsgattcaacaaaaccttttctttacaaccatcgtagacatggcaggacaccaggtgtctcacgggtgttagcaccaggcaggtggagaagggggtgtagag

SEQ ID NO: 53165 - DNA, 201 bp, Homo sapiens
agtaagtccctctgatgctgctcttgaggccccgtgtgtgcctgtggggaggcctctgtcctgcttctttcctgttgcctggatcatggtgctcctattaraccaccccgggcaggaaatcccagtctccactcatttattggaatgactcggattcaacaaaaccttttctttacaaccatcgtagacatggcaggacac

SEQ ID NO: 53166 - DNA, 201 bp, Homo sapiens
tttaggacttgaccttgttgctcaattttgtgttccatggattcaaggaacaaatgaacatgtgaccaaagtcctcctcaactaaggagtcttttttttttttttcttgagtcagagtctcactctgtcgccctggctggagtgcagtggcgtgatcttggctcacagcaacctccacctccccagttcaagagattgtcc

SEQ ID NO: 53167 - DNA, 201 bp, Homo sapiens; identical to SEQ ID NO: 36873

SEQ ID NO: 53168 - DNA, 201 bp, Homo sapiens; identical to SEQ ID NO: 36874

SEQ ID NO: 53169 - DNA, 201 bp, Homo sapiens
agtgggctggggaaggggagggaggtctccctgagccacaggagtttatagttgggaagagaccagaccagacgtgcacacaggaccctgctgggcacccrggaggctcggaaccaggtgccaagcagatagaaagtacagtgtagggtgtgatagtgggatgggagcttcctggagtaggggatctggctctagcataga

SEQ ID NO: 53170 - DNA, 201 bp, Homo sapiens
gcttctgaattctgccttgtactggcctcctggcctttgacttgctcttttctctgcctggatcatccttcaaccaatgttgatggggaatccccgttcaygctcccaaattcaccctctgtttctgtccttccatgaagctcctggggctgcccctcaccctgctgtttgtgtggggggcctggcatcaagaatatacac

SEQ ID NO: 53171 - DNA, 201 bp, Homo sapiens
gaagctgcactacaagagggagaagccactccagcccgtggtatggtaaggagactggcatttcctcttttgtggccgtgagggtggtggctctcctccaycactggtccttcttggttgcaggtcacagtaccctcagcccaagctgctggagcacaggtaggtgtcatggagaggcctgatgggggcgggggaaaagga

SEQ ID NO: 53172 - DNA, 201 bp, Homo sapiens
cctcttctctactaaaaatacaaaaattagctgggcatggtggcttgtgcctgtaatcccagctactcaggaggctgagacaagagaatcgcttgaacccmagagaagaggttgcagtgaatggagattgcgccactgcactccagcccagttgacaagagtgaaactctatctcaaaacaacaaaagtgttcctttgcag

SEQ ID NO: 53173 - DNA, 201 bp, Homo sapiens
tggtcttgaactcctggccttgtgatccacccgcctccgcctcccaaagtgctgggattacaggcgtgagccaccgcgcctggccctttgcaggttttcamatcttctttccgacaacgagagcgacatggttggaaaagcatcagccttgggagcaagcggcactgggttcgaatcactgccctgccacttactctctca

SEQ ID NO: 53174 - DNA, 201 bp, Homo sapiens
ccgccaccatgcccagctaatttttgtatttttagtagagacgaggtttcaccatcttggccaggctggtcttgaactcctggccttgtgatccacccgcstccgcctcccaaagtgctgggattacaggcgtgagccaccgcgcctggccctttgcaggttttcacatcttctttccgacaacgagagcgacatggttgg

SEQ ID NO: 53175 - DNA, 201 bp, Homo sapiens
atggtgcgatctcggctcactgcaacctctgcctcctgggttcaagcaattctcctgcctcagcctcccgagtagctgggattacaggcgcccgccaccaygcccagctaatttttgtatttttagtagagacgaggtttcaccatcttggccaggctggtcttgaactcctggccttgtgatccacccgcctccgcctcc

SEQ ID NO: 53176 - DNA, 201 bp, Homo sapiens
catggagaaacctcttctctactaaaaatacaaaaattagctgggcatggtggcttgtgcctgtaatcccagctactcaggaggctgagacaagagaatcrcttgaacccaagagaagaggttgcagtgaatggagattgcgccactgcactccagcccagttgacaagagtgaaactctatctcaaaacaacaaaagtgt

SEQ ID NO: 53177 - DNA, 201 bp, Homo sapiens
tttttttttttttgagacagggtctcactttgtgggtggcccaggctggagtgcagtagtgtgattacagctcactacagcctccacctcctgggctcaarccatcctcctgcttcagcctcccaagtagccaggaccacaggtgcacaccaccatacccagctaatttttgttgtttttgtagagatgaggtcttgccat

SEQ ID NO: 53178 - DNA, 201 bp, Homo sapiens
cctgtaatcccagctactcaggaggctgagacaagagaatcgcttgaacccaagagaagaggttgcagtgaatggagattgcgccactgcactccagcccrgttgacaagagtgaaactctatctcaaaacaacaaaagtgttcctttgcaggtgttcctgggacctcagagaccaggctcagagcctgacatccctgcga

SEQ ID NO: 53179 - DNA, 201 bp, Homo sapiens
aaaacaacaaaagtgttcctttgcaggtgttcctgggacctcagagaccaggctcagagcctgacatccctgcgaggggacagcctcatccgcccaggccrgtgggggtctctacaagtgcccaggctcaggtgcagcccccagcaatgcatcgccggagactggccctgggtctggggttctgcctgttggcgggcacaa

SEQ ID NO: 53180 - DNA, 201 bp, Homo sapiens
gggggtctctacaagtgcccaggctcaggtgcagcccccagcaatgcatcgccggagactggccctgggtctggggttctgcctgttggcgggcacaagcytcagtgtcctgtggtgagtctgccccacggagctccccctgtctctatccccacccaggactccccctgtctctatccccacccaggactccccctgtct

SEQ ID NO: 53181 - DNA, 201 bp, Homo sapiens
tgttccatggattcaaggaacaaatgaacatgtgaccaaagtcctcctcaactaaggagtcttttttttttttttcttgagtcagagtctcactctgtcgycctggctggagtgcagtggcgtgatcttggctcacagcaacctccacctccccagttcaagagattgtcctgtctcagcctcccaagtagctgggattac

SEQ ID NO: 53182 - DNA, 201 bp, Homo sapiens
ttttttttcttgagtcagagtctcactctgtcgccctggctggagtgcagtggcgtgatcttggctcacagcaacctccacctccccagttcaagagattstcctgtctcagcctcccaagtagctgggattacaggcacccgccaccatacctggctaatttttgtatttttatttgagatggcgtttcaccatgttggc

SEQ ID NO: 53183 - DNA, 201 bp, Homo sapiens; identical to SEQ ID NO: 36782

SEQ ID NO: 53184 - DNA, 201 bp, Homo sapiens
ttttcttgagtcagagtctcactctgtcgccctggctggagtgcagtggcgtgatcttggctcacagcaacctccacctccccagttcaagagattgtccygtctcagcctcccaagtagctgggattacaggcacccgccaccatacctggctaatttttgtatttttatttgagatggcgtttcaccatgttggccagg

SEQ ID NO: 53185 - DNA, 201 bp, Homo sapiens
attgttcataacaacgtggtcttgccctttttaatgaccctcatttattaggggcttggcacatatgaataatgccaggcttctccttggtgtgcgttaaytcctggtactcccaaccctgctgggaggtggctatcattatccccactttccatatgaggaaagggaggcccagagatggggacgaagctgccccgggtc

SEQ ID NO: 53186 - DNA, 201 bp, Homo sapiens; identical to SEQ ID NO: 36785

SEQ ID NO: 53187 - DNA, 201 bp, Homo sapiens
atctgcaccgtgcttgcactcaggaggtgctcaggccattgttcataacaacgtggtcttgccctttttaatgaccctcatttattaggggcttggcacayatgaataatgccaggcttctccttggtgtgcgttaactcctggtactcccaaccctgctgggaggtggctatcattatccccactttccatatgaggaaa

SEQ ID NO: 53188 - DNA, 201 bp, Homo sapiens; identical to SEQ ID NO: 36754

SEQ ID NO: 53189 - DNA, 201 bp, Homo sapiens; identical to SEQ ID NO: 36756

SEQ ID NO: 53190 - DNA, 201 bp, Homo sapiens; identical to SEQ ID NO: 36843

SEQ ID NO: 53191 - DNA, 201 bp, Homo sapiens; identical to SEQ ID NO: 36844

SEQ ID NO: 53192 - DNA, 201 bp, Homo sapiens
atgtattgaaactcacaggggaccaggcaaggcagctcatgcctgtaatcccagcactttgggaagccaagacaggcagatcacttgagctcaggagttcragaccagcctgggcaacatggtgaaacccagtctgtacaaaaaatattaatacaaaaacagctgggtgtggtggtgggcacctgtggtctcagctcctca

SEQ ID NO: 53193 - DNA, 201 bp, Homo sapiens; identical to SEQ ID NO: 36845

SEQ ID NO: 53194 - DNA, 201 bp, Homo sapiens
gatgtattgaaactcacaggggaccaggcaaggcagctcatgcctgtaatcccagcactttgggaagccaagacaggcagatcacttgagctcaggagttyaagaccagcctgggcaacatggtgaaacccagtctgtacaaaaaatattaatacaaaaacagctgggtgtggtggtgggcacctgtggtctcagctcctc

SEQ ID NO: 53195 - DNA, 201 bp, Homo sapiens
atacatgatgtattgaaactcacaggggaccaggcaaggcagctcatgcctgtaatcccagcactttgggaagccaagacaggcagatcacttgagctcargagttcaagaccagcctgggcaacatggtgaaacccagtctgtacaaaaaatattaatacaaaaacagctgggtgtggtggtgggcacctgtggtctcag

SEQ ID NO: 53196 - DNA, 201 bp, Homo sapiens
ggttatgaaaacaaaaatgaacctaccttgctgattgggagagggaaaatgctatcctctttggtataaattttatttattattattattattattattattattattatattgagacagagtctcgctttgccacccaggctggagtaccgtggcgtgatctcagctcattgcaacctccacctcccgggttcaagcaat

SEQ ID NO: 53197 - DNA, 201 bp, Homo sapiens
agagaatcgcttgaacccaagagaagaggttgcagtgaatggagattgcgccactgcactccagcccagttgacaagagtgaaactctatctcaaaacaayaaaagtgttcctttgcaggtgttcctgggacctcagagaccaggctcagagcctgacatccctgcgaggggacagcctcatccgcccaggccagtggggg

SEQ ID NO: 53198 - DNA, 201 bp, Homo sapiens
gtgaccctggacagatcacttctgtaggggtccccagctcctctgtagagtcgggtggggctgtgggggaaggtcagagggagcctgcatggaccctgggwgcccacccgcaggggcctctgactcctccttcttcctgtgctgagtgtctctgtccccagacccatgatgatggctctttcttgcctctgccaccagcaa

SEQ ID NO: 53199 - DNA, 201 bp, Homo sapiens
actctatctcaaaacaacaaaagtgttcctttgcaggtgttcctgggacctcagagaccaggctcagagcctgacatccctgcgaggggacagcctcatcygcccaggccagtgggggtctctacaagtgcccaggctcaggtgcagcccccagcaatgcatcgccggagactggccctgggtctggggttctgcctgttg

SEQ ID NO: 53200 - DNA, 201 bp, Homo sapiens
gggagacaggagagtatttaagttcacttcatctgccggttcctgattcctaagttcatgtttctgataaatgcaatagtatttatgtaatttaagggctrtgacaagcgtgaagtgaaattcccatttcggtcttccagcatccttgcagccccctgcatggtctgaccgtccacatgttgcacagctgtgagccttgct

SEQ ID NO: 53201 - DNA, 201 bp, Homo sapiens
acctggcctcctaatgcactgtgggagacctgcactcccaatgacgtgcatgaggtgcgttttcagcctctggtgcagagtggatcaacagattttttttyttttttttattcacagggtgtatcttgagaactggctgccagtctcctatgtcccctattatctcccctgcccagagatcttgtaagtatgggtgtggct

SEQ ID NO: 53202 - DNA, 201 bp, Homo sapiens
cccagggtcccgggtcccgaccacggactggggccggcggcgctcggggctgggctctgcgttcgcgggaggcgggggcgagacggggcttggaggcccgrgtggggaaactgaggccccagaggaagagagagggagagggcttgccggacactcccgagtggcagcggcctaatccccaggaccccggctctccgctca

SEQ ID NO: 53203 - DNA, 201 bp, Homo sapiens
actctctcagtgaccctggacagatcacttctgtaggggtccccagctcctctgtagagtcgggtggggctgtgggggaaggtcagagggagcctgcatgkaccctgggtgcccacccgcaggggcctctgactcctccttcttcctgtgctgagtgtctctgtccccagacccatgatgatggctctttcttgcctctgc

SEQ ID NO: 53204 - DNA, 201 bp, Homo sapiens
aagctgcactacaagagggagaagccactccagcccgtggtatggtaaggagactggcatttcctcttttgtggccgtgagggtggtggctctcctccatyactggtccttcttggttgcaggtcacagtaccctcagcccaagctgctggagcacaggtaggtgtcatggagaggcctgatgggggcgggggaaaaggac

SEQ ID NO: 53205 - DNA, 201 bp, Homo sapiens
aaaagttcacctggcctaggagcataagaatctctaccaggaacatgcttacaacagccgtaagaggctggtactagcattttgggaattggacaaatgargacccagagggccagagcagagtgacatcttgagatggggagctggtaagtggaccccagcctggctgaccccagcacacagtggggaccctggcaggct

SEQ ID NO: 53206 - DNA, 201 bp, Homo sapiens
aggttatgaaaacaaaaatgaacctaccttgctgattgggagagggaaaatgctatcctctttggtataaattttatttattattattattattattattattattattatattgagacagagtctcgctttgccacccaggctggagtaccgtggcgtgatctcagctcattgcaacctccacctcccgggttcaagcaa

SEQ ID NO: 53207 - DNA, 201 bp, Homo sapiens
aagatcataagaattcttagaacgtcgctgggcacttagaaattgctcagtaaaagttcacctggcctaggagcataagaatctctaccaggaacatgctyacaacagccgtaagaggctggtactagcattttgggaattggacaaatgaggacccagagggccagagcagagtgacatcttgagatggggagctggtaa

SEQ ID NO: 53208 - DNA, 201 bp, Homo sapiens
gaggttatgaaaacaaaaatgaacctaccttgctgattgggagagggaaaatgctatcctctttggtataaattttatttattattattattattattattattattattatattgagacagagtctcgctttgccacccaggctggagtaccgtggcgtgatctcagctcattgcaacctccacctcccgggttcaagca

SEQ ID NO: 53209 - DNA, 201 bp, Homo sapiens; identical to SEQ ID NO: 36815

SEQ ID NO: 53210 - DNA, 201 bp, Homo sapiens
ggacttgaccttgttgctcaattttgtgttccatggattcaaggaacaaatgaacatgtgaccaaagtcctcctcaactaaggagtcttttttttttttttcttgagtcagagtctcactctgtcgccctggctggagtgcagtggcgtgatcttggctcacagcaacctccacctccccagttcaagagattgtcctgtc

SEQ ID NO: 53211 - DNA, 201 bp, Homo sapiens
aggacttgaccttgttgctcaattttgtgttccatggattcaaggaacaaatgaacatgtgaccaaagtcctcctcaactaaggagtcttttttttttttttcttgagtcagagtctcactctgtcgccctggctggagtgcagtggcgtgatcttggctcacagcaacctccacctccccagttcaagagattgtcctgt

SEQ ID NO: 53212 - DNA, 201 bp, Homo sapiens
taggacttgaccttgttgctcaattttgtgttccatggattcaaggaacaaatgaacatgtgaccaaagtcctcctcaactaaggagtcttttttttttttttcttgagtcagagtctcactctgtcgccctggctggagtgcagtggcgtgatcttggctcacagcaacctccacctccccagttcaagagattgtcctg

SEQ ID NO: 53213 - DNA, 201 bp, Homo sapiens
ttaggacttgaccttgttgctcaattttgtgttccatggattcaaggaacaaatgaacatgtgaccaaagtcctcctcaactaaggagtcttttttttttttttcttgagtcagagtctcactctgtcgccctggctggagtgcagtggcgtgatcttggctcacagcaacctccacctccccagttcaagagattgtcct

SEQ ID NO: 53214 - DNA, 201 bp, Homo sapiens
cgcctccgggactctagcagcggtctccgcgaccccctaggatccagccactgtacccgtgctccccaaacccaggctccagccgtcgtctccgcgctccyggggatccagctgtcgcgccagtacccgcgaggacagcggcaccgcccacaccccgcgcgctcagagcccggccgggcctcggcgtggagatgaacgcgc

SEQ ID NO: 53215 - DNA, 201 bp, Homo sapiens
cagactttgaacttaggcagtctgaatttcaaagccctcacttagcacgctgcagggtagcccgggaacttgctcagagagacaagactgctcacggggaygctggacccaggacacccatcaccaaattaaagagcaccatgtgtttgggctaaatcctgatgccagggatgccacagcagcagtgatgtggagtggtga

SEQ ID NO: 53216 - DNA, 201 bp, Homo sapiens
agagcagactttgaacttaggcagtctgaatttcaaagccctcacttagcacgctgcagggtagcccgggaacttgctcagagagacaagactgctcacgrggacgctggacccaggacacccatcaccaaattaaagagcaccatgtgtttgggctaaatcctgatgccagggatgccacagcagcagtgatgtggagtg

SEQ ID NO: 53217 - DNA, 201 bp, Homo sapiens
agttggggaaactgagacataggttaaactgacttgtcccaggccacacaactggtgggttgcagagcagactttgaacttaggcagtctgaatttcaaarccctcacttagcacgctgcagggtagcccgggaacttgctcagagagacaagactgctcacggggacgctggacccaggacacccatcaccaaattaaag

SEQ ID NO: 53218 - DNA, 201 bp, Homo sapiens
agtccagaggagaccaggcacaggcttccacgggtcccctccctgtgagttccacagaacacactaattcctccagcatcaaatggtgacaaaggtgtggratgttgtctatcaggggagctcattagagagcacccacagtttttattgggggctggtagacatagaccctgtctacttgtacccaccttccagactccc

SEQ ID NO: 53219 - DNA, 201 bp, Homo sapiens
atctcctggttatgcggtagcagaacacagggtagcggggcactgctgggatatgtgcatatatgtgtgtgtttcatctcaataaaaattaaacggcttcyttatggcctcagcacccccatgggtggattcaaggagcatattagaattgaaatattccagaagttaaaaactgttgccggtaatttcatttaattagag

SEQ ID NO: 53220 - DNA, 201 bp, Homo sapiens
aatcacacatgtagccaagttacccctgaaaatccttatgccatcccctggagctggttatagttttatagcccttttcaggagtgtccttctctgtgccrtggtatgagacctgtcccgtgaggctgaagacaaagtacagagggaagaacagatgtagtgcttagggagtcagacgtggctgctcttaaatcactgtca

SEQ ID NO: 53221 - DNA, 201 bp, Homo sapiens
cacttaccagctgtgtgccttgcctctctgagcctcagtttcttcctctgtaaaaacctaatagttgttgaatgtctactgcatgctaggcatgggctctyggggacaacaggtgaacaggagagatgtggccctgcctcctggggcttgcagtctgggaagctgggggagaaaggttaaaaaaaaaaagtaggtaaatta

SEQ ID NO: 53222 - DNA, 201 bp, Homo sapiens
cttaggcctctggtgcattttgggatgggagttgggggaccctgttggcttgacagaagtacagaagcccaacgaacaaagagctggaaatagcacctttrtgtaacagccctcccattgtaatgaggggaaggaggcctagaaacccggaattgggctgaggggaggagaagggctaggagggagaagctgcattttgct

SEQ ID NO: 53223 - DNA, 201 bp, Homo sapiens
gggagacccctgaggtgacaggagacccctggggaagcagggtggtggctgccgtgacctggcctgagccttgatcctaaggagggcagatggagcctaaytgagaccccggggcgcgaacagtcaccccccgactgaagcctcaggtgaacgtggccactgtggcgtgaagagcatgagcaaagtgtctgagtagtcccg

SEQ ID NO: 53224 - DNA, 201 bp, Homo sapiens
caggagggttgcttgagcccaggagtttgagatcagcctaggcaacgtagtgagaccctgtctctacaagtatttttaaaaaaattagccgggtatgatgkcatgtgtctgtggtcccagctgcttgggaggctgagatgggaggatcacctgagcccaggagattcaggcttcagtgagctgtgattgccccattgtact

SEQ ID NO: 53225 - DNA, 201 bp, Homo sapiens
tgaagcaacttggccggggccacatacctagcaagttggcagtctggctccggagcctgaacatgcattaaccaccatgtggtttcctcccaaatatgcaragctgcctgtgacaagggaccagggtgggccttgaacccaggtgccctcagatctgctcaagccttggagctggcacagcactggggcaggatgggtcag

SEQ ID NO: 53226 - DNA, 201 bp, Homo sapiens
gaggctgaggcaggagggttgcttgagcccaggagtttgagatcagcctaggcaacgtagtgagaccctgtctctacaagtatttttaaaaaaattagccrggtatgatgtcatgtgtctgtggtcccagctgcttgggaggctgagatgggaggatcacctgagcccaggagattcaggcttcagtgagctgtgattgcc

SEQ ID NO: 53227 - DNA, 201 bp, Homo sapiens
ggatgagtaccgtggcggcagcgtctctgtggaggccctcgtcatggccctgttcaagctgctcaacacccacgccaaggtgacccgtgccctgcctcccwactggcttcagcatttccagggctctgcatcctgccctgcccccgctcctttgctgagaacctacaaggggtcaggcctgaactgaacactgggcagaga

SEQ ID NO: 53228 - DNA, 201 bp, Homo sapiens
cgcactctacacaaatggacccattcatccctcacagcagcccaaggaagtgagcgtgactggtttccccattttctagatgaggaaactgaggcacagasaggtgaagcaacttggccggggccacatacctagcaagttggcagtctggctccggagcctgaacatgcattaaccaccatgtggtttcctcccaaatat

SEQ ID NO: 53229 - DNA, 201 bp, Homo sapiens
gaggagacggcttccgagctgagacctagagagggagaaggagctgccatgtgccattcggggactgaaaatcccaagcagcaaggacagcatgtgcaaargccctgaagtaagactgaggccagtgtctgcaaggattgagcagatgggagggtgggggttaggtaaggtgcctctgggagtctcaataactcatataag

SEQ ID NO: 53230 - DNA, 201 bp, Homo sapiens
gggcccagccggctcccaggtgaccctgagcagcctggggaaccagacacgagtgctgctggaggagcaggctcggcacctgctgaacgagcaggaacacrccaccatggcctactacctggatgagtaccgtggcggcagcgtctctgtggaggccctcgtcatggccctgttcaagctgctcaacacccacgccaaggt

SEQ ID NO: 53231 - DNA, 201 bp, Homo sapiens
gcagtagggggatgtccaccattccgttctcagtgtccttcccctgaagattcccaaagagggagcacctcacgggctggcagggatgtctagggactttrattgacaagaccaccaagactgtagccagtgggagaggggtggttgcccaaagcactgtggggtgttctaacttgcagaagggggcagggacaccaatag

SEQ ID NO: 53232 - DNA, 201 bp, Homo sapiens
tgatcctggatgacctccttgacaggctggcccagaggagaattgggatctgggctgtgaagtccctagtgtgaatcctgcaaacagcccaggtgactgtrttgtgtggtgatcttggcaggttggggaccagattctagaagtgaatgggcggagctttctcaacatcctacacgacgaggctgtcaggctgcttaagtc

SEQ ID NO: 53233 - DNA, 201 bp, Homo sapiens
tgccagccacgaccctacgcactctacacaaatggacccattcatccctcacagcagcccaaggaagtgagcgtgactggtttccccattttctagatgargaaactgaggcacagagaggtgaagcaacttggccggggccacatacctagcaagttggcagtctggctccggagcctgaacatgcattaaccaccatgt

SEQ ID NO: 53234 - DNA, 201 bp, Homo sapiens
gattgctgctccacagggaatcttgtgcagtgtgaatcttgggcataagtaacagaaaccagccctggccattttacagagcagggatgtactggaaggayaggggcagtcccagaattgaagccgagaatctcagggtgcagcctgcagtagggggatgtccaccattccgttctcagtgtccttcccctgaagattccc

SEQ ID NO: 53235 - DNA, 201 bp, Homo sapiens
gtttacattttaaggtaatataagaatgcatggttgaggtaaaaacctcaacaaagtacaagtgtaggaggaaaattacggatgtccaccttcatggcttkcctcatcctaccccagcttcacgcccaccttggccctgagatgactgttgtttctagataaggggacccttggaatgtcatcgtagacccacccctcaaa

SEQ ID NO: 53236 - DNA, 201 bp, Homo sapiens
tcccagcctgcacagcagcccacagtcatcatctcccctgaggaaggccacacctgctttccaggtcgcacctgctggcttggctgagatgccactgtgasgataacgacagccactgtttcctagtgcttccctgtgccagccacgaccctacgcactctacacaaatggacccattcatccctcacagcagcccaagga

SEQ ID NO: 53237 - DNA, 201 bp, Homo sapiens
ccagaggagaccaggcacaggcttccacgggtcccctccctgtgagttccacagaacacactaattcctccagcatcaaatggtgacaaaggtgtgggatrttgtctatcaggggagctcattagagagcacccacagtttttattgggggctggtagacatagaccctgtctacttgtacccaccttccagactcccagg

SEQ ID NO: 53238 - DNA, 201 bp, Homo sapiens
ggattacaggcatgagccactgtacctgccagaaatatttttttaattacaaaataaagctgcctccttgtaagaatctaagccatatgtactgctttaayggaaaactaattttctcatttattgctgtttcttttagtagattaaagttttgtttacattttaaggtaatataagaatgcatggttgaggtaaaaacct

SEQ ID NO: 53239 - DNA, 201 bp, Homo sapiens
aagtaccatcacattgaggatagggcttcggcgtatggatctggagggaaatacattcagtccctaacacaggctatgtttattgttaatcctagtgcttrgtgagtgtctccttgggtcaatgtcttcatctcagctgcaagcgtcttgtggtgaagcaatatggcagacctcagcttccaccccaggctgtagagtttt

SEQ ID NO: 53240 - DNA, 201 bp, Homo sapiens
catggaagagggagcaggaggcagagacgagagggagaggaaagagaggtcaggaagacaggggccatggaggatgtggtggcctcagaggcttctgctgrcgtctcctgtgccctgaaccactttccactttgctctgggggaagcccacttggtctcaggctttctccatcctgcctcttcaccttaacagggatttga

SEQ ID NO: 53241 - DNA, 201 bp, Homo sapiens
tgagcacctactatgtgccagaccctgttttaagtgttggtgatacactggggaatgtattaactcatttgtcaaccaggtactgatatgatctctatttyccagaggaggtaacaggcacagagaagtgaagtcaattacccaaggtcatacagcaagtaagtgacagagtgtagaattagtcagagactcctgggtctg

SEQ ID NO: 53242 - DNA, 201 bp, Homo sapiens
gaaactgaggtgcagaggggaaggagacccagggctggcctcctgcgtcctgggctgtgcctgttgtactcctgaaccctatgtttcccttcccatcttgsggcttcagggtccccttctgtaaaatactgggggtgggcagcctgtgggagactcagcgacttggcccaggccctctccggcgctggctctctgtggtgt

SEQ ID NO: 53243 - DNA, 201 bp, Homo sapiens
gtaggcccagatggcatagtgcttccccctgcaggtagatacaggaactacaaaagggataaggcatgccccaggggacactggcaaggaaatgtgattgbgaataaagactcactgcctatggcttcaggaattccatttttctctagtttagggaattagatgcatgaatgccccaagatggcacatacaaggatgttc

SEQ ID NO: 53244 - DNA, 201 bp, Homo sapiens
ttaaatgaatctgtcttctacataaggaaagtatcgggcaaggtggtgaaagtagaagcagggaggccccttaggaggctgtggtaatggtccaggtgagrgacaaggacagctgggatccgagtggagttagtgaagatggagggtccttttggaagggaaagtaaaatgcattgggcttgatgatagatccagtgggtt

SEQ ID NO: 53245 - DNA, 201 bp, Homo sapiens
ttgggctcagcagcactgggtttgaagcttgtttttgaaacttcgtgactgtgtgaccttgggcaagccacttaaccttggatgagtcacttaagcttccscatccatgattggaggatggtcatgccagccatgtgaggctgtttcgaggattaataatcaaggcttataagcacagagcacagtgcctggacatagtaa

SEQ ID NO: 53246 - DNA, 201 bp, Homo sapiens
taagctcttttttttttttcaaattacaaagctacttttaatactttggggtgagcgccacaggaataaaaaacactgggaaggggtaaccttgtcacccygggagtgacccaggaggagagaggccacctgatgggggaaggaagcacaaaagggacccgctgcagactcagggcaaagggaagccatcagggctgggac

SEQ ID NO: 53247 - DNA, 201 bp, Homo sapiens
ctaggcagaggagcttggaagctactggggcattttaaaggagggtgtgacgagatcaggtttgcagtttaaatgaatctgtcttctacataaggaaagtrtcgggcaaggtggtgaaagtagaagcagggaggccccttaggaggctgtggtaatggtccaggtgagggacaaggacagctgggatccgagtggagttag

SEQ ID NO: 53248 - DNA, 201 bp, Homo sapiens
tattatatttcttttccatttttatcaatctgttagacaaaaaggtatcctgttttaatttacataacttaaatagtgaagttaagctcttttttttttttcaaattacaaagctacttttaatactttggggtgagcgccacaggaataaaaaacactgggaaggggtaaccttgtcaccctgggagtgacccaggagga

SEQ ID NO: 53249 - DNA, 201 bp, Homo sapiens
ttcttcccaaagctgccattctgagcatcgttatctagcctattcgttacaccaagcgatgtatgatgactgtgttcccaccttgataaatgtttctacastgtgattttttaatgattgcataatatatcgtagtgaagaggtacatgatttatttaactaatttcttcttgttagacagtttgttttttaatattatcc

SEQ ID NO: 53250 - DNA, 201 bp, Homo sapiens
gatgctgtccccagagacacccgccaagatcccaacgcttatcagctgccgagatgcaggggagaagttttccactcaggtgttgcattattcagagcagygtggccaagagcagttagagtggggacagaattccagctgggcctggcaccactcagctgctcggcctcccctcttccaggcgtgatggggtctgactcc

SEQ ID NO: 53251 - DNA, 201 bp, Homo sapiens
ctgttcatttctggggttgggacagtgtagtatgggcgttggggtgacccagacctgggttagaaaccttaccttctgtagaacggtcagatgaccttggrcaagtctcttccctctctgaacttcaggtgtaatcgatgtgacaagggacagtcctagtgcctgcctcacagggtcattgggaggatcaaatgagataat

SEQ ID NO: 53252 - DNA, 201 bp, Homo sapiens
ttaaggcttttccctgtgcatttttatttttccccatgaatttttgctgacttttctaacaaaagcttgttgatgtttttgttgggataatgttaaatacrtaagtgagctgagagagagccgatgtctggataatgctgaaccctttccaagaaaaggggatattttatttgttgagtaattttgagtgttttagaagtg

SEQ ID NO: 53253 - DNA, 201 bp, Homo sapiens
atgaaaggaaacgtggcctttcagttagaggttaatggaaatgaagatgtaacagttcccccagccaagttctcgggtgcctgcattccctcccaggagcrctggtttccagccttatcctgagggctctgcttgccttaaccttctagagattctgggtcactctctctttccactgacgtccttttcttaagaccacag

SEQ ID NO: 53254 - DNA, 201 bp, Homo sapiens
gctttatacttgttcattcagtaaatatttattgagcacctactatgtgccagaccctgttttaagtgttggtgatacactggggaatgtattaactcatwtgtcaaccaggtactgatatgatctctattttccagaggaggtaacaggcacagagaagtgaagtcaattacccaaggtcatacagcaagtaagtgacag

SEQ ID NO: 53255 - DNA, 201 bp, Homo sapiens
caaccggggagctcagagacataaaaagggagaaagagaattgcagatattgctgggggcatggtgaaagcatgtggcattgagatgctgctgactttagrtatttggagaaggacaatcctgggctaggactccctttttactcccaacgaaagtgaggcacaaaagctattgtgggttttgtggggccatgtggcacgg

SEQ ID NO: 53256 - DNA, 201 bp, Homo sapiens
acgagaccaagtggatcgccagttcccggatcagggagaccatggcgaactcggcagggtctggccactctgctcgctccaatctccagaccccagggccwtttctgaaagccagtgatagctgcctcccatccctccaccgccctggctctcctctcagcctgcagtccccacaccagggccctccattggcaggacatg

SEQ ID NO: 53257 - DNA, 201 bp, Homo sapiens
cgggccccaggcacagaatgggaggtcccgggaccagggctcagcttggcaagtgaccacaaagggaggtagtgagctccctataactggagggatttggrcgtcctggaggagcactggattaggaatctggaggcccagtttcagctctgcctttgcactgacactaggggctgaggctgagattggtcttgggaatct

SEQ ID NO: 53258 - DNA, 201 bp, Homo sapiens
ggctgtctgagtttctaatctcagagtcctgtgatggggaaactgaggtgcagaggggaaggagacccagggctggcctcctgcgtcctgggctgtgcctsttgtactcctgaaccctatgtttcccttcccatcttggggcttcagggtccccttctgtaaaatactgggggtgggcagcctgtgggagactcagcgact

SEQ ID NO: 53259 - DNA, 201 bp, Homo sapiens
aggtccaacctgctcattgccagagggcaaaaccaagacctagcaaggggagaagtaaccctaggacacccaccaagctaatggcacaacagggacctgcygggtctctgtctcacaggctcaagctctgctgcctgaggctactcactctgtaggctgctctggtgagagaagtaaaatgagtggtctggtgcacgtaac

SEQ ID NO: 53260 - DNA, 201 bp, Homo sapiens
actgctgggatgggagaaactgaggacagttttccaggcccagaagtcaggtgcccataggtgcaaccctcagcctgcctggagttatccctgggtgtccyagagcccctgatctctctgctttaatgacctgtgaccaccatgagagcaaatacagtctttccttctaaatacagccctgaatcagaaagacatagaagt

SEQ ID NO: 53261 - DNA, 201 bp, Homo sapiens
ctgtggaacctcagagcccccaggctctggatctggttcagtgacctggtagcaacaccagccagcatagctcaagtgctcactgctgggatgggagaaamtgaggacagttttccaggcccagaagtcaggtgcccataggtgcaaccctcagcctgcctggagttatccctgggtgtcccagagcccctgatctctctg

SEQ ID NO: 53262 - DNA, 201 bp, Homo sapiens
ttgggtcttgtctcacgctctttacagggagaccagccagggctgccgaagttctcaggggccctggcttctcaaccggggagctcagagacataaaaagrgagaaagagaattgcagatattgctgggggcatggtgaaagcatgtggcattgagatgctgctgactttagatatttggagaaggacaatcctgggctag

SEQ ID NO: 53263 - DNA, 201 bp, Homo sapiens
ttcagggttagggtaggaatttggggggggacacaaacattcagcccataacatgctggttgtcattttcttttgactttgcttatagagtttttttaatrcaaaagttttatacattttaaatctaatttaattattaatcctttcttttattgaatttgagtcaggttacatgtttccttatgcccagggtatagatga

SEQ ID NO: 53264 - DNA, 201 bp, Homo sapiens
caaagagcaaggacacagccgtggcctcggaggggcagccctctggccttcaagtcctgtcaaaatctcctgctgctgctgatagtgccgagttggggtgygtatcctgccataactgagatgctccaattgtccttctggtgttttcttaaaccctgtggaacctcagagcccccaggctctggatctggttcagtgacc

SEQ ID NO: 53265 - DNA, 201 bp, Homo sapiens
cttgttcatgtcttttattatccttttgctctcaggattttggatcttttttcctctaaaacttaagaattccttaaatattagagctaactggccctttrtctgtggtatatattgcaagtgttctctccatgtgtcttagtcagcttaggctgactaaaataccaaagacaaggtggcttaaacaataggactctgttt

SEQ ID NO: 53266 - DNA, 201 bp, Homo sapiens
gaggggtgtggttgatggagagtcactagcgtgcagatggatgtgttggatgtgacttaccacctgcaggcagcttcctacaaagagcaaggacacagccrtggcctcggaggggcagccctctggccttcaagtcctgtcaaaatctcctgctgctgctgatagtgccgagttggggtgcgtatcctgccataactgaga

SEQ ID NO: 53267 - DNA, 201 bp, Homo sapiens
cttttgggctcaagcaaacctcccaactcagcctcctgagtagctaggactgcaggtgcacaccattatgcctggataattttaaatttaaaaaaaaaaawtttttttgtggcgtctcaccatgttgtccaggctactcttgaactcctggcctcaagtaatcctcctgcctctgtcccccaaagtgctggggttgcaggc

SEQ ID NO: 53268 - DNA, 201 bp, Homo sapiens
ggaccagtgacacccctcctctacctctcaccctagttttctttctttcagaatgaggggctggattaaatgtacaccatttcccagagtgtgattcctgyaaaaacaaaactgatttgtgtttttacctctttgtcttccctttgattgtaaaaatcaaatgctccttccctgctgcagcctgtagagctgggctgcatg

SEQ ID NO: 53269 - DNA, 201 bp, Homo sapiens
tgtggctgggtgcagtggctcacggctgtaatcccagcactttgggagaccaaggtgggcggatcacttgaggtcaggaattcaagaccagcctggccaayatggtaaaaccctgtctctactaaaaatacaaaaattagctaggcatgttggcgcatgcctgtaatcccagctggctgggaggctgaggcaggagaatcg

SEQ ID NO: 53270 - DNA, 201 bp, Homo sapiens
ggaggtcgtgggaaaggagctgagtgttgaaggcagcgcagatacgaggaaatgtggattaaagaaggatgtttcttaaaaagaagaaagttgggggacaygtgtttgtgtccatatagattcgaggtttagagaatttctgggacctctgtttgggagaaggaactggcagcctcaggaagggaattagcatgcatttag

SEQ ID NO: 53271 - DNA, 201 bp, Homo sapiens
aagccactgcctcgcccaccacctctggcccaaggcaacgacctcccactaggccagccaaggaagctggggagagaggacctccagccaccttcctccaygccttcctgctcgggcactgtcttctcggctccacagaaccgcagcccgccagcgggcaccgcacccaccccagggacctcctctgcacaggacttgccc

SEQ ID NO: 53272 - DNA, 201 bp, Homo sapiens
cccttccttccatcttatcttccagctggtcactgtttgtgtctgtgaaggctgtggacttgagcttgagaacttgattcttgcaggtctacagagcagcytgaagcaggtggtagactggattctggtccagctttgccccaactgcccaggaagccttggaccagtgacacccctcctctacctctcaccctagttttc

SEQ ID NO: 53273 - DNA, 201 bp, Homo sapiens
caagccaagattgcatcgctgcactgagcctgggcaacactgtgagactccatctcaaaaaaaaaatttcttcttaacttttaaaaataatagatttgtgkctgggtgcagtggctcacggctgtaatcccagcactttgggagaccaaggtgggcggatcacttgaggtcaggaattcaagaccagcctggccaatatgg

SEQ ID NO: 53274 - DNA, 201 bp, Homo sapiens
aggctgggaagctgttgcagttagtggtccctgtaagaggtaattaacacagatgaaaatggtacagatggaaggagcttggaagacagagtgctaattarggttttactttctcatgacattaaaatatgctactggggcagagtccgcatcaccaatttctgtcctccctcaaagcagggctaaatgggaagggacttt

SEQ ID NO: 53275 - DNA, 201 bp, Homo sapiens
gactcctgagcgtctggattcagcagatggagtctggcagggctgggctcagagggctgggctccgacccgtctgccatttgctccacttcaggcctcccygacagggctggatattcatccctcgtctacccctcaccctcccaaccctccacctccacctgccatgtccccaggatgcagttagtagcagggaatgagg

SEQ ID NO: 53276 - DNA, 201 bp, Homo sapiens
ttaacatttcttgttaagtttattccttggtagttttttctcttctgttgctactataaatgaggtttccccttccttccatcttatcttccagctggtcwctgtttgtgtctgtgaaggctgtggacttgagcttgagaacttgattcttgcaggtctacagagcagcttgaagcaggtggtagactggattctggtcca

SEQ ID NO: 53277 - DNA, 201 bp, Homo sapiens
cattttaatgtttgtttatatttctcttgactgtgaatggtgccatgtattatctgcaagggtttgtgtatgtaagttttgataaatcttaattttttagrtcgggcaggatggtttacacctgtaatctcagcactttttgggaggccgaagtgggcggatcacctgaggtcaggagtttgagaccagcctagctaacat

SEQ ID NO: 53278 - DNA, 201 bp, Homo sapiens
tgagaagagtgtagataataaaataatcatttgcataagtaagtatgttgagatatgtactttcagggacagagcatcacgtgcaaaggcctgaagtggaraagagcttggagtacttgatcctataagacagctcaggtggcagggcaggagatgaggctggccaggcatcaggaccaggcgcacaggcccaagatgcac

SEQ ID NO: 53279 - DNA, 201 bp, Homo sapiens
agttttaaatttttttctcaatctgatagatgagaaatggtaccttgatgtagctttattttgcaatttttcccctcttttttgagacaggatctcaatcygtctcactcacccagcacccaatctgtctcactcactcacccaggctggagtgctgtggcacagtctcgactcactgcaaccttcgcctcccaggctaaa

SEQ ID NO: 53280 - DNA, 201 bp, Homo sapiens
caagatctgggggctagatgggcttattgctactgaggtgtcattactaacagggcttttagtggacaaagctaggaaatatacatgcctgcatttgtacrtacagtcaccccttaaacaatgcagggcttagaggtgccaaccttcccacacagttgaaattcacatataacttttgattctccaaaaacttaactattg

SEQ ID NO: 53281 - DNA, 201 bp, Homo sapiens
ctaatattcttccattgtttggtgctggccgcaacagtactgctttcttcttggtaggagttggaggattcccatgtatttggaagagcaggtcaatttcyttctttatggctatgaagcacagaagtggaaacacactctagattctgatgtctgatactcctcacaaaggactggacctagaagtttttttttgttttg

SEQ ID NO: 53282 - DNA, 201 bp, Homo sapiens
ttgtttttgctggcattgaatagggtttcccccatctttattgatttaattttactttctaagtactaaaacatcaaaactatacaaaaaggtacactccragtacgactccccatgtcccttctacccattctcacctgctccttaaaggcaaccaaataagtttttggtttattcctctttgtttctttttgtaaaaat

SEQ ID NO: 53283 - DNA, 201 bp, Homo sapiens
aagagctcttccaggaagaattgggaggagcacagacatagaagcatgggggtcagggacgggcaggcgggctgagagggactgaggggctgacagagagragagttggggagggagggggaaggggtagggaaggagacatgctccaacagcttttccaagagctcctggctggctagacgcacctagggatgcacgtgg

SEQ ID NO: 53284 - DNA, 201 bp, Homo sapiens
ataaagactcactgcctatggcttcaggaattccatttttctctagtttagggaattagatgcatgaatgccccaagatggcacatacaaggatgttcatygcaggtgatggtgctagcaaaaaatgagaaacaccctaaatgtccattgataggagaatgagaattcggtagtggtgagtcccttccagggaatgggatg

SEQ ID NO: 53285 - DNA, 201 bp, Homo sapiens; identical to SEQ ID NO: 36940

SEQ ID NO: 53286 - DNA, 201 bp, Homo sapiens
gtttgcccagaggcattaaagcctctcaggccggccacagctttacctggagcctgaataggaccattcctctcagccagtgctttgctgtctctgtagcrgtttatggaacacctgccttcccctgtgacaacttgggattgctggaagctctttccaccaaacagagccaagcccatggaggtcagagcctgtttgaac

SEQ ID NO: 53287 - DNA, 201 bp, Homo sapiens
cctctgttttatcattatgccagtggctgggaactgggagatccaggcagatgtcctggaagtcacagccttcaagaccaggtctggttgaaaggacaggycttgagtaggtggagagggtggcagggagtggacctgccctctggccccacgatctcttcattccttcccccatctttgcctggggaattcccccagcct

SEQ ID NO: 53288 - DNA, 201 bp, Homo sapiens
gtttggtcataggaaacaaatggaatagaggaatttgtctaggctgttaaataaaacgttttttctccccacccccccacccccactttttttttttttttaaaaaaaagatagggtcttattctgttggccaggctggagtgcagtggcgcgataacagctctctgcagctttgaactcctgggctcaagtgatctgctt

SEQ ID NO: 53289 - DNA, 201 bp, Homo sapiens
ttttaagaaccacccagagacttcaccttactaaggtcggggggcggtctgagacctacatatcaagggagagtggtgtatttcagcctgttccatcgtcragtagagacatgcatccatacattctctgagcagtgcttaccacacacaggcctgtggctgatacttggacatcagagatgaataggacatgacctctgt

SEQ ID NO: 53290 - DNA, 201 bp, Homo sapiens
tcctgtgtgaccttgggcaagtcactgaccctctctgggttccagggtggatgggccaggagctgtccaagatcccttccagcttggacagtctgtgatttgcttggtatgtgctacacaggaggcatttagaatgtctaatctgatgtcttcttgttcttttgaaattgctttcatttaaggcagaataaggaaagttgg

SEQ ID NO: 53291 - DNA, 201 bp, Homo sapiens
ttcctgcgatggaaggtggggtgagggggaggagatcctctgagcttcccaaacagagagattcagtgtgtgtgtgtgtgtgtgtgtgtgtgtgtgtgtgtaataaaaattaaattaaattaaattttaggaatcaagttacctaataatttatgaataaaggaaagttgcagctttttaaagagtgggtcgagcaaagtt

SEQ ID NO: 53292 - DNA, 201 bp, Homo sapiens
tttcctgcgatggaaggtggggtgagggggaggagatcctctgagcttcccaaacagagagattcagtgtgtgtgtgtgtgtgtgtgtgtgtgtgtgtgtgtaataaaaattaaattaaattaaattttaggaatcaagttacctaataatttatgaataaaggaaagttgcagctttttaaagagtgggtcgagcaaagt

SEQ ID NO: 53293 - DNA, 201 bp, Homo sapiens
ttttcctgcgatggaaggtggggtgagggggaggagatcctctgagcttcccaaacagagagattcagtgtgtgtgtgtgtgtgtgtgtgtgtgtgtgtgtgtaataaaaattaaattaaattaaattttaggaatcaagttacctaataatttatgaataaaggaaagttgcagctttttaaagagtgggtcgagcaaag

SEQ ID NO: 53294 - DNA, 201 bp, Homo sapiens
tttttcctgcgatggaaggtggggtgagggggaggagatcctctgagcttcccaaacagagagattcagtgtgtgtgtgtgtgtgtgtgtgtgtgtgtgtgtgtaataaaaattaaattaaattaaattttaggaatcaagttacctaataatttatgaataaaggaaagttgcagctttttaaagagtgggtcgagcaaa

SEQ ID NO: 53295 - DNA, 201 bp, Homo sapiens
ttttttcctgcgatggaaggtggggtgagggggaggagatcctctgagcttcccaaacagagagattcagtgtgtgtgtgtgtgtgtgtgtgtgtgtgtgkgtgtaataaaaattaaattaaattaaattttaggaatcaagttacctaataatttatgaataaaggaaagttgcagctttttaaagagtgggtcgagcaa

SEQ ID NO: 53296 - DNA, 201 bp, Homo sapiens
atatatatttgtgtgtgtgtgtgtatttttttttcttttgtagacgtggggtttcaccatgttgcgcaggctggtcgtgagctcttgggctcaagcaatcyacccacctccacctcccaaactgctgggactacaggtgtgagtcaccacgctgagcctggacttaatttttaaaacttgaaaacttcagaaaaacgccaa

SEQ ID NO: 53297 - DNA, 201 bp, Homo sapiens
aaaaaatatcaccaccactgggaatcttctgtgacatcacaagctctgtgtgggtttcatgtaaatcccccactgacacttcaccatacccccccgggagrggactctgagaattggaagaggaggtgacccatcacgggcacacagtcaggggcacacagtcaggggtggtgggactaggatttgaacccaggtattctg

SEQ ID NO: 53298 - DNA, 201 bp, Homo sapiens
ccctgggtttccaagactggctctgccactttctagctgtggggccttgaaccagcttcctaacgtctctgattctcagattcctcttcagtgaaattgtratgggaataatagtaaagtagcagacaagttacttaccttctctgttcaggtttcctcatctctaaaatggggatactgatgattatgcagacaatgtgt

SEQ ID NO: 53299 - DNA, 201 bp, Homo sapiens
gaggttgaaatacaaatctttcaaaactgacttcttttttaaattcctgaggaagaatctgatattaactctgaactcacgcagacttctaatcatgcccyagggtaggggtgatttttaagattttgtgctgctgacattggccttttactgttaaagcctggcaagcggaaagggtgcagagaataggaatcactttct

SEQ ID NO: 53300 - DNA, 201 bp, Homo sapiens
ggggttaaaatatgagtttcatgggtgtggtcaatgtgtgtaggtcagtggaagccagaggcagggccctggggaaggtaggtggaaaggtagagggtggygctgagagacaccctggaggtagaattgctagatttggttggtgagtgatcaacaggtgaattcagggataagcatggctttcaaaaatgcatttattgc

SEQ ID NO: 53301 - DNA, 201 bp, Homo sapiens
aatgtacaccatttcccagagtgtgattcctgtaaaaacaaaactgatttgtgtttttacctctttgtcttccctttgattgtaaaaatcaaatgctcctkccctgctgcagcctgtagagctgggctgcatgtacccagcctccctacatgccctggccttgtcaaatgcaacctttacataaatgggaaatgtctccgg

SEQ ID NO: 53302 - DNA, 201 bp, Homo sapiens
gatggatctctgtgcttcggacatcgatcccagacaacaaaatgtgccattgcaaacccattggggctcatcttgagtgaatatatttatgactctgagamtcttgttcttccttaaagaaaaaaaaagaataaacagacaaaacttaaaagaacatttataaagcaatttacttaaattataacagactaaaagccaggc

SEQ ID NO: 53303 - DNA, 201 bp, Homo sapiens
tttcaactgagaattgtcaaaaagtgatgaggcacagggatgtcaagagtctgggaggagactaaatcccatcaacgtatctattcatggaatgagaaaaygatatggatataaacagatattcctgatggatctctgtgcttcggacatcgatcccagacaacaaaatgtgccattgcaaacccattggggctcatcttg

SEQ ID NO: 53304 - DNA, 201 bp, Homo sapiens
gtcttgcttgaggctcagaaggtggaagtgatttgcccatggccacttaccaggaaggggctggccaaggttgcaggcttggctctgtcctctaacacccrgccagggcagtttcacagtggggccttcctcccaggctaggggacagtcttgtattgtccctctgggatggaataaactcgaggctaatcctgcctgtcc

SEQ ID NO: 53305 - DNA, 201 bp, Homo sapiens
atatttgtgtgtgtgtgtgtatttttttttcttttgtagacgtggggtttcaccatgttgcgcaggctggtcgtgagctcttgggctcaagcaatccaccyacctccacctcccaaactgctgggactacaggtgtgagtcaccacgctgagcctggacttaatttttaaaacttgaaaacttcagaaaaacgccaaaaga

SEQ ID NO: 53306 - DNA, 201 bp, Homo sapiens
actgtgtgccggggcggtgatgacattccctggtggtgttgcatggtgtgtaaaacctgtcttgtcactttatcaccctgagactcggtttcctcatttgkaaagctggggtaataatacctcttgggacatggtgaagatgtagccagagaatctctagcaagcacttgatgcagataaaagtatttttttaattagctt

SEQ ID NO: 53307 - DNA, 201 bp, Homo sapiens
atgagagcatgggcctagctcaacttttaaaattatttaattgagaatgtatgactaaagctgtatctcagcagaaagtatttttttgcgggggggggaawctaataataataacaatagcagctacttctgacacctactgtgtgccggggcggtgatgacattccctggtggtgttgcatggtgtgtaaaacctgtctt

SEQ ID NO: 53308 - DNA, 201 bp, Homo sapiens
aaaattgccaagagtttgtcacttgccagtcatcccaaaggtggaaagtgacagagccaggatttacacctaggttttgttgacttgaggggttgcgtctytgccccaacagcagagagaagggatgccccacagtgctcgagcctgagctccgaagccctgggtttccaagactggctctgccactttctagctgtgggg

SEQ ID NO: 53309 - DNA, 201 bp, Homo sapiens
ttgtgtaaggtcaactgacgtactggaaaatctgaggaagggtggtatgtacccaagaggttagagatgggttttggagatggacctgggttcatctgacrgtgtaacttggctgtgaccttgggcaggtccctttgcctttctgttactcagatatcctaccaccaaacctggcccatagtcctcacaaacatgtcattg

SEQ ID NO: 53310 - DNA, 201 bp, Homo sapiens
gcttcacaaaatgagttgggaagtcattcatgaaagtgtctgggcttgagtttttttgggggagatgatttaactataaactccattttttggacatgtartatataggatatctataggttatctatttttctttcttgagtgttagtagtttgcgtctctcaagaaattggtccattcatccaagttgtggaatttaaa

SEQ ID NO: 53311 - DNA, 201 bp, Homo sapiens
gctccttccccgtttgagaatttgtgttccttttgctaaattggctgtggctttgcttcagttagcagccagtttcgtcatgatttttttcctctccacckgagtttcctaatatcagcatcctctcaactctgtatgcaaagcaaatatatcagccttccataaacaggtccccaaatgtcctctttcctggattctaaa

SEQ ID NO: 53312 - DNA, 201 bp, Homo sapiens
aaaggaaagcattaatttttcaccatgaagtatgttagctgtgggattttctgtggatactcttcatcagatttgattcctagtttgtttagagagtatcmtgaatgtatgttgaatttttaaagtatttttctgatcatatggcttttctcttttaatctgttaattacattgattttcaaatgttgaaacagccttgca

SEQ ID NO: 53313 - DNA, 201 bp, Homo sapiens
agcacctttggctccttccccgtttgagaatttgtgttccttttgctaaattggctgtggctttgcttcagttagcagccagtttcgtcatgatttttttyctctccacctgagtttcctaatatcagcatcctctcaactctgtatgcaaagcaaatatatcagccttccataaacaggtccccaaatgtcctctttcct

SEQ ID NO: 53314 - DNA, 201 bp, Homo sapiens
ttgccttatttctatcttaaaggaaagcattaatttttcaccatgaagtatgttagctgtgggattttctgtggatactcttcatcagatttgattcctastttgtttagagagtatcatgaatgtatgttgaatttttaaagtatttttctgatcatatggcttttctcttttaatctgttaattacattgattttcaaa

SEQ ID NO: 53315 - DNA, 201 bp, Homo sapiens
cccctcgctcatgtgcctgactgctcaagcttgaatcacatgtacagtctcctcagagtcataatcccccctccatcctgcaaagggctttgcaccgaagyaggcgtccataggggattaggctccaactggtgatttcttgcaaggttcttttatgacctggaagggaagcctttggtttacccttctcagggaccccag

SEQ ID NO: 53316 - DNA, 201 bp, Homo sapiens
ttagaagatttaacatcttcatactattgagtcttgcaatcaatgaacacagatctctccatttatttaggtttttttttgttctgtaattgtcagcctgmagaaactacacatattttgttagctatgtatacctaagtattttcagcactattataaatggtactgtttttattaactttggattccagttgttcattg

SEQ ID NO: 53317 - DNA, 201 bp, Homo sapiens
gacacctgcaaagaccccatttccaaattaggtcacattcacaggtactgggggctagaacttggacatatttttgggggaacacaatttgacctactctrtgatggcatgacagggccctagggggcacatgaaactcgaaatattgctgtggccatttttggaaaagtacactctgcctcagtagatttgggatggagc

SEQ ID NO: 53318 - DNA, 201 bp, Homo sapiens
tcaagacaacatgagctaatgcatataaaatccctagcccagtgcctggcacatgataagcaaccaaaaagaaatggtagctgtaattgtctaagcgattkgcttgtggcaagactgatctgcagttacatctgcgatgctcagatagctgatgaattgacattgatgatgaacctctttcccaaggagccggaaggtgat

SEQ ID NO: 53319 - DNA, 201 bp, Homo sapiens
ttgccatgttggccaggctggtcttgaactcctgaccccaagtgatctgcccacctcagcctcccaaagtgctgggattacaggcatgagccacgatgccyggcctcatctgatgatttttttaattcctactgtgtgctgggccctggggatacagtgtggagaggctgatggggaaactcagtcatcacgcaaagctga

SEQ ID NO: 53320 - DNA, 201 bp, Homo sapiens
tggggaaccagacacgagtgctgctggaggagcaggctcggcacctgctgaacgagcaggaacacgccaccatggcctactacctggatgagtaccgtggyggcagcgtctctgtggaggccctcgtcatggccctgttcaagctgctcaacacccacgccaaggtgacccgtgccctgcctcccaactggcttcagcatt

SEQ ID NO: 53321 - DNA, 201 bp, Homo sapiens
catgaatgccccaagatggcacatacaaggatgttcatcgcaggtgatggtgctagcaaaaaatgagaaacaccctaaatgtccattgataggagaatgaraattcggtagtggtgagtcccttccagggaatgggatggagtattggaagagatgagctttatgtcattgaactggtaagaaaagatcttcaaaatacat

SEQ ID NO: 53322 - DNA, 201 bp, Homo sapiens
gtttttatgattgtttagtttcatttaatttggaacagttcctcagcctttatcttcctatgacattgatatttttgaaacattctggctcattattttgyagaatgtttctctatttgggatatctgatggttgctatgattggattagtttatgcattttggcaggatcatgctagctttgatgtcaggtccttggtgg

SEQ ID NO: 53323 - DNA, 201 bp, Homo sapiens
ggctgaaactcttaacccatctataaattgggagcacttgtttaatgaatgtctcttctcccagatcatggctacatgaggtaaagaatgaatgttctttwcacatcatatcccctgcccaagggaggttctggagccagatccccatcccagctccaccacctccttgttgtgtgaccttgggcaagtgatgccctctct

SEQ ID NO: 53324 - DNA, 201 bp, Homo sapiens
agataatgcatttcttggtgttttttttctttgttgctcattgtatgataataacctttgatagagggcttagaatgaaccagacactgttttcagtgtaygtgtataaactcagttaagcctcataatcaccctgtgaagttcaagtaggtatcattttcatcactttgttttccaaaattgccaagagtttgtcacttg

SEQ ID NO: 53325 - DNA, 201 bp, Homo sapiens
cagccagtccgcttactagaaagtgtggcagatgtcacattttgtacttgacatttgagggccttttaagaaccacccagagacttcaccttactaaggtyggggggcggtctgagacctacatatcaagggagagtggtgtatttcagcctgttccatcgtcaagtagagacatgcatccatacattctctgagcagtgc

SEQ ID NO: 53326 - DNA, 201 bp, Homo sapiens
aagtgtgattctttaaccccccgaccaattggattgtccgtgtgttgctgctttccaactctgcctgccggcagccgcaccagcggtacacagcctgcctrcacctgtcagtgcctgcagcccctcgctcatgtgcctgactgctcaagcttgaatcacatgtacagtctcctcagagtcataatcccccctccatcctgc

SEQ ID NO: 53327 - DNA, 201 bp, Homo sapiens
agtgacaggtccagataaggtaagccatggactatttgcaattatgttgaaatgtttgatttttgaaaaaatatcttgaacaggagccaaactaataatartaaaaaagtagacctttcaaaggtttttagccaaatgtgcttgataaattggccagagagtccacagaccagggatgctgccttaggccctgctgcatac

SEQ ID NO: 53328 - DNA, 201 bp, Homo sapiens
aaaaatatagcttcctgggattggaattggaattgtgttgaatctagatcaaattagaagatttaacatcttcatactattgagtcttgcaatcaatgaayacagatctctccatttatttaggtttttttttgttctgtaattgtcagcctgcagaaactacacatattttgttagctatgtatacctaagtattttcag

SEQ ID NO: 53329 - DNA, 201 bp, Homo sapiens
aagaggccccagcttttctactaggcacagactgcccttaaccaggatttctccacggggagccgttctttgtaaactgcagtgctgcgagtcaccatgtyggggattttatggtaaaagtacattactgttaactggacttcagacttcattcaaatttcaccagtttttctgcctatgtccttattttattctaggata

SEQ ID NO: 53330 - DNA, 201 bp, Homo sapiens
acggcctgtcggtgagctcgtcctccaccggctcgctgggctcggcggccggggcgggcggcggcgggggcgcggggctgcggttactgtctgccaacgtrcgccagctgcaccaagcgctgaccgcgctgctgagcgaggcggagcgggagcagttcacccactgcctgaacgcttaccacgcgcgccgcaacgtcttcg

SEQ ID NO: 53331 - DNA, 201 bp, Homo sapiens
gcttgtaaatacctaaaaaaaaaatatagcttcctgggattggaattggaattgtgttgaatctagatcaaattagaagatttaacatcttcatactattsagtcttgcaatcaatgaacacagatctctccatttatttaggtttttttttgttctgtaattgtcagcctgcagaaactacacatattttgttagctatg

SEQ ID NO: 53332 - DNA, 201 bp, Homo sapiens
attcacccacctcagcctcccaaagtgctgggattacagacgtgagccaccacacctggcccctaacccatatactttggaggagggagaaaaattcccarctgaagtacagtgtttatatacgactcttcttggtttctgtcttataagatcggttgaaccaatgtttcccagctacttaagtcggttcctttcttctct

SEQ ID NO: 53333 - DNA, 201 bp, Homo sapiens
cttaaacgccccacctcaagtgattcacccacctcagcctcccaaagtgctgggattacagacgtgagccaccacacctggcccctaacccatatactttkgaggagggagaaaaattcccaactgaagtacagtgtttatatacgactcttcttggtttctgtcttataagatcggttgaaccaatgtttcccagctact

SEQ ID NO: 53334 - DNA, 201 bp, Homo sapiens
aggagctgacactacagacatgcatcaccacacctagctaatttttttctatttttagtaaagactgggtctcctcatgtggaccaggctggtcttaaackccccacctcaagtgattcacccacctcagcctcccaaagtgctgggattacagacgtgagccaccacacctggcccctaacccatatactttggaggagg

SEQ ID NO: 53335 - DNA, 201 bp, Homo sapiens
gttggctcttgcttccttcgtagagactatagaggagcagtgcttcccaagctcctgtagattccagtttttgataataatgataataatagtaccacctrtatcctaggtactatattgtcaagacaacatgagctaatgcatataaaatccctagcccagtgcctggcacatgataagcaaccaaaaagaaatggtagc

SEQ ID NO: 53336 - DNA, 201 bp, Homo sapiens
tacttttttttttttttgagatagtcttgctctgtcacccaggctggagtgcagtgacacgatctcggctcgctgcaacctccacctcccgggttcgagcrattctcctgcctcagcctccaaggagctgacactacagacatgcatcaccacacctagctaatttttttctatttttagtaaagactgggtctcctcatg

SEQ ID NO: 53337 - DNA, 201 bp, Homo sapiens
catatacttttttttttttttgagatagtcttgctctgtcacccaggctggagtgcagtgacacgatctcggctcgctgcaacctccacctcccgggttcragcaattctcctgcctcagcctccaaggagctgacactacagacatgcatcaccacacctagctaatttttttctatttttagtaaagactgggtctcct

SEQ ID NO: 53338 - DNA, 201 bp, Homo sapiens
gaggtccagctcagataactgggctttgcctccccaccagccccttttgctggagtgggttttttctaatgagccatgccctcgggagtgcctatccctgrggtgcagtagccacctctcactcctgggcgggtccacaagtcctaagcctcagagttggctcttgcttccttcgtagagactatagaggagcagtgcttc

SEQ ID NO: 53339 - DNA, 201 bp, Homo sapiens
gcgcggaggctccccgggcggctgcatcccggggctgccccggacatgccccgcaccccttgtcggacgcccgcgccgcttcaccggctgccactccccgragtgctctgggactagagcgccctccgccccaacttctgactttggggtcccccagccctagaggaacgggcgcccggctgggggagccccgggcatggt

SEQ ID NO: 53340 - DNA, 201 bp, Homo sapiens
cgccctccgccccaacttctgactttggggtcccccagccctagaggaacgggcgcccggctgggggagccccgggcatggtgtgacggggcagtcaggtmagctttgcggcgcccccaaactccagccacccgtcgtctccgtgccctccagaatgtagctgctgaccccgcgccccccggactccagcagcagtctccg

SEQ ID NO: 53341 - DNA, 201 bp, Homo sapiens
ccgccactgtaaacttactattttccctttataattatgaagtacactgatagagatattttgaaaccacacacagaaaatcctttttctgcttaaactcrtgcccacttttttttttttttttgaacagagtctggctctgttgcccaggctggagtgcagcggcaccatctcggctcactgcaacctctgcctcctggg

SEQ ID NO: 53342 - DNA, 201 bp, Homo sapiens; identical to SEQ ID NO: 37003

SEQ ID NO: 53343 - DNA, 201 bp, Homo sapiens; identical to SEQ ID NO: 37009

SEQ ID NO: 53344 - DNA, 201 bp, Homo sapiens
gcacctgtgatgagcaaacctcactgtgggccaggctgctacccagcctcttttagcccaaaggcaagcatctctgagagacagggtctgattgctcaatkcacaacctaggtgagtgggaaaaccactcacacttctcaaacaaaaatgcctgctctgtgctgtgttcaggccaggatgcaaaggagatagtgctcaaga

SEQ ID NO: 53345 - DNA, 201 bp, Homo sapiens
gctgccccagacgcgcagtgagtacagcaaggccaggctctgtggtccttgggggtccctgtcctcttcaggtcagtctacctgatgacacagtgaagggkgggaccagctacttgttgagggggctcagggccagagtggcgaagggagttggagaccccagtttgaatcccggctctgccactgactggctgtgtgact

SEQ ID NO: 53346 - DNA, 201 bp, Homo sapiens
gatttattttgagttttcatataaagtgtgagattgaggttcatttgtttgcatatagacagctaattgttctagcaccatctgctgaaaggactaccctwtctccagtgaattgcctttgctcttttgccaaaaatcacttgggtatatttgtgtgggtttatttctggactctattctgttccactgatctatgcaccc

SEQ ID NO: 53347 - DNA, 201 bp, Homo sapiens
taagaattcctgggcttctatctttctgtcttgcagccaggattttacaagggcccagccggctcccaggtgaccctgagcagcctggggaaccagacacsagtgctgctggaggagcaggctcggcacctgctgaacgagcaggaacacgccaccatggcctactacctggatgagtaccgtggcggcagcgtctctgtg

SEQ ID NO: 53348 - DNA, 201 bp, Homo sapiens
gtttaaagctgtcacaagtccaggcagtttcaagggggagaggggactaggcccttctttctatgtgagtgtcctagggctgctataccaaatgaccacayactgggtggcttaaaacaacagaaatgtattcagttatgggggccagaagtccaaaatcaaggtgacagcaggatcacactcatccctccaaccgctctt

SEQ ID NO: 53349 - DNA, 201 bp, Homo sapiens
tgctgctctacaggtctatcacgggtgctggactttgccaggagcctgaccatatcgacttcattggtgaagccagccaagctggggctgctccctccacktactggcttctgccagggtctgttctccccacctgccttctctggactgagtctctggacagcacccctgtgctaagtatgtaccaagcagcaggtgatc

SEQ ID NO: 53350 - DNA, 201 bp, Homo sapiens
tcatttctgctcctggggaccaactgccatcctggctgaggcttcttggaacaggatctctgttctcatgaatgtcccaatcttggggtcactactatgcytgtggctatggtagcctcccagccccacctccaacactggggatcacatttcaacatgagattcggaggggacaaacatccaaactacatcagttactat

SEQ ID NO: 53351 - DNA, 201 bp, Homo sapiens
tttaaggacaactgagattgactagcatttgaaattaatcataatgatagcagttgccatttattaaccagttattatgaatcaggcactgtactcaacayattagatacacttttatttcatcctaccggtagccctgtggcggacattaataacatcatttaatacatgaacaactgaggctcagagaggtgcagtagc

SEQ ID NO: 53352 - DNA, 201 bp, Homo sapiens
aaccgaggcctgacagagcctggggtttccttgagcagggaaggacaggagccctggggcctccactgactggctgtgtgaaggtgggcatgtccttcctytccctgggcctcagtctccctgcttggacacttgggctagatgatctccgaggacttctcctagatctgtacagtttcctggcctgaaaagttgcagaga

SEQ ID NO: 53353 - DNA, 201 bp, Homo sapiens
aattctttctgttatcagagctgttatttaaaccgaggcctgacagagcctggggtttccttgagcagggaaggacaggagccctggggcctccactgacyggctgtgtgaaggtgggcatgtccttcctctccctgggcctcagtctccctgcttggacacttgggctagatgatctccgaggacttctcctagatctgt

SEQ ID NO: 53354 - DNA, 201 bp, Homo sapiens
cttaaactgagttgcccaagatcaaattctttctgttatcagagctgttatttaaaccgaggcctgacagagcctggggtttccttgagcagggaaggacwggagccctggggcctccactgactggctgtgtgaaggtgggcatgtccttcctctccctgggcctcagtctccctgcttggacacttgggctagatgatc

SEQ ID NO: 53355 - DNA, 201 bp, Homo sapiens
gttcaccggcccctaagctcctgagggttggcctgaccctgaggttgcctgtcaatcaccatttcttccctccactccttgtgttacctgcctggtcctgmggggttggcaacaactcaggagcccacctcgggtggttttggaggtgccgtgcacactgctgattgggaggctggacgctgccagtctgtccggagtttc

SEQ ID NO: 53356 - DNA, 201 bp, Homo sapiens
tgaaccacatggaggtgtcctaagacttcctcaattttggtgtgctggagaacaaaccagtgttcccttctcagcttctgtttgctcactttgctttctcrtccatttctagaacactctggacctggaggaaactggcgaggctgtccagggcaatatcaacgccctcccagatgtgtccgtggtaaggccctggctggc

SEQ ID NO: 53357 - DNA, 201 bp, Homo sapiens
cactatgtgtataacagccgggcccctgagtttgaaaccctaggttaagaacccacaccctggagccaggcagtctagcacaagtctattccctggactgmtccattctatacatcagatctgtgagtttttacaatcaccccagtggttaggcaccatcatttctgtattagaaggagaacataggaggcttagagaggc

SEQ ID NO: 53358 - DNA, 201 bp, Homo sapiens; identical to SEQ ID NO: 37017

SEQ ID NO: 53359 - DNA, 201 bp, Homo sapiens
attctgctgccatcttgcggctacagtgatacataggccccgtaggacattccctgagcgcctgcacagaccaagatgcaaaatgcagggctctggcgctsgcagcctagtgaggggaggcagctgagggagagcaggcagacgtggtgagaagacccagggctgtcacagatggatcactgctgtctctagagctggcac

SEQ ID NO: 53360 - DNA, 201 bp, Homo sapiens
agcgtcggggtgccttctccagctccccctaccctggccaccctgtgttcaccaggaggactgaactcgtggagggcaggggtggcttcccttcctgtccsccatggcctggcctggagtagatgctggaaactgaagtggcagtctctggacccctggcaggtctagggtcagggtgcaggaagaatcttggggaggcca

SEQ ID NO: 53361 - DNA, 201 bp, Homo sapiens
ctcagcttctgtttgctcactttgctttctcgtccatttctagaacactctggacctggaggaaactggcgaggctgtccagggcaatatcaacgccctcscagatgtgtccgtggtaaggccctggctggccctttggttctgctctccctggtgtgctcaggtcctggtggctctctcctctccatgacagccacggag

SEQ ID NO: 53362 - DNA, 201 bp, Homo sapiens
agtggtggaagctcttttccattctgggctctagggccgagagaactggctcccttagccctcaagagagcccagctcagagaggagctccgatgggcccyccatagacggcccacaaatggccttttggcagcccagtgtcacttaaggaggcattgggtttcttcttgtgaattgggaagggaagaaagaaatagacgt

SEQ ID NO: 53363 - DNA, 201 bp, Homo sapiens
aagctggtggttttgttttagtccaagtccaaaggcccaataaccatgagctccggtgtctgagggaggaggagatggatgtctcagctctagaagagcgygcaaatttgcccttcctctgcctttctgttctgttcaggcccttagtggattggatgaggcccacccacattggggagggtgagttttgcccagtccacc

SEQ ID NO: 53364 - DNA, 201 bp, Homo sapiens
gcccattggatgctctctctgcagtctccctgttgcttgtttgcttgtcgactgaccccattgtctctgagctaccaatggcagggttggtgtcccacctytgtgtccccagccccttatcagcctggagcttcagagactgctcagtactgatgagcactgcagttgagacctcagccaagtgttgatgtagccagcagg

SEQ ID NO: 53365 - DNA, 201 bp, Homo sapiens
acagtattatagttttgcattttacattttagtctatgatttattttgagttttcatataaagtgtgagattgaggttcatttgtttgcatatagacagcyaattgttctagcaccatctgctgaaaggactaccctttctccagtgaattgcctttgctcttttgccaaaaatcacttgggtatatttgtgtgggtttat

SEQ ID NO: 53366 - DNA, 201 bp, Homo sapiens
ggaagctggtggttttgttttagtccaagtccaaaggcccaataaccatgagctccggtgtctgagggaggaggagatggatgtctcagctctagaagagygcgcaaatttgcccttcctctgcctttctgttctgttcaggcccttagtggattggatgaggcccacccacattggggagggtgagttttgcccagtcca

SEQ ID NO: 53367 - DNA, 201 bp, Homo sapiens
gttaggttttggaggtgagcgacagcatgccttgtggatggatagccaagcagaagagtcgcagacagagacaacagccagtgtgaaggctgacacatccrtggtgttccagcctggctggagaggatgtgagcaaaggggatcttcgtagaaggcaaacttgaccacatctccatggcaacccactgccctcaggcttaa

SEQ ID NO: 53368 - DNA, 201 bp, Homo sapiens
ttttgtctaacccaaggtcacatagattttgtattatatattcctctaacagtattatagttttgcattttacattttagtctatgatttattttgagttytcatataaagtgtgagattgaggttcatttgtttgcatatagacagctaattgttctagcaccatctgctgaaaggactaccctttctccagtgaattgc

SEQ ID NO: 53369 - DNA, 201 bp, Homo sapiens
agagggttgctcatgggggcctcaggttcctatgacatcaaggccctgttcatttctggggttgggacagtgtagtatgggcgttggggtgacccagaccygggttagaaaccttaccttctgtagaacggtcagatgaccttggacaagtctcttccctctctgaacttcaggtgtaatcgatgtgacaagggacagtcc

SEQ ID NO: 53370 - DNA, 201 bp, Homo sapiens
ccccctctgccgccatcaaacagctctctccaagccccgctgctcaaggaaaatgaaaacacaagcatgctcaggagacattttgtagtttctccttcccrcatttttttctctgacagcagaagggacaacattatagattttgaatcacaataggaaaaaatgataatatgaagcccgcaaaaatacacatttgctaca

SEQ ID NO: 53371 - DNA, 201 bp, Homo sapiens
ggcctcgctgaggtctgaactaaacaaagtgaaggaatgaaccacagtgtggtgcagagtgagagcggcaggtgcaaaggccctggggcagtaatgagctygtgatgttggagtagcaggaaagggcccggtcatgtaggcacaatgagtagggtttggaacttcctccaactgagatgaagaggcccttgggggtcctga

SEQ ID NO: 53372 - DNA, 201 bp, Homo sapiens
atgaggctgaggacagggccagctatggctgccttctctctcatttccaagagggttgctcatgggggcctcaggttcctatgacatcaaggccctgttcrtttctggggttgggacagtgtagtatgggcgttggggtgacccagacctgggttagaaaccttaccttctgtagaacggtcagatgaccttggacaagtc

SEQ ID NO: 53373 - DNA, 201 bp, Homo sapiens
ttatgggaagcaggtttttgtcggggatatggagtcgggccttgaatagagttcagctttctgccctgtccttgctgtgtgaccttggacagatgaccttyccgctctgatcttcagtcacctcagctgtagagtgggtgaagggtcccatctggcaggattaatggagccgccaggtctatgccctcactgaggctctgg

SEQ ID NO: 53374 - DNA, 201 bp, Homo sapiens
aaacaaggcagagaaaaaatattccatagaagtttccactcactttagtttgcctctcagttgcaggcaatcaaaggctttatttgctcataaaatgcccrccttcagtaaagtcctttctatcttcaatcccctccgcagtaaagcattttatattcctgctgtttattgtactttcccttccagggccccttggatatg

SEQ ID NO: 53375 - DNA, 201 bp, Homo sapiens
aaggccacccagctaagtgctagaactgagattttaactcactccagcaaactctgagtccacgttcttaactactatggtatggcgcctgtcagtcctcrgtttacagctgaagaaaccaagacttacagacttaaactgagttgcccaagatcaaattctttctgttatcagagctgttatttaaaccgaggcctgaca

SEQ ID NO: 53376 - DNA, 201 bp, Homo sapiens
tgttaagcaacttgtccaaggccacccagctaagtgctagaactgagattttaactcactccagcaaactctgagtccacgttcttaactactatggtatrgcgcctgtcagtcctcggtttacagctgaagaaaccaagacttacagacttaaactgagttgcccaagatcaaattctttctgttatcagagctgttatt

SEQ ID NO: 53377 - DNA, 201 bp, Homo sapiens
agactggggagaaggaaaatgggggcagaggaaaagagatgaagcaggatgagtgatttcccagaacacctgctgcatgggggttcagacccagctacagrcaggacacagacttggctctgagcttcctggcagccaacacagagagtgaagcaagtcagtgatgtctgtaagaggaaaacagaccagctgtgtttgaaa

SEQ ID NO: 53378 - DNA, 201 bp, Homo sapiens
ataccacattgcatttagtctgtatgaagtttaaatgccatttattttccccagaaacgtaaagattagagacagtttctaaacacagagtaaagattttraataggtggaggagactggggagaaggaaaatgggggcagaggaaaagagatgaagcaggatgagtgatttcccagaacacctgctgcatgggggttcag

SEQ ID NO: 53379 - DNA, 201 bp, Homo sapiens
tttacatcattaacttgtttaaccttgcttccctttactatataataataataggtaacattcctttctcagggttattgcaaagatcaaatggggaattmttattattatagtaaacattgccacagattgtgttcctccaaaattcatgcattgaaatccttacccacaagctgatagtattaggaggtggggcctttg

SEQ ID NO: 53380 - DNA, 201 bp, Homo sapiens
agggccttccttgcatgccctaatatcaggagatttcattttccatgcagacaagaagaaaaggtcacatgtggccaccaagccacatcatggcagacagsctggagtacagagacgatacgtctgtcaggttctcttaggaaacaggcattgtgggaagagctctgggtttgcagtagggaagactaggttcaagtccca

SEQ ID NO: 53381 - DNA, 201 bp, Homo sapiens
agtatgatggatagtgttgggtccagggtggattcatggatcctttgcaggcatttttcccccttcccccctcccccgacctcctttgcgtacaagaagtraagagtttgggggaaaagggacacatgctctgcttctgcagagaaatgcttctcagggggttggactgttctgtaaacccccactccccgccagcgcagg

SEQ ID NO: 53382 - DNA, 201 bp, Homo sapiens
ggcagcttcaggcctggcattcaatccagacaaccagcagttattgaaatattactggctcccattttaaagagggctaactgtgtgcccagcgtctgtgrtctacttttcacatgtcatctagttgactcctcacgtgaccctgaggggtagggtattactacccacattttccagttggggaaactgagacataggtta

SEQ ID NO: 53383 - DNA, 201 bp, Homo sapiens
tccccgccagcgcaggtgttttgaactccagctgagggcctgctggctgctgggaaactcctaggcagcagaggcccacgactacttcctcctgagtgccrttcagtggcctgtgtccaggtgagtcttgagccgtctccctggctgtgcacctgatgttggcttccctcatttgcttcccagcccatcaacccctttgga

SEQ ID NO: 53384 - DNA, 201 bp, Homo sapiens
aaactcacttgctattttactgtagagaggagctttatcctgtgatttatttatttagtacaaatatggattcatgccttcttactttgttatttatgatyggcattatttactttgatactcagagtgtcccagatttggatatggcagagccttcagcctggcttctgtgtccatttgacatgcatctgtcatttttag

SEQ ID NO: 53385 - DNA, 201 bp, Homo sapiens
tcactgggtcttgtggccaggtgtttctcgtctctttgggctaggtttcagctattctggtcccctgctttcttttccatgaatccctctttcataccggrgacacacttaacctgcatgttcctgcagcttccctcatggattaggaaccgttctagaatctgcccgcagccaccccttgcgtgtccttgtgagccccac

SEQ ID NO: 53386 - DNA, 201 bp, Homo sapiens
gtgagtaactgtgtgcatatgtattttatcactttgggaaatatatcttcagggtaaatttttgaaagtgggattccgttagccaggcgcggtggctcatrcctgtaatcccagcactttgggaggccaaggcgggcggatcatgaggtcaggagatagcgaccatcctggctaacaggtgaaaccccatctctactaaaa

SEQ ID NO: 53387 - DNA, 201 bp, Homo sapiens
gtccccaacacattttcccctattattaacatttcgtattagtgtacaaggggtacatttgttacagttgatgagcaaatatggataatatttttattagyccatactttatataagggttcacagttcattggattttgatcaatacataatgtcatgtatcaaacattatagtgtaatacagaagagtatcacccctct

SEQ ID NO: 53388 - DNA, 201 bp, Homo sapiens
aggagcgggaggcgtttgtgtttaaccctaaaaccatgggatactctggagaatcttgagtaaggatgtgatgtgatcctgtttgtgttttttttttttttaagagatagggtctctgttggggtagctcactacagccttgaactcctgggcttaagtggtcctcccacctcagcctcctgagtaactggggccacaggc

SEQ ID NO: 53389 - DNA, 201 bp, Homo sapiens
ccatctatgcctccgtctcccctgccaaccccagctccaagaggccgctggacgcccatctggccctggtcaaccaacaccccatcggccccttcccacgsgtccagtcacccccgcacctgaaaagcccctctgcagaggccacagtggctgggggctgccttctgcccccatcaccctctggccacccagaccagacag

SEQ ID NO: 53390 - DNA, 201 bp, Homo sapiens
caggagcgggaggcgtttgtgtttaaccctaaaaccatgggatactctggagaatcttgagtaaggatgtgatgtgatcctgtttgtgttttttttttttttaagagatagggtctctgttggggtagctcactacagccttgaactcctgggcttaagtggtcctcccacctcagcctcctgagtaactggggccacagg

SEQ ID NO: 53391 - DNA, 201 bp, Homo sapiens
tcaggagcgggaggcgtttgtgtttaaccctaaaaccatgggatactctggagaatcttgagtaaggatgtgatgtgatcctgtttgtgttttttttttttttaagagatagggtctctgttggggtagctcactacagccttgaactcctgggcttaagtggtcctcccacctcagcctcctgagtaactggggccacag

SEQ ID NO: 53392 - DNA, 201 bp, Homo sapiens
ctcctcatacctctgctaaatcacttgtcacattgctttaacctcttcgtgggtttcccttccccaataaacagcgagagctggtgcaaaatggaggcccrgaaagtgtggaacagaaactggaaggaaagcacacactccccggccacttgcaggattatcttctactatgcggccttctaaacattcgcctcccacatg

SEQ ID NO: 53393 - DNA, 201 bp, Homo sapiens
gaggccacatggcttggggctctgggccaagtgccatgcctctggaaactctttctcagctctccttttcctgtcgataagactgtaacatttatttaatrtgttttgtgttctttgctgaaacgtcaatatgcaggacgcggcagagatcacagcagcttctattggaggtgagcggcagcaggtagcttgttggtatgc

SEQ ID NO: 53394 - DNA, 201 bp, Homo sapiens
agttctcactcctctctgaggtgagaggcaccatttccccgcaagacctagaacgcttcgaccacctggtgctgaggcgtgagattgagtccatgaaggcrcggcagcccccaggccccggggctggggacacctactccatggtctcctacagtgacacgggttcatccacaggcagccacggcacctccaccaccgtca

SEQ ID NO: 53395 - DNA, 201 bp, Homo sapiens
aataacaatagtggctgagatttgttgaatgttctctatgacactgtggtagtgctttccattcgtatcttctttgaccatcccaggagctaggagttgtgagtactgctgtgatccccattttacaaagaagaaaaccaaagctcagagaggagaagcaacttgcccaaggttgcatggctagtgagtgatggagccagg

SEQ ID NO: 53396 - DNA, 201 bp, Homo sapiens
cttccacgggtcccctccctgtgagttccacagaacacactaattcctccagcatcaaatggtgacaaaggtgtgggatgttgtctatcaggggagctcaytagagagcacccacagtttttattgggggctggtagacatagaccctgtctacttgtacccaccttccagactcccaggaggaaagcaggctgagcataa

SEQ ID NO: 53397 - DNA, 201 bp, Homo sapiens
taataacaatagtggctgagatttgttgaatgttctctatgacactgtggtagtgctttccattcgtatcttctttgaccatcccaggagctaggagttgtgagtactgctgtgatccccattttacaaagaagaaaaccaaagctcagagaggagaagcaacttgcccaaggttgcatggctagtgagtgatggagccag

SEQ ID NO: 53398 - DNA, 201 bp, Homo sapiens
agagaagggggaagtcctgtacacttttaagcaaccagatcacatgagaacttactcactatcacgagaacagcaaaagggaaatctgctcgcatgatccratcacctcccaccagattcctcccccaacactggggattacaattcaacatgagatttgggtgaggatacatagccaaagcatttcaggcactgcagagc

SEQ ID NO: 53399 - DNA, 201 bp, Homo sapiens
cagtaggcattgcagtaaatggtggtgaatgcttgaaatgcagcacagaccccactctgttagagtcatggaggcagaggcagcaagcctcccctgagtgkcaaagccggtgcagaggagagaggtaaagtctgtctttgtaaccactttctatactggaaactcccaactggggtgaggcattcaagaaaagccggggaa

SEQ ID NO: 53400 - DNA, 201 bp, Homo sapiens
aatctggtactatgtctggccagtttagatgtaaatgcacagtgatgaggatgctagctcgctcacgtgggagggagcaggtaggaaccgaggtcagggggctgatgggggtggaggacgggatttgctgaaggatctgctcaggggggtaaaggcagagttgatgatgagatgaagttttcagatctggctgctgcaggc

SEQ ID NO: 53401 - DNA, 201 bp, Homo sapiens
ttcccacctcttctgtgtatatttgaacaaggactgcagcattcctccagagagagaaagagcttgaaataatcacctttattcaccactaagtgccgctrtgtggtctacaacaccacatattagtaagcttttgctgcagtaatgctgagtaataaccctaaaatgtggacaacaacccaaaacataacatggccaaaa

SEQ ID NO: 53402 - DNA, 201 bp, Homo sapiens
aaattaatctggtactatgtctggccagtttagatgtaaatgcacagtgatgaggatgctagctcgctcacgtgggagggagcaggtaggaaccgaggtcagggggctgatgggggtggaggacgggatttgctgaaggatctgctcaggggggtaaaggcagagttgatgatgagatgaagttttcagatctggctgctg

SEQ ID NO: 53403 - DNA, 201 bp, Homo sapiens
atattcccacctcttctgtgtatatttgaacaaggactgcagcattcctccagagagagaaagagcttgaaataatcacctttattcaccactaagtgccrctgtgtggtctacaacaccacatattagtaagcttttgctgcagtaatgctgagtaataaccctaaaatgtggacaacaacccaaaacataacatggcca

SEQ ID NO: 53404 - DNA, 201 bp, Homo sapiens
ggaaacagcctgatcgcacgggagatgtaatgcacccaagactgtgcagctgtgaaaagacgatgatcaagatctgcagttattaatgtggaaagatgtcygtgggctgttattaagtgggaaacgtgggctgcaaaaccacatagctaacaggatttcatctgtattctatatgaatgcaaaaatatgcatagagaaaca

SEQ ID NO: 53405 - DNA, 201 bp, Homo sapiens
tgcccggctaatttttgtatttttggtagagacggggtttcaccatgttggccaggctggtctcgaacacctgatctcaggtgatccacccacctcggccscacaaggtgctgggattacaggcatgagccactgcgccggaccaatagatttatttttttagagcagctttaggtttacagaaaaattgagtgggaacta

SEQ ID NO: 53406 - DNA, 201 bp, Homo sapiens
gggaacccctcttctccccacccccacacacagcaggtctcagattggaggcccttttgctcacccttcctcaggagcgactgccttttgctcacccttcytcaggagcgactgctgtggtttatagacctgatggaggtaccacccttcctgccggtggggactgtgggagtcccttagccatgcacacccatgttggct

SEQ ID NO: 53407 - DNA, 201 bp, Homo sapiens
agaagtgttccagtgtgcagaggaaggcccatgtggctgaacgtggaaagccaggtggggagaagatgccttagcaatgctgctgaggaaacagcctgatygcacgggagatgtaatgcacccaagactgtgcagctgtgaaaagacgatgatcaagatctgcagttattaatgtggaaagatgtccgtgggctgttatta

SEQ ID NO: 53408 - DNA, 201 bp, Homo sapiens
ctaagtactaaaacatcaaaactatacaaaaaggtacactccgagtacgactccccatgtcccttctacccattctcacctgctccttaaaggcaaccaartaagtttttggtttattcctctttgtttctttttgtaaaaataagcagatttatatctatatgctttctttcttctataaaagatagcatgctatagata

SEQ ID NO: 53409 - DNA, 201 bp, Homo sapiens; identical to SEQ ID NO: 37051

SEQ ID NO: 53410 - DNA, 201 bp, Homo sapiens
tgttaacaaatattgagcatttactgtgtgctatgtacattttgaggttctggggatacagtggtgaacaccaaagaaatcctttccacgatggagttgarcagacagcaggaatgccaggcaataacacaggatatagataactgaaatacacagtaagctaaatgatgacaagtgctagggagaaaaataaagcaggca

SEQ ID NO: 53411 - DNA, 201 bp, Homo sapiens
catctatctgcctctctcctcccttccttcttcttgtccttcctttctgttaacaaatattgagcatttactgtgtgctatgtacattttgaggttctggrgatacagtggtgaacaccaaagaaatcctttccacgatggagttgaacagacagcaggaatgccaggcaataacacaggatatagataactgaaatacac

SEQ ID NO: 53412 - DNA, 201 bp, Homo sapiens
tgagggatgattttcactttgtttatgtccttaggcggcgtctgaatggagcaaatattccttttataatcttaaaaacagcaacaataaagtgatttccrttcggaaacaaggcagagaaaaaatattccatagaagtttccactcactttagtttgcctctcagttgcaggcaatcaaaggctttatttgctcataaaa

SEQ ID NO: 53413 - DNA, 201 bp, Homo sapiens
taggcggcgtctgaatggagcaaatattccttttataatcttaaaaacagcaacaataaagtgatttccattcggaaacaaggcagagaaaaaatattccrtagaagtttccactcactttagtttgcctctcagttgcaggcaatcaaaggctttatttgctcataaaatgcccaccttcagtaaagtcctttctatctt

SEQ ID NO: 53414 - DNA, 201 bp, Homo sapiens
gtctgaatggagcaaatattccttttataatcttaaaaacagcaacaataaagtgatttccattcggaaacaaggcagagaaaaaatattccatagaagtktccactcactttagtttgcctctcagttgcaggcaatcaaaggctttatttgctcataaaatgcccaccttcagtaaagtcctttctatcttcaatcccc

SEQ ID NO: 53415 - DNA, 201 bp, Homo sapiens
tcccagctggggagccctccctggctgctgtacctctaaattcacagctcacagcagcagcggggtggccgcctacgcagtgtgggcagcaggccagcccraacttgtcgtgctgctgttttgcaaacactgctgatggcctgtggtggccctgacctcagggtttgttacgatgcgtggagaggatagaggagagaaagt

SEQ ID NO: 53416 - DNA, 201 bp, Homo sapiens
tttgccaggagcctgaccatatcgacttcattggtgaagccagccaagctggggctgctccctccacgtactggcttctgccagggtctgttctccccacytgccttctctggactgagtctctggacagcacccctgtgctaagtatgtaccaagcagcaggtgatctatatgtgccatctctgtctacccagctctagg

SEQ ID NO: 53417 - DNA, 201 bp, Homo sapiens
cttttcactagcactgtgaccacaaactatgtgcttaacctttctgagcctcagtttcctctctagtgaaatggagagctatgatacttactttataggaygttggtgatattaaggagaaaacatataaagggacaaagaaggctggtgtaatgtgcatctctgagctgcagcagagatggtcctggagttggaatagat

SEQ ID NO: 53418 - DNA, 201 bp, Homo sapiens
cgtatgtctgcacccagtcctggtggggaccaggggttcttattggtgctgactgtctttccaggtcatcaggtttcctgagctctgcagtgagaatcccrtccattcaaatcccagctctgccactttcttgctgtgagacctcaggaagtggtttcacctctctgagctcagttttaggatctgtaaaatgaggatggt

SEQ ID NO: 53419 - DNA, 201 bp, Homo sapiens
tgttcaccacctctgcccaaggtggttgaagaattcaatgagataacacatttaaagggcacagaacacttgataactcttggacgaataacttccgaaayagaaatctggttggatggctttccctaatgaaatgtgtctttcctggtgcctgaaggttctcccaccgctccctgtcccgtgggcagtcacactgtgctc

SEQ ID NO: 53420 - DNA, 201 bp, Homo sapiens
ttcaccggcccctaagctcctgagggttggcctgaccctgaggttgcctgtcaatcaccatttcttccctccactccttgtgttacctgcctggtcctgcrgggttggcaacaactcaggagcccacctcgggtggttttggaggtgccgtgcacactgctgattgggaggctggacgctgccagtctgtccggagtttcc

SEQ ID NO: 53421 - DNA, 201 bp, Homo sapiens
cgcaacgaaagcgaaagctattgaggggcatacttaaggaaacaaagcccttgcgcgatgaagagtgcagccagctccagctcagagcagcaggtggaaayggagaagattcctgcccagcagagatgagagatggagctgccacgtggggaggtggtttagcaagttgggtgccagtgagcccagcaggaatgagtttct

SEQ ID NO: 53422 - DNA, 201 bp, Homo sapiens
tgttcccaagcagtggtcccagatagggtcccagagagaagcagcaaattaaagagttcagagttccagaggtgggcagaacccaggtctgacttggccaygagttggctgcgactgtgtgacattgtcaggtttcccaacaagacttgtcatgtgtgcaacagaaccaacagtagctcatacttactgagcatctgctag

SEQ ID NO: 53423 - DNA, 201 bp, Homo sapiens
cttaagaattccttaaatattagagctaactggccctttatctgtggtatatattgcaagtgttctctccatgtgtcttagtcagcttaggctgactaaartaccaaagacaaggtggcttaaacaataggactctgttttctcacatttctgtaggctgggaaggccagggtcaacgtgttggccagttcagttcctgat

SEQ ID NO: 53424 - DNA, 201 bp, Homo sapiens
aaatggcctctctgaatgagtgtttaatcaattgcagaaattcgagatgcttagtcctctggcctggtctttacagcggcccttggtagggtggtaattgygccaaggcaggctgctgccaaaaagacttaatttctctgggcacgcccattagagcagagctcacttgcagcttggccacaggaaaaggtgagatcattt

SEQ ID NO: 53425 - DNA, 201 bp, Homo sapiens
ggatgtgtttaagtaaaagcatggtgaaaatggcagaagatacagcagcatgagggtagtggtgataacaggaaacagtaatgatacattttttaattttwatttttattctttacctttcctatgttgctgaggaaatagtagtaacagaaataagtcattagggtgagcagtcttctagttatttctaacatgcaggaa

SEQ ID NO: 53426 - DNA, 201 bp, Homo sapiens
ctctgagctctgttgttacccctgccatctggctgtgattcttccctgaaggatctcaccagctccctgttaagcatcatttcgtcatctatctgcctctytcctcccttccttcttcttgtccttcctttctgttaacaaatattgagcatttactgtgtgctatgtacattttgaggttctggggatacagtggtgaac

SEQ ID NO: 53427 - DNA, 201 bp, Homo sapiens
atgccgtgctgccagccttgaagatggaggatggggccatgaaccaaggaatgcaggtggcccctagaagctggaagaggcaaggaagcgggttctcctcyggagcctctaggagaagtgtggtccttttggcacactttatacttccaacctcccaaactgtcagataacaaatctgtgttgctcttaggctctgactgt

SEQ ID NO: 53428 - DNA, 201 bp, Homo sapiens
atacacttttatttcatcctaccggtagccctgtggcggacattaataacatcatttaatacatgaacaactgaggctcagagaggtgcagtagcttcccrgggattacacagggatctagtacctggccttttaaggccctccaaaggtcatacgctttgctctgccaccttcctagcacccctaacttgattaaatatc

SEQ ID NO: 53429 - DNA, 201 bp, Homo sapiens
ccctataaccctgaatttgcgtgatggaaactcaggctgacgccccttggcagccggccagccagctctccccacttctgcccggttctctgccgtcagcmtgttggtgacacctgcccgatgtttctgcacactctgctttttagatttggaacccggaggattcttctggccattcaggatgtgtttaagtaaaagcat

SEQ ID NO: 53430 - DNA, 201 bp, Homo sapiens
ccccattttacaaagaagaaaaccaaagctcagagaggagaagcaacttgcccaaggttgcatggctagtgagtgatggagccaggattcaaacccaggcytgcttgactctgagctctgttgttacccctgccatctggctgtgattcttccctgaaggatctcaccagctccctgttaagcatcatttcgtcatctatc

SEQ ID NO: 53431 - DNA, 201 bp, Homo sapiens
ttataagtgtatcctcaagtctgaaggtatccacctcctcctccctggaacctgtgagtggaacccttatatagcaaaagggatgttgcagatgtgagtaygtgatggtcttgacgtgggggattgtctgggtgggccccgtgtcatcacgggggtccttgcaagatgtaatcaggaggtcagagaaagggagacgtgatg

SEQ ID NO: 53432 - DNA, 201 bp, Homo sapiens
acaaaaacaaattacacaactgtgtatttagttacaattgtaataataccaagatggcaaagcacatggaaccaattgagtgtatgccaggggagaccaamcctggtcttggatatctgggaagacttcctggaggaggaagcatttcggttgaaatttaaaagagaacaaaactaattatgtgaaagaggaagtgagaat

SEQ ID NO: 53433 - DNA, 201 bp, Homo sapiens
cagcccgagctctggtttgctagggagtgagtctctccttcctgttgttggctcttgccttgggctcattgcttcacagctgcaagatggcagccactgcwcctgccatcacagcctctcacaaccgtgcccaaagcagagtgggtgaagggagcaggaggcccttctcttcctgtgttcctgtcttttcagagtggggaa

SEQ ID NO: 53434 - DNA, 201 bp, Homo sapiens
tgtatcttttgactttgctaaactcatttattagttctgggaggtttattgcagagtctttgaaattttctaggcagatggtcagagttttattttttctytttggatctgtatgccttttatttctttttcttaacttattgcactgactacaatgtctagtatgatactgagtagaacagttgagagaaaaattttgcc

SEQ ID NO: 53435 - DNA, 201 bp, Homo sapiens
cattgagtccctatccctagtgctcagcacagaccctagcccataatttgggcctttattaataacaatagtggctgagatttgttgaatgttctctatgrcactgtggtagtgctttccattcgtatcttctttgaccatcccaggagctaggagttgtgagtactgctgtgatccccattttacaaagaagaaaaccaa

SEQ ID NO: 53436 - DNA, 201 bp, Homo sapiens
taggagcacacacattcaggtgttcgctgttctcttcagaggtgtagggctgggcagcccgagctctggtttgctagggagtgagtctctccttcctgttrttggctcttgccttgggctcattgcttcacagctgcaagatggcagccactgcacctgccatcacagcctctcacaaccgtgcccaaagcagagtgggtg

SEQ ID NO: 53437 - DNA, 201 bp, Homo sapiens
tcattgttagaaatagaattgatttttatatgttggcttttgtatcttttgactttgctaaactcatttattagttctgggaggtttattgcagagtctttgaaattttctaggcagatggtcagagttttattttttctctttggatctgtatgccttttatttctttttcttaacttattgcactgactacaatgtcta

SEQ ID NO: 53438 - DNA, 201 bp, Homo sapiens
ttggtcacagctcttgcctcattatgtcctattataaaagcctgtacaggtttcccagttacccaatgtgactgctgactgcttgagggcagcgatcgcaygtgcggttaccattgagtccctatccctagtgctcagcacagaccctagcccataatttgggcctttattaataacaatagtggctgagatttgttgaat

SEQ ID NO: 53439 - DNA, 201 bp, Homo sapiens
atgaattatcccaggtcatacagctagagagtggctgggacaggtcaggctcatatctcaggcttatgcctggtcccttcagtgtcccctggctctggctytttgggtccggccctcgcacagccacagtggtggctccatccaggagagacagcagagcctgcctgcacacagcaccagtcatcttggtcagcatctgga

SEQ ID NO: 53440 - DNA, 201 bp, Homo sapiens
tccaatttgttcttatttcagaattgttttggctcctctggtttctctgtatttccataaaaaaaattagaatcagcttgtaaatacctaaaaaaaaaatatagcttcctgggattggaattggaattgtgttgaatctagatcaaattagaagatttaacatcttcatactattgagtcttgcaatcaatgaacacagat

SEQ ID NO: 53441 - DNA, 201 bp, Homo sapiens
tggtgctgactgtctttccaggtcatcaggtttcctgagctctgcagtgagaatcccgtccattcaaatcccagctctgccactttcttgctgtgagacckcaggaagtggtttcacctctctgagctcagttttaggatctgtaaaatgaggatggtaatttctgtcccgtgatgttgagagaccccttggcctttgcat

SEQ ID NO: 53442 - DNA, 201 bp, Homo sapiens
tggcgagggaagaaggcaaaatcaattctaggtatgcaaagacctttagcaagaccatgaaaaagaaggtgtgcaaagctcgttttcaagaggggtgaggrtggctaagtaaaaacacaaagaacttctggagccagtaatgatgtttcttgttttagttaaggtgaacttcaaaggtggaaaatgaaccttgggggaagg

SEQ ID NO: 53443 - DNA, 201 bp, Homo sapiens
ttgtttgcatatagacagctaattgttctagcaccatctgctgaaaggactaccctttctccagtgaattgcctttgctcttttgccaaaaatcacttggktatatttgtgtgggtttatttctggactctattctgttccactgatctatgcacccagcctttcattaacactgccctatcttgtttactgtagctttac

SEQ ID NO: 53444 - DNA, 201 bp, Homo sapiens
aagagaaaattgtgcaagcaggaaaggcagcgtggaaggggcacttgagctcgcggtgccttgatttcctcttttgcagagggacagtgatactacttccyccagcttgttgggaggattaaatgagaggatgcctgtgggcccagggtgagtaacctgctagtaccagcatcccagaaatgctggccacaccctgagggc

SEQ ID NO: 53445 - DNA, 201 bp, Homo sapiens
agaggttagagagagcaagacagctcctaagcgattcctttggctgtgaaacaaggttggagaagtagaatggagttagctcctgcaggctgagatgctgrgctgggaatgtgtgtgggtgggggacactttttttctgtagacaacagagacttgctgggcattctcttagctggcgagggaagaaggcaaaatcaattc

SEQ ID NO: 53446 - DNA, 201 bp, Homo sapiens
tggacagcacccctgtgctaagtatgtaccaagcagcaggtgatctatatgtgccatctctgtctacccagctctaggaggtaggaactctgtttttttttagatgaactctcgctctattgcccaggctggagtgtagtggcatgatctcagctcactgcaatctccacccccaggttcaagcaattctcctgcttcagc

SEQ ID NO: 53447 - DNA, 201 bp, Homo sapiens
cccctggaagtgattctaagagaaaattgtgcaagcaggaaaggcagcgtggaaggggcacttgagctcgcggtgccttgatttcctcttttgcagagggrcagtgatactacttcctccagcttgttgggaggattaaatgagaggatgcctgtgggcccagggtgagtaacctgctagtaccagcatcccagaaatgct

SEQ ID NO: 53448 - DNA, 201 bp, Homo sapiens
ggatggatggcagagcagaagacccctggggagacagcagacgtcaggagaaatagacccccccaggtgataggagacccctggggaggcaggagaccccmggagaaataggagactcctgaagtgacaggagacccttaggtgacaggagacccctgaggtgataagagatccctggggtgacaggatacccctgaggtg

SEQ ID NO: 53449 - DNA, 201 bp, Homo sapiens
tggagatgagtattggaaagggtattctgggtggaaggttcagacagccagaggctttgtggcatgaaatgttgcagtgtgtccagggagtcacagctacrtgtgcttgctgaggagatgacagggaagcaggagtgagatgatgctgggcctggtgtccaggtgacggtgtttggcctttctcttgagagcactggggag

SEQ ID NO: 53450 - DNA, 201 bp, Homo sapiens
tcaacatattagatacacttttatttcatcctaccggtagccctgtggcggacattaataacatcatttaatacatgaacaactgaggctcagagaggtgmagtagcttcccagggattacacagggatctagtacctggccttttaaggccctccaaaggtcatacgctttgctctgccaccttcctagcacccctaact

SEQ ID NO: 53451 - DNA, 201 bp, Homo sapiens
atcctgccctgcccccgctcctttgctgagaacctacaaggggtcaggcctgaactgaacactgggcagagacctgggactgaggcagcctcctgcccccrggatgctcacagactcctgggggaaacagacatttaaagcgccctgtgattgggtccctgtcgcagtggcttccaacgctgagtgcacagaatcacctgg

SEQ ID NO: 53452 - DNA, 201 bp, Homo sapiens
cctcagcctcccgagtagctgggattactggtgcctgccaccatgcctggctaatttctgtatttttagtagagatggggtttcaccacattggccaggckggtttcaaactcctaacctcaagtgatccacccgcctcggcctcccaaactgttgggattacaggcgtgagcccccgcgcctggccaactgatgcctact

SEQ ID NO: 53453 - DNA, 201 bp, Homo sapiens
cctaacctcaagtgatccacccgcctcggcctcccaaactgttgggattacaggcgtgagcccccgcgcctggccaactgatgcctactttttagcatctrcttgtgattcttgcccacagaaatgattaccaaaatgtaatgttctaagggtgattttctattcccatgttccttctatgtttattaatgggaaaggaaa

SEQ ID NO: 53454 - DNA, 201 bp, Homo sapiens
tgttccttctatgtttattaatgggaaaggaaaattcccattcttccttaaggaagaattgtcccttctcactcatttatctatttattcagttaattacrtaatgacactattatggcctcatggatgcttattttattctcctttgcctataggaagtgcttttaggttggcttctgtgcacatttgatatgcttattt

SEQ ID NO: 53455 - DNA, 201 bp, Homo sapiens
ctccaatttgttcttatttcagaattgttttggctcctctggtttctctgtatttccataaaaaaaattagaatcagcttgtaaatacctaaaaaaaaaawatagcttcctgggattggaattggaattgtgttgaatctagatcaaattagaagatttaacatcttcatactattgagtcttgcaatcaatgaacacaga

SEQ ID NO: 53456 - DNA, 201 bp, Homo sapiens
cataaaaaaaattagaatcagcttgtaaatacctaaaaaaaaaatatagcttcctgggattggaattggaattgtgttgaatctagatcaaattagaagakttaacatcttcatactattgagtcttgcaatcaatgaacacagatctctccatttatttaggtttttttttgttctgtaattgtcagcctgcagaaacta

SEQ ID NO: 53457 - DNA, 201 bp, Homo sapiens
cgctttcctccgcaagcggatgaacaccaactcttaccgaggctcctaccacttccgggcccccagccgcatcttctggcggaccgtgcgaggtatgctgmcccacaagaccaagcgaggccaggccgctctggaccgcctcaaggtgtttgatggcatcccaccgccctacgacaagaaaaagcggatggtggttcctgt

SEQ ID NO: 53458 - DNA, 201 bp, Homo sapiens
caggtcctggtgcttgatggtcgaggccatctcctgggccgcctggcggccatcgtggtaaacaggtactgctgggccggaaggtggtggtcgtacgctgygaaggcatcaacatttctggcaatttctacagaaacaagttgaagtacctcgctttcctccgcaagcggatgaacaccaactcttaccgaggctcctacc

SEQ ID NO: 53459 - DNA, 201 bp, Homo sapiens
tccgggcccccagccgcatcttctggcggaccgtgcgaggtatgctgccccacaagaccaagcgaggccaggccgctctggaccgcctcaaggtgtttgayggcatcccaccgccctacgacaagaaaaagcggatggtggttcctgttgccctcaaggttgtgcgtctgaagcctacaagaaagtttgcctatctggggc

SEQ ID NO: 53460 - DNA, 201 bp, Homo sapiens
ccccacaagaccaagcgaggccaggccgctctggaccgcctcaaggtgtttgatggcatcccaccgccctacgacaagaaaaagcggatggtggttcctgytgccctcaaggttgtgcgtctgaagcctacaagaaagtttgcctatctggggcgcctggctcacgagtttggctggaagtaccaggcagggacagccacc

SEQ ID NO: 53461 - DNA, 201 bp, Homo sapiens
cagaccatgtgatcacacgcctaatgatgtccgagttggagaataggcgtggccagcactggctccttgatggttttcctaggacattaggacaagccgargccctggacaaaatctgtgaagtggatctagtgatcagtttgaatattccatttgaaacacttaaagatcgtctcagccgccgttggattcaccctccta

SEQ ID NO: 53462 - DNA, 201 bp, Homo sapiens
agaacatcaaggccagcaccgaagttggtgagatggcaaagcagtatatagagaaaagtcttttggttccagaccatgtgatcacacgcctaatgatgtcygagttggagaataggcgtggccagcactggctccttgatggttttcctaggacattaggacaagccgaagccctggacaaaatctgtgaagtggatctag

SEQ ID NO: 53463 - DNA, 201 bp, Homo sapiens
tttttggaaacaggaaaatcttcaaacttctttcttcacttccctttgtgtttagctgaccctccaatgtgatcattgcctttggagtttgggagaggtaygggaagtggcctgatgcctgcttccatacttcactcctccatccatccttccctccctcttcccctccagctaaatggacaattctagccaacattgagt

SEQ ID NO: 53464 - DNA, 201 bp, Homo sapiens
tccccatccatcctctcaaacataatgagattgtttactttttagatttatgcagtgaaaatgcccagtcaggtctgaatcgtcagtgcattatattgacyctgagcactttagaatttagagttgcaattgaatgccagctgtggagatggggtgcatatcagatatataaataaagctcaggtttgctagggaaccagg

SEQ ID NO: 53465 - DNA, 201 bp, Homo sapiens
tccggaacggagacgaacaaaatctggccctacgtttacacacttttctcaaacaagatcacacctattcagtccaaagaagcatattgaccctgcccaawggaagaaccaggaagatgtggtcattcattcaatagtgtgtgtagtattggtgctgtgtccaaattagaagctagctgaggtagcttgcagcatcttttc

SEQ ID NO: 53466 - DNA, 201 bp, Homo sapiens
cacatccctaatgtaggtcctattatcaccattctcattttgcaggtgaggagactgaagcatgagattaagaaatcaagaccgccttccccctgtagggscggccggcgagtcccagtgagagcggagggtgccagaggtagggggccgagaaacaaagttcctggggctccctccggggccgcggtcggggctgcgcgt

SEQ ID NO: 53467 - DNA, 201 bp, Homo sapiens
agattaagaaatcaagaccgccttccccctgtaggggcggccggcgagtcccagtgagagcggagggtgccagaggtagggggccgagaaacaaagttccyggggctccctccggggccgcggtcggggctgcgcgtttgaccgcccccctcctcgcgaaggcaatggcttccaaactcctgcgcgcggtcatcctcgggc

SEQ ID NO: 53468 - DNA, 201 bp, Homo sapiens
gagtgatggggctatattgaatctctgtatgcactgagaactgagctatgaagaggatcttattaaactgctggtctgactttatggattgacactgttcmtttcttttattgtgaaaaaaaaaaaaaaccctgaaagtcttgggaaccccctaaagtcttttgggaatcctcaaaaagcatgggaagttaagtatttagc

SEQ ID NO: 53469 - DNA, 201 bp, Homo sapiens
aagttggtgagatggcaaagcagtatatagagaaaagtcttttggttccagaccatgtgatcacacgcctaatgatgtccgagttggagaataggcgtggmcagcactggctccttgatggttttcctaggacattaggacaagccgaagccctggacaaaatctgtgaagtggatctagtgatcagtttgaatattccat

SEQ ID NO: 53470 - DNA, 201 bp, Homo sapiens
caccgtgtgccagaggatcgcccagaactttggtctccagcatctctccagcggccacttcttgcgggagaacatcaaggccagcaccgaagttggtgagrtggcaaagcagtatatagagaaaagtcttttggttccagaccatgtgatcacacgcctaatgatgtccgagttggagaataggcgtggccagcactggct

SEQ ID NO: 53471 - DNA, 201 bp, Homo sapiens
gtttctctggtcttgagtgactgtgtccacagttcatttttttccggtaggaataactccttttctacatccacactccatagagtctctccttttcagayatcctgggatgaaagaatttggcttttttttttttttttttttgacatctgttttcactcttaggcttttaaacaatagttattgctcttatccctctca

SEQ ID NO: 53472 - DNA, 201 bp, Homo sapiens
aaacacttaaagatcgtctcagccgccgttggattcaccctcctagcggaagggtatataacctggacttcaatccacctcatgtacatggtattgatgaygtcactggtgaaccattagtccagcaggaggatgataaacccgaagcagttgctgccaggctaagacagtacaaagacgcggcaaagccagtcattgaat

SEQ ID NO: 53473 - DNA, 201 bp, Homo sapiens
ccattagtccagcaggaggatgataaacccgaagcagttgctgccaggctaagacagtacaaagacgcggcaaagccagtcattgaattatacaagagccraggagtgctccaccaattttccggaacggagacgaacaaaatctggccctacgtttacacacttttctcaaacaagatcacacctattcagtccaaagaa

SEQ ID NO: 53474 - DNA, 201 bp, Homo sapiens
gtctcagccgccgttggattcaccctcctagcggaagggtatataacctggacttcaatccacctcatgtacatggtattgatgacgtcactggtgaaccrttagtccagcaggaggatgataaacccgaagcagttgctgccaggctaagacagtacaaagacgcggcaaagccagtcattgaattatacaagagccgag

SEQ ID NO: 53475 - DNA, 201 bp, Homo sapiens
gtatcccttcttcacccatcatgactgtccccagtgagtgtcctttactattcttgggagtgactcctgtctaacttttcatactggcgagaagaaaagargcctattttaacactttagtggtgttgaaacacattacttactttctgaagatgtcccagtgaatcctctgtcaattcactgccatatgtaatctatatg

SEQ ID NO: 53476 - DNA, 201 bp, Homo sapiens
tatagatcagtcttctccccatccatcctctcaaacataatgagattgtttactttttagatttatgcagtgaaaatgcccagtcaggtctgaatcgtcartgcattatattgactctgagcactttagaatttagagttgcaattgaatgccagctgtggagatggggtgcatatcagatatataaataaagctcaggtt

SEQ ID NO: 53477 - DNA, 201 bp, Homo sapiens
ccgaagcagttgctgccaggctaagacagtacaaagacgcggcaaagccagtcattgaattatacaagagccgaggagtgctccaccaattttccggaacrgagacgaacaaaatctggccctacgtttacacacttttctcaaacaagatcacacctattcagtccaaagaagcatattgaccctgcccaatggaagaac

SEQ ID NO: 53478 - DNA, 201 bp, Homo sapiens
attacttactttctgaagatgtcccagtgaatcctctgtcaattcactgccatatgtaatctatatgataaggaatgcatcttccaagtactgcccaaacycttgccagctcctctcccattgtcccttcatgtgaatatttcttggctaccttagtggaaatatagatcagtcttctccccatccatcctctcaaacata

SEQ ID NO: 53479 - DNA, 201 bp, Homo sapiens
tatcagatatataaataaagctcaggtttgctagggaaccaggtatagagaaaaataagtctgatatgaggaaaattgcacaatttagagtagttatgccrtagagaaaatttccacaaactaggaaatgtagagagttattctatagaatactcaaaagaggaaagtatgtgatttttggaaacaggaaaatcttcaaac

SEQ ID NO: 53480 - DNA, 201 bp, Homo sapiens
ccctccaatgtgatcattgcctttggagtttgggagaggtacgggaagtggcctgatgcctgcttccatacttcactcctccatccatccttccctccctyttcccctccagctaaatggacaattctagccaacattgagtcactcaataagtctcaacagtgggtgtgtttgctgagattgtccagcagttgagcagtt

SEQ ID NO: 53481 - DNA, 201 bp, Homo sapiens
cctgcttctggtgaacttgtctggccggcattcatttaaggcctaaggatgaaggcggtaagtgtcctcaaaagcccggtcgccgcggcctagggcccctycgggtgatagagtcactgcctgagttagcttttaggcaggttttcacccgtgtctagggggcggtggtttagactgggggctttccattccttacaccga

SEQ ID NO: 53482 - DNA, 201 bp, Homo sapiens
ggattacaggcttgagtctttgctcctggccttaaagttcttttttaaagctataaatggcaattaccattcttaatattccatccccctcaccccccccttttttttttaaaggacctaagctatcaagaaagtcttcactgtgtccagactgcttttcatattctttctggacaaggtatgatattttcttaatcaagt

SEQ ID NO: 53483 - DNA, 201 bp, Homo sapiens
tttacgtattctgcctctgcttttttcactctgtggtatatgctcttagatttttgtttttcaatctattttcagtggaagaaagcagaagagaaactagmgcgagagcttcgagaggcagaagcttcagagagtactgagaaaaaacttaaactggtaggcagtttcatattctgttatgcttttaaaatgcgttaagtt

SEQ ID NO: 53484 - DNA, 201 bp, Homo sapiens
gctcccgtccttccatagacacaagttattaatatagcatacagataaaagaagttggtgtaaaatgttataaaagatgtttgaaggttttttcatgaacragggaaataacactgttaaatgcttttctatgtaaagtttttgagggcaatataaatattaagctgtatatttgtgttttttttccaatattagatgtta

SEQ ID NO: 53485 - DNA, 201 bp, Homo sapiens
ttcaatataggatatgtccaagaccttaccaagcatctgtcattgtgttgcatgtgttggtgtcagctgttgccattttcaacttggttcacaggttggckttagcttatagcataagtaacttctaactcatactttaaatattttcctagggtaaatttttacaaggggattcatttttgaatgaagatttaaatcagc

SEQ ID NO: 53486 - DNA, 201 bp, Homo sapiens
aactcctgaaatgtttgatactattaacagttcggtatttatccttctagatgtttttctttgcagatatagtcatatatacttgcttatattttaaaatraaaaatgggcttatactttgaaaactgttctggaacagttttcattttctatattgtgaacttacatatagggttatcccattctttctaatgcctacca

SEQ ID NO: 53487 - DNA, 201 bp, Homo sapiens
gtggtacaataataatcagaaagggtataattgataaaagacatgactattcttttttctccacaatattcttatttatttcagtatattactccaggcartttagaatccatttttcacttccttccctcaaaatagtccacacagagaatctgattagaatcgattcaatgtattgattagtttggatgaattaaaata

SEQ ID NO: 53488 - DNA, 201 bp, Homo sapiens
caagctccttaagtgtttaacatgtcaactcctgaaatgtttgatactattaacagttcggtatttatccttctagatgtttttctttgcagatatagtcrtatatacttgcttatattttaaaataaaaaatgggcttatactttgaaaactgttctggaacagttttcattttctatattgtgaacttacatatagggt

SEQ ID NO: 53489 - DNA, 201 bp, Homo sapiens
tgggagtttttcttttgtttttgaatttctgaactgtttggaaagctcctgggatctttgtgcaaccatctctgtctgatagaactataacatgagccacrtatgtcatttaaaaaaaatgcagacacactaaaaagcaatgaaattaattttaatagtatattatatatattcagattatcatttcaacatgtaataaat

SEQ ID NO: 53490 - DNA, 201 bp, Homo sapiens
tgaggaatttattccttataagtgtatgaagtaaaaagtattcaagctccttaagtgtttaacatgtcaactcctgaaatgtttgatactattaacagttyggtatttatccttctagatgtttttctttgcagatatagtcatatatacttgcttatattttaaaataaaaaatgggcttatactttgaaaactgttctg

SEQ ID NO: 53491 - DNA, 201 bp, Homo sapiens
tattattactgtaaaaatattttattaagattcttggatacttgtaagcagaggaatatgtaagggaacatctaatctgttttagagatcattgaagatcytattcaagagctgaccatagaagaacatttgattgagagaaagaagaaattacaggagaagaagatgcatattgcagccttggcatctgccatattatca

SEQ ID NO: 53492 - DNA, 201 bp, Homo sapiens
acctcaggtgatctacccgcctctgcctcacaaagtgctgagattacaggcatgagccaccacgcctggcctaaacgactgccgcgttttttgttttttgkttttttaaatagtactgggtgtatactagacacacatattttatactaattttgggcttttaatgttctgattttaaaaaatgattgacctttttggtct

SEQ ID NO: 53493 - DNA, 201 bp, Homo sapiens
gtatgagtacagatttaatatctgtgtttaatatatgtaatgaatatatattttatatagtttaatatatattgaatatttatattatgtatatatttgawataatctgacagccagttatttcatcaccattttttttctgctgatataaaatgctgcttaattattgtgttatatctatagtatatttgggtatgtggt

SEQ ID NO: 53494 - DNA, 201 bp, Homo sapiens
tatatcacttaatttttaaaaaatttatagtgctccattttatagatatattgtactttatttggtcagtcgcctatttgcactgggaatacttgcgcacgtgtgtgtgtgtgtgtgtgtgtgtgtgtatcttcatgcatgtgtgtgcatgtagtgccagatcaaagggtatgctcattttaaattttgataaataattgt

SEQ ID NO: 53495 - DNA, 201 bp, Homo sapiens
atatcacttaatttttaaaaaatttatagtgctccattttatagatatattgtactttatttggtcagtcgcctatttgcactgggaatacttgcgcacgtgtgtgtgtgtgtgtgtgtgtgtgtgtatcttcatgcatgtgtgtgcatgtagtgccagatcaaagggtatgctcattttaaattttgataaataattgtc

SEQ ID NO: 53496 - DNA, 201 bp, Homo sapiens
ttttagatctattaagactgaaaattgatctttttttcccctgcagtgagcctgttcatgcgaagaaacggaagcatgaacgcattatagataaatatgaraaaataccaagaactctgcaaactgcaccagagaaggaactgattcatttacttcctatcaaagataaaagtggtataatcccacagactagggagaagc

SEQ ID NO: 53497 - DNA, 201 bp, Homo sapiens
actcaactttgtattttaatggaaagaggattatgctatatattctaccacttttttaaccttagcatttaatcatggtaaacacattataatgtcactaytctctttatgtaaggtttatttaattctttgcttaacaaacaccatagttctgactatgtgccttccagttataaatgccttacaaaaatttaattttca

SEQ ID NO: 53498 - DNA, 201 bp, Homo sapiens
ttggtcttgcttcatattcctgaattgttctgaaagaaaacatgctatgattttgttgatcacttaaaacattttttttcttcttctgtcattcaacttgaaaaacatttttttaatcgtgaaaagtttcgcacatacaggatagtagaatggcatagtgaatgtccatatgccccccatcactcaggttcaacaatgaat

SEQ ID NO: 53499 - DNA, 201 bp, Homo sapiens
actgcttgacagtgaatctcagggaagtggagttttccttcctgaactggatgagcctgagtactgcaatgctcagaacactgctctgtgggaactgcatrctctgcgggtaagagtggccctggtttttttctttttggggatgtttgtgaataattgttttccagtttttcttcaaatagttgttattgccagagtact

SEQ ID NO: 53500 - DNA, 201 bp, Homo sapiens
tcctgccttagcctcccgagtagctaggattacaggtgcacaccaccacatctggctgatttttgtgtttttagtagagccggggtttcaccatgttggcygggatggtcttgatctcctgatctcgtgatctgcccgccttggcctcccaaagtgctgggattacaggcgtgagccaccgcgcctggccccgtattttct

SEQ ID NO: 53501 - DNA, 201 bp, Homo sapiens
ggctggagtgcagtggcacgatcccggctcactgcaacccccgactccccagttcaagtgattctcctgccttagcctcccgagtagctaggattacaggygcacaccaccacatctggctgatttttgtgtttttagtagagccggggtttcaccatgttggccgggatggtcttgatctcctgatctcgtgatctgccc

SEQ ID NO: 53502 - DNA, 201 bp, Homo sapiens
acctcaagcatttatctttgtgttacgaacaatccagttatacttttttagttattttaaaacataaaataaattattgttgactatagtcatcctatctrtcaaatactagatctttttctaagtgtatttttgtacccattaaccatccctactcctatctcctccaactgcctttcccagccagtggtaaccatcatt

SEQ ID NO: 53503 - DNA, 201 bp, Homo sapiens
tgctcccgtccttccatagacacaagttattaatatagcatacagataaaagaagttggtgtaaaatgttataaaagatgtttgaaggttttttcatgaaygagggaaataacactgttaaatgcttttctatgtaaagtttttgagggcaatataaatattaagctgtatatttgtgttttttttccaatattagatgtt

SEQ ID NO: 53504 - DNA, 201 bp, Homo sapiens
agactgcttttcatattctttctggacaaggtatgatattttcttaatcaagttttgtttgccttacctttgaatgctataacatacctaattggtgtttrttgtcatttcaaaggtgatgttctgaatattgatccattgaaattctacacacatctctacaaaacactgttcaaattacatgcaggtatgtatgtttag

SEQ ID NO: 53505 - DNA, 201 bp, Homo sapiens
caatctcattcttctaccttcttcccaggagacaccatctttaatttggtttgtatatacttcccgtccatgtttctctactttgtttatatttgcattcrtagacaacatgtggtattactgtatgtgttttatgacatttacgtattctgcctctgcttttttcactctgtggtatatgctcttagatttttgtttttc

SEQ ID NO: 53506 - DNA, 201 bp, Homo sapiens
cacattttttaaggcttgattatttaatgagaaaggtatgattcagcatatgaatatttgcttttagtccaccttttaggtataaaacaaagtccaggaawgtgataaatatttgtgtggataaccaaagggtctaatccccatcagagcacaagtgaccaatacatgtcacaaattatttattttccacacatatacaaa

SEQ ID NO: 53507 - DNA, 201 bp, Homo sapiens
aagttacctaatttggccttttaaaaaaggtgttagtgtttattatagctactttcaaggaaagtttgaatatgattctagtctctaaagttcttcacgtwttctgacattccctggagggtgactggggaagaattgctccagggtagaagaaccaggcccaagactttaccattctgatctagagacaaaggatactca

SEQ ID NO: 53508 - DNA, 201 bp, Homo sapiens
taaatttgagttaatatatttttatgaagatatttgagaaaagaaaaaaatagcttgtattcaggttcattggcttttgctggatgatccacctaaagaarttacctaatttggccttttaaaaaaggtgttagtgtttattatagctactttcaaggaaagtttgaatatgattctagtctctaaagttcttcacgtttt

SEQ ID NO: 53509 - DNA, 201 bp, Homo sapiens
catagtttggtgacctgtgggccaggccgatttttctggcctcaagagtttgaaaaaaattgaattagttgctgtcttttaaatattgaaagaattcatcygaaattcacatttcccgcttttcttgaaatactgggaggtttggtgacattggcttgtattttacatgacagtagtcagtcagttgctgcctcctctaca

SEQ ID NO: 53510 - DNA, 201 bp, Homo sapiens
tttctcagaattctggaggctgggaagttgaagatcaaggtgctggtaggtttggttgactgatgagggcgcctctctgcttctgagatggcatcttgttkctgcatcttctggaggggaggaaccccatgccctcacatggcagacaggacagaatgggagcagtgccacagcttcacttcatgaagcctcttctataaa

SEQ ID NO: 53511 - DNA, 201 bp, Homo sapiens
cttgctctgtcacccaggctggagtgcagtggcgtgatctcggctcactgcaagctccgcctcccgggttcacaccattctcctgcctcagcctcccgagyagctgggactacaggcgcccaccaccatgcccggttaattttttgtatttttagtagagacagggtttcaccgtgttagccaggatggtcttgatctcct

SEQ ID NO: 53512 - DNA, 201 bp, Homo sapiens
ccagggctcaggtgatcctcccactttagccttttgagtagctgggactacagatgtggggcaccatacctggctaatttttctatttttttgtagaaatkttttttttttttttttttgagagggagtcttgctctgtcacccaggctggagtgcagtggcgtgatctcggctcactgcaagctccgcctcccgggttca

SEQ ID NO: 53513 - DNA, 201 bp, Homo sapiens
gttcctgctaggaatatgagtgtcagttccctcctacctgctcagaatgttactatttaatctttgttagtcaggtaggtgaaaagtttatatatatatamactttttttacctgcttattatttgtcagtttttctcttaaagtaattgtcttaatgacttgtgatgagtttttagtacatattcattttaataaataac

SEQ ID NO: 53514 - DNA, 201 bp, Homo sapiens
ttttttttttttttttggttttgtaaacagttacttttggtacctctcccttatcacatatatatcacttaatttttaaaaaatttatagtgctccatttyatagatatattgtactttatttggtcagtcgcctatttgcactgggaatacttgcgcacgtgtgtgtgtgtgtgtgtgtgtgtgtgtatcttcatgcatg

SEQ ID NO: 53515 - DNA, 201 bp, Homo sapiens
agaaggtcttgccaagtaagggctgtgtaggttgaaatcttttagattccttctaaataggaaagaccaaagaattttcgagagttccctaatgatggccyattatcctcagttctcattccttttctgattgtcaccagcctttacttgaagctattcataacagtgggcttttttgattttctcatctcaaacctttta

SEQ ID NO: 53516 - DNA, 201 bp, Homo sapiens
gcctttttttctccccagtatttggaaattactttcttgatgatgctgccttttaaaagcttcacgtacattatagttttttaaaaaaatctttggactgsatcttactgaagtgcagttgctatattaaaattagggcatagagcacagaaaaatcaagaccatgagaagacattttaccatttagctactttttataac

SEQ ID NO: 53517 - DNA, 201 bp, Homo sapiens
ctagagcgagagcttcgagaggcagaagcttcagagagtactgagaaaaaacttaaactggtaggcagtttcatattctgttatgcttttaaaatgcgttragttgtttaaactagaaatttattgtttcagcttgtagctgtgtaattttggtttctttcatgaggcttagatgtgtgacttttgtgatgtgcgggaaac

SEQ ID NO: 53518 - DNA, 201 bp, Homo sapiens
ttaatgtacatctttcttttgagtctgaatagtcaagtagagtgaatgggggaagaatgctgttctcactttgaggtagtggcagaacagttctgagttcytacggctatgatttcacttaatcctcattaccctgctggtaggtcttattcccatttccagagaggaaactgatggttccctgcagtcacaagtatctgg

SEQ ID NO: 53519 - DNA, 201 bp, Homo sapiens
caggctagttctacaactttgctggtacttttagggtattcttatttgactatatcagattattagacaactattcagtcttctcaggtccattttttaaraattattattattattttaaatagacagggtcttgttctgtcacccaggctggagtgcagtgtgcaaaaatagcccactacagccttgacctcctgggct

SEQ ID NO: 53520 - DNA, 201 bp, Homo sapiens
actacaggtgtgttaaactagccttgaatagccacttaccactactagatcagtggttcttaacctgtttggggatcgtagaaccctttgaattgctgtgrattgggattgaataactgatgctgtagcgctcttctgtaggattaaagccatcgtttggttttagcttttatatgcaagtctgtggctgtgggacattga

SEQ ID NO: 53521 - DNA, 201 bp, Homo sapiens; identical to SEQ ID NO: 18386

SEQ ID NO: 53522 - DNA, 201 bp, Homo sapiens; identical to SEQ ID NO: 18221

SEQ ID NO: 53523 - DNA, 201 bp, Homo sapiens; identical to SEQ ID NO: 19897

SEQ ID NO: 53524 - DNA, 201 bp, Homo sapiens; identical to SEQ ID NO: 18243

SEQ ID NO: 53525 - DNA, 201 bp, Homo sapiens; identical to SEQ ID NO: 19899

SEQ ID NO: 53526 - DNA, 201 bp, Homo sapiens; identical to SEQ ID NO: 19900

SEQ ID NO: 53527 - DNA, 201 bp, Homo sapiens; identical to SEQ ID NO: 23227

SEQ ID NO: 53528 - DNA, 201 bp, Homo sapiens; identical to SEQ ID NO: 22633

SEQ ID NO: 53529 - DNA, 201 bp, Homo sapiens; identical to SEQ ID NO: 19902

SEQ ID NO: 53530 - DNA, 201 bp, Homo sapiens; identical to SEQ ID NO: 19904

SEQ ID NO: 53531 - DNA, 201 bp, Homo sapiens; identical to SEQ ID NO: 19905

SEQ ID NO: 53532 - DNA, 201 bp, Homo sapiens; identical to SEQ ID NO: 23126

SEQ ID NO: 53533 - DNA, 201 bp, Homo sapiens; identical to SEQ ID NO: 20175

SEQ ID NO: 53534 - DNA, 201 bp, Homo sapiens; identical to SEQ ID NO: 18365

SEQ ID NO: 53535 - DNA, 201 bp, Homo sapiens; identical to SEQ ID NO: 18368

SEQ ID NO: 53536 - DNA, 201 bp, Homo sapiens; identical to SEQ ID NO: 18546

SEQ ID NO: 53537 - DNA, 201 bp, Homo sapiens; identical to SEQ ID NO: 18370

SEQ ID NO: 53538 - DNA, 201 bp, Homo sapiens; identical to SEQ ID NO: 21144

SEQ ID NO: 53539 - DNA, 201 bp, Homo sapiens; identical to SEQ ID NO: 22900

SEQ ID NO: 53540 - DNA, 201 bp, Homo sapiens
gtagcccattttgcctgtataagagccatggtatatatcctcctaccctagaaaccatggcaccctttcatattacccctataataggtccacaccgtaayataaactggatctaacttgtaaatcagtagttatgcccagtccttccagctcatttttcttattacagtctaaataattattccaattattctttttttt

SEQ ID NO: 53541 - DNA, 201 bp, Homo sapiens
gatattcccacgttggcttccaaagtgctgggattatagatatgagccactacacttggcctacaattctgctacaatttgacttctaagtctatacccarttgaattgaaactgggtactcaaatacttgtacatgaatgttcatagcagcattattcacattagccaaaggtagaaaaacccagacagatgtccatcaa

SEQ ID NO: 53542 - DNA, 201 bp, Homo sapiens
gggtgcctgtaatcccagctacttgggaggctgaggcaggagaatagcttgaacctggaaggcagaggttacagtgagccaagatctcctcactgcactcmagcctgggcaagagtgggcaggactctatctcaaaaaaaaaaaaaaaacaattatggaaaacaaaatttataaaaatctaaaagatatgtgatataaatg

SEQ ID NO: 53543 - DNA, 201 bp, Homo sapiens
ggttatctatttaaaatcatgctttatagtagtattatacagacatggaaaaatgttcagctacaggtcaacttgtcacgttcggtgactactacctcctytaaccctttgggtgtgttgcagcttcccaaggtggtttaccgtacctattggctttctttaatcctacttttttggtaaatattcccttcattaaatgct

SEQ ID NO: 53544 - DNA, 201 bp, Homo sapiens
catgccaccctgccctgtctgcccaggatgtgaattctgccttcgttcagcatatccatgctgtccatttagtagccttcttggttatcagagctattgtygcagggctactgcattcacataaccctgatattacttaacaattgcaccagagcacaagagtactgatgctggcatattgttacatgtattttttatttt

SEQ ID NO: 53545 - DNA, 201 bp, Homo sapiens
accatgttggccaggctgctctcaaactcctgagctcaagtaatctgcccgcctcggcctcccaaagtgctgagattacaggtgtgaaccaccacacccgkcccaagagtttttatagagcttaatccccatcccctattccctgccgtccctgacccccacctcgccaaaggtctgtggactgagctgaatgttctaacc

SEQ ID NO: 53546 - DNA, 201 bp, Homo sapiens
gtattttaagacccaagtggtttgcttcagggtttccctttaattaaagctggttccttgcttaaaggagaactcatttttttatttcatatttgtcttartcctgtattattctgtttcctcattattcattcattcattactaatcctacatgacatgtttatttttgccagatcactgtaatgaaacattaggacttt

SEQ ID NO: 53547 - DNA, 201 bp, Homo sapiens
ccaggccgggcgcggtggctcacgccggtaatcccagcactttgcgaggccaaggcaggtggatcacaaggtcaggagatcgagatcatcctggctaacayggtgaaaccctgtccgtactaaaaatacaaaaaaattagccgggcatggtggcgggcgcctgtagtcccagctattcaggaggctgaggcaggagaatgg

SEQ ID NO: 53548 - DNA, 201 bp, Homo sapiens
atgggaattgtgggagctacaattcaagatgagatttgggtggcgacacagtcaaaccatatcaatcattcttttaaaaagtaaaaatggtgttccatgaraaaagtaactagttcagttcacaaccctgaaagggtctcagactacagaatatgcagactacactttgggaaccactgctttatggtaaagaaaaattat

SEQ ID NO: 53549 - DNA, 201 bp, Homo sapiens
aagtgtttcccccttcttctatagccacccagctttgtcatggttgccatttaaatggtatgtctttgtccattcttttactttcaacataatttgaaccyatctttgattgagatttcctctacaataaccaataatatttttatgaccatgaataaaactgcatttatcttactagctgcttttttaaaaaattgtaaa

SEQ ID NO: 53550 - DNA, 201 bp, Homo sapiens
cccagccacatccattcattgatttttatggctactcttcccagttacattttatgcatctgtaagctttccttccttagcaaaattgcattcaaaaatgkgtaaaaatgagtaaatacagaatatcactacagagacttgtatcctcaggtttattgatttcacattgtgaaataaacagcaaaggtcttagttttcaag

SEQ ID NO: 53551 - DNA, 201 bp, Homo sapiens
ttgagattttcttaaaagatttcttattttgcctctgatgtagtgaaaaacggggtaagtatgctaactttcttgtatatgttggggggtacttattcaaytccatttcttgtccttacaagatttataaatgtggtatgtttatagtgtggatatatatgttgccactgcaaaggtggtgcatatgtatatatgtgcaaa

SEQ ID NO: 53552 - DNA, 201 bp, Homo sapiens
tcaatgctaggaaagcttatcaaaactactttcccaggaaaccatctatagagatttgcattctacttaatgttaacactatttttaattattttattgtsttaagttataactctcagagaattagctaagtcttggtatatacatggtttgtgctttactcttaaacatctttaaagtgctattattctatatctgttg

SEQ ID NO: 53553 - DNA, 201 bp, Homo sapiens
aaaaatgagtaaatacagaatatcactacagagacttgtatcctcaggtttattgatttcacattgtgaaataaacagcaaaggtcttagttttcaagtgraaactttttggtaatcacaaaattacctgacacataccacgcttaaaccaacccccaaatttagcatattcattttgccatgagccagtcttgagatttt

SEQ ID NO: 53554 - DNA, 201 bp, Homo sapiens
catcatgcattggcagttcggaaaatattggttctctgagttatatagatcttttaaatattgacacattttattatccaaaacaaaaatcagttgttaayataataactgatgtcattagaaaggtcctggatagctttcaagatcacagtggcagctacgaggcttccaaaattcacttgaaagctaaagctttatcac

SEQ ID NO: 53555 - DNA, 201 bp, Homo sapiens
actccttttggctatgttctttatgttggctacttaagctctcagggtcttaattcccgatttgtaaaatggcaatgaccaatcccttgggggcgggcagkggggtggtgggcagtggaaagagagagagagagaatattaaataacataatgtaggccaggcacagtggctcacgcctgtaatcccagcactttgggagg

SEQ ID NO: 53556 - DNA, 201 bp, Homo sapiens
ttacagtgtgcagactgctgatcctggcagcagtggcagcagtctggatggtgtatacttgattagcagcatcattgcagtctattccattagagaatgarccattaccatggacatctgtctgattctctgctgtgatttgttttcacagttcacagtcctaaagaggagtgtctgtaatccgctagtttgttttcttcc

SEQ ID NO: 53557 - DNA, 201 bp, Homo sapiens
tttgtgctttactcttaaacatctttaaagtgctattattctatatctgttggatgagtcattatttttgaaatgataatcctagcatgaactctgatctrtggtgttggattctgtttcttaaataactttaaaattaactgttttcccttgagatttccttctcctatgtaggtatttgagctattgttctaagtttac

SEQ ID NO: 53558 - DNA, 201 bp, Homo sapiens
tgagcggcatctatccaggctggtgggatggtggtaaaagaatttaccaagacagttgtaggtaaagaaaggcagatttttttttttttttttttttttttgagacggagtcttgctgtttcacccaggctggagcgcagtggcatgatcttggctcactgcaacctctgcctcccaggttcacgccattctcctgcctca

SEQ ID NO: 53559 - DNA, 201 bp, Homo sapiens
tagagcaactaatattggttgggatatccacccgtctccccaattgttttacagcttttaaagattataagttttagctgacttcttttcattttgtcttragaaatgagactgcctgtgccaactgtggggcctgagaatcaacaccacttatgtcaacctaactttttgctctaggaaatttttgcaaatcagtttatc

SEQ ID NO: 53560 - DNA, 201 bp, Homo sapiens
ggattacaggtgtgagccaccatgcctggcccacattttagaatattataaagtataagggtttgtttttttccctccagataaccaaaatgtccatatgyaattatcagaggaacctgcccccaatatttcaatgtaggttctttctatttttcctaagtgtcggctggtctgagaaataaagagaaagagtacaaagag

SEQ ID NO: 53561 - DNA, 201 bp, Homo sapiens
aaagtaagtgtactgtggtgccgttttaggaaacaatgacccctcccccacacaagcctttaaatgtgtgtgtgtgtgtgtgtgtgtgtgtgtgtgtgtgkacaagaacagagaaaaataagaaagaatatatgctacattggtgtagagagctaatggagggggaaggacaagagaggaaactgtgtaggaaaccaaaag

SEQ ID NO: 53562 - DNA, 201 bp, Homo sapiens
accgcacccagccctaatttttttttttttttactaactactctcataggtaatgcggaggcctacctttcatcacattttaatctgttgcttttaatttrttccattctgggaaattaaattattaatgttgctaaattatttataatttggaaatcaatttgattaaaggtctaaggacctttcctaaagattgacaag

SEQ ID NO: 53563 - DNA, 201 bp, Homo sapiens
ccagctacttaggaggtggaggcacgagaatcccttgagcctgggaggtagcagttgcaatgagctgagattgcaccactactccagcctgggtgacatasggagactctatcagaaagaaataaaaaatagggccaggtgcggtggctcatgcctgtaatcccagcactctgggaggccgaggcaggtggatcacctgag

SEQ ID NO: 53564 - DNA, 201 bp, Homo sapiens
ctggcaacagagcaagactctgtctcaaaaaaataaaaataaccaaaatatggaatcaacctaagtgcccatcaatggatgaatgaataaagaaaatgtgrtataatacatatatatgatggaatattattcagccattaaaaaataatgaaatctgctgggtacggtggctcatgcctgtattcccaacactttgggagg

SEQ ID NO: 53565 - DNA, 201 bp, Homo sapiens
tggagatatctggtggtttgcttgctttatgttacaggtggaggtgtattctaatgctttcctgccgtaaaagctataatttgagaattggaaaatttttkgggcttttttctttacccccgactcatagtacagctttgagaatataataatattaaaaaagctttccatgctgctgtagcaactcctgtgaaatgattt

SEQ ID NO: 53566 - DNA, 201 bp, Homo sapiens
cctgagtagctaggactacaggcacccactaccacatccagctaatttttgtattttttttagagacagggtttcaccatgttgcccaggctggtcttgamcctctgggctcaagcaatctgcccaccttggcctcccaaagatctaggattataagtgtgagccacagtgcccagcctacatgctagagcatgtgactaa

SEQ ID NO: 53567 - DNA, 201 bp, Homo sapiens
caggaaagacttgcccccatgattcaattacctcccaccgggtccctctcacgacacatgggaattgtgggagctacaattcaagatgagatttgggtggygacacagtcaaaccatatcaatcattcttttaaaaagtaaaaatggtgttccatgagaaaagtaactagttcagttcacaaccctgaaagggtctcagac

SEQ ID NO: 53568 - DNA, 201 bp, Homo sapiens
tctgtttcggccctactaagctgacatagggggtggaggcctggagaggggctggagtgatgagctccaaggcagagagccccaagcactagaaaaagatrgttaatcactctttgttctgctaaacagcccgtgagattagggcttaaccttcagcctctgattttaaaggttattaaatagcagagtagataatttcct

SEQ ID NO: 53569 - DNA, 201 bp, Homo sapiens
catggactgtgtttctttttccctttgcttaggtatctgacagtggtgtgattgcacttgttagtggaccttgtgcgaagaaattagaggtaattttaaarcaattataaagatggtggtgattaaatttttatattcttagaaattatgtttaaaacctagcagataaccaatgctttatcaattacgtattttagggac

SEQ ID NO: 53570 - DNA, 201 bp, Homo sapiens
cctttaatcctttaaataactgtataataattaacatcacctccagttagacatgaggaaacattaaacattttttattgtcaattaatatattgtcattrttttcttttatagatcattcccgagaagtgttggagcaattagtaggcccaaacaaactaaagcaagtgacatggactgtttattgatgcttttttgaag

SEQ ID NO: 53571 - DNA, 201 bp, Homo sapiens
gcagactacactttgggaaccactgctttatggtaaagaaaaattatcagtcaacttcaacatttgcagcaagaatagcatatcattttctggccaggtgyggtagctcacgcctgtagtcctgcactttgggaggccaaggcaggcagatcacttgagattaggagtttgagaccagcctggccaatatggtgaaacccc

SEQ ID NO: 53572 - DNA, 201 bp, Homo sapiens
caggtctggctaatttttgtatttttagtagaaatggtgtttcaccatgttggccaggctgttgtcgaactcctgacctcaggtgatctgcccgccttggmctcccaaagttctgggattacaagcgtgagctaccacgcccagctgtttgagcgttctatagtggaaaaaatgtgaaagtcatggtattaactaaatttt

SEQ ID NO: 53573 - DNA, 201 bp, Homo sapiens
ggcaacaagagtgaaactccgtttccaaaaaaaaaaaaataataacaaatgcggttgagcattccttttttctttctttctttctttttttttttttttttgataatgagtcttgctctgtcgcccaggctggagtgcagtggtgcaatcttgactcactgcaacctccgcctcccaggttcaagtgattctcctgcctca

SEQ ID NO: 53574 - DNA, 201 bp, Homo sapiens
caaagtgctgggattatagatatgagccactacacttggcctacaattctgctacaatttgacttctaagtctatacccagttgaattgaaactgggtacycaaatacttgtacatgaatgttcatagcagcattattcacattagccaaaggtagaaaaacccagacagatgtccatcaattgatgaatcaataaacaaa

SEQ ID NO: 53575 - DNA, 201 bp, Homo sapiens
gcaaacaatcttttttgttctgtgttcctgtttaaaaagcagattaaggccgagcacaaggctcatgcctgtaatcccagcagtttgggaggccaaggtgrgaggctcacttcagcccaggagttcaagaccggcctgggcaacatatagagaccccatctctacaagaaatacagaaaattagctgattgtggtggtgca

SEQ ID NO: 53576 - DNA, 201 bp, Homo sapiens
ccaccatgctcagccttaatcagaaatgttttatgtcttgagatgtctgacacaaatatgataaaagagtaacaaaattctaggtttgaggtacatagatrtatatcaccctgttttatatttctgtatttttgaaattttttattataaaacaacaagcaaaaacttgcagaaatgaaaagaagacttgattttaaatta

SEQ ID NO: 53577 - DNA, 201 bp, Homo sapiens
cacaaatatgataaaagagtaacaaaattctaggtttgaggtacatagatgtatatcaccctgttttatatttctgtatttttgaaattttttattataaracaacaagcaaaaacttgcagaaatgaaaagaagacttgattttaaattacaaatatcataaactagaaattccacatttagtagaaaaataagaatata

SEQ ID NO: 53578 - DNA, 201 bp, Homo sapiens
tgatcttgaaaacagtgctgagtgaaaaactaaacaaatctatgacaagtcccatgtttataaattagaaatgcatgcatacaataaacatgttaaaaggmaatatacaatgaaaggatacacattaaacatgagaatggtttcctagaggggtggggaatgggagtgggaaatggagataacaaagaaatggaaagaata

SEQ ID NO: 53579 - DNA, 201 bp, Homo sapiens
tttcactatctaattgggttctgaatgacttttgcctatttcctaaaaggaattcaacctgtggacaataaagccttgccattaattgcagatactacagmctgtgtagagaattcctgaaacattccaaaagagttctgaataatgacagcatcactggaaaatcagtatttcctcacaggtggactactttgaaaaggg

SEQ ID NO: 53580 - DNA, 201 bp, Homo sapiens
ataatttttctaaattgtctgagtgttttacaataataataccttattttattttcagaaaggtaaagccatttctattttggaaaaaaaataaagaacasaaaaatacaggaaagagctcagaatgcttaggaattaatctattatttgtcaacctcaagaaaacacccaataatactggggtattttattagctcccaa

SEQ ID NO: 53581 - DNA, 201 bp, Homo sapiens
aatatgttttttttcgtttgtttttttttttgagacagagtctcactttgtcactcaggctggtatgcagtgatctcggctcactgcaacctccacctccygggttcaagcgattcttctgcctcagcttcccaagtagctgggactacaggtgcacaccaccacgcccagctaatttttgtatttttagtagagacaggg

SEQ ID NO: 53582 - DNA, 201 bp, Homo sapiens
tggtttatagcatcctctgactcaaactgaaggacaaacttaaattttgttttttgagacagggtcttgttctgtcacccagggtggagtacagtggcacratcatggcttacagcagccttgactgccctggctcaagcaatcctcccacctcagcttcctaaatagctggggctacaggtatgtgcccccactcctggc

SEQ ID NO: 53583 - DNA, 201 bp, Homo sapiens
tagtggaccttgtgcgaagaaattagaggtaattttaaaacaattataaagatggtggtgattaaatttttatattcttagaaattatgtttaaaacctascagataaccaatgctttatcaattacgtattttagggactttgttggtgggtgttctatctctttattgccagagtaaataaaaattgttaggatataaa

SEQ ID NO: 53584 - DNA, 201 bp, Homo sapiens
tttccataaaagttatgctatgagtatgcaatttcagtaagaccctaatctgccagaaatattttcttttttttaatgccttaatttaatatgttttttttcgtttgttttttttttttgagacagagtctcactttgtcactcaggctggtatgcagtgatctcggctcactgcaacctccacctcccgggttcaagcga

SEQ ID NO: 53585 - DNA, 201 bp, Homo sapiens
ttttccataaaagttatgctatgagtatgcaatttcagtaagaccctaatctgccagaaatattttcttttttttaatgccttaatttaatatgttttttttcgtttgttttttttttttgagacagagtctcactttgtcactcaggctggtatgcagtgatctcggctcactgcaacctccacctcccgggttcaagcg

SEQ ID NO: 53586 - DNA, 201 bp, Homo sapiens
gttgccaaaactcttttatttgttagatcaattcaccatatgatgatttggccaaatagtaataggttgtttcttttaagtataaaacgtagagcaactawtattggttgggatatccacccgtctccccaattgttttacagcttttaaagattataagttttagctgacttcttttcattttgtcttgagaaatgagac

SEQ ID NO: 53587 - DNA, 201 bp, Homo sapiens
acccaagagttggagtccagcctggcaacatagtgagaacttatatcttaaataaataaataaataaatacttttttattttaattttaattaattaattwatttatttattttgagacggagtcttgctctgtcgcccaggctggagtgcagtggtgtgatctcagctcactgcaacttccatgtcccaagttcaagcga

SEQ ID NO: 53588 - DNA, 201 bp, Homo sapiens
gtggaccttgtgcgaagaaattagaggtaattttaaaacaattataaagatggtggtgattaaatttttatattcttagaaattatgtttaaaacctagcrgataaccaatgctttatcaattacgtattttagggactttgttggtgggtgttctatctctttattgccagagtaaataaaaattgttaggatataaaat

SEQ ID NO: 53589 - DNA, 201 bp, Homo sapiens
ataaagatgggaaaaatacacactggggacttcaaaagggaggaaggaggaagggaagcaaggattgaaaaactacctgtcaagtactgtgttcactcttkgggtgatgggttcaattgaagcctaaacttcagcatcatgcagtatatccctgtaactaacctgcacatgtaccccctgaatctaacagttttaaaaagc

SEQ ID NO: 53590 - DNA, 201 bp, Homo sapiens
ccatgcccagccagtctaaacaattattctgtaggttaagctattatcctggaagtccctttgacaacttctcttttatttttaggaagtccctttgacarcttctcttttttatttttaggttgccagccttaaccaaggctgtaaccatagattgtatctgggtatcagtgacatctgtagtgaagattagatctttat

SEQ ID NO: 53591 - DNA, 201 bp, Homo sapiens
ggatctaacttgtaaatcagtagttatgcccagtccttccagctcatttttcttattacagtctaaataattattccaattattcttttttttttttttgrgacagaatctcgctctgtcacccgccgaggctggagtgcagtggtgcaatcttggctcactgcaacctctgccttccaggttcaagtgattctcctgcct

SEQ ID NO: 53592 - DNA, 201 bp, Homo sapiens
gaacctaattttgtacccttctgggacaaggtacagtctgagactggcagttggtcagcaagctatttctggtttgtaacaaagtaagaagcttgagccaractagtaattaagtgtgtcactaagcacattatttagtccagctgatgaggctttctccatgaaggaaacagggcttggtttatgttcttgcataaactc

SEQ ID NO: 53593 - DNA, 201 bp, Homo sapiens
tagagaatcctttggatctgggacatgaatagttttgaatagagggaccgaggaaagagaagaattagaaattactcttttagttgggggccgtggctcaygcctgtaaccccagcactttggaaggctgaggcaggtggatcacctgaggtggggagttcgagactagtctgaccaacatggagaaaccctgtctctact

SEQ ID NO: 53594 - DNA, 201 bp, Homo sapiens
tttggaaggctgaggcaggtggatcacctgaggtggggagttcgagactagtctgaccaacatggagaaaccctgtctctactaaaaatacaaaattagcyggccgtggtggtgcatgcctgtaatcccagctccttgggaggctgaggtgggagaatcgcttgaacctgggaggcagaggttgcggtgagccgagcttgc

SEQ ID NO: 53595 - DNA, 201 bp, Homo sapiens
attcagtttcctcatctgtaaaacaggcataatgagagtacctacctcatagacttagtcatgattatctgacaattctttattttattttattttatttwaattttttgggagacggagtcttgctctgtcacccaagctggagtgcaatggtgcaatctcagctcactgcaacctccacctcctgggttaaagcaattc

SEQ ID NO: 53596 - DNA, 201 bp, Homo sapiens
aggctctgcattcacttttgttttgagagactgctcacctgtggctcaaccaaataaatgaggctggtctcaaactcctggactcaagagatattcccacrttggcttccaaagtgctgggattatagatatgagccactacacttggcctacaattctgctacaatttgacttctaagtctatacccagttgaattgaaa

SEQ ID NO: 53597 - DNA, 201 bp, Homo sapiens
tatgctagtaaaacatttaatatgtcacttaagaaatttgttgccctcattgtattatatgttcattcttatcacaactgtgataccatgttaatcactgygtattccaaatgaaagaactagtctctactttataaaatgttactcagtacaatcaaagtagatcaggtagatgaatgctcaggttcagggctgaggttg

SEQ ID NO: 53598 - DNA, 201 bp, Homo sapiens
gcgtacatatgcacatgatcttccttatagacatttttcccttagtgttctgtcagtagatgacacctatgttgacctaaaaactaatatcagaaatctgsggattatccttgatactttctttccccttattatttatgtttaatttgtcaccaagtcctgtgaattttacccccagagtatatatttctcaagttctct

SEQ ID NO: 53599 - DNA, 201 bp, Homo sapiens
aggatttattttattttatttttctttattttattttattactttaaattctgggatacatgtgcagaacgtgcaggattgttacatagggtatacatgtrccatggtggtttgctgcacctatcaacccatcaccctcacccttccccgcccaccggctccagtgtgtgatgttcccctccctgtgtccatgtgttctca

SEQ ID NO: 53600 - DNA, 201 bp, Homo sapiens
cttttgtgttgcctgttcttccaattgttatttccttagtaacactcctcccgcccctggcaggttgtaacagttatgatagcaatgatttgtagtgactrccaaccctcagggaaccaggatactatagattcatagggttataagggaccttaaaggtcatttagtccagtcttgtagacttgattctctagggatatc

SEQ ID NO: 53601 - DNA, 201 bp, Homo sapiens
caaatgcaatttttaacatatctttctggaagtgctcttttttcttggagcttcccaaagtctcaaagaacttttcagcctcagttttttacatttttagyattacagtggtgtttcagtaaaaagaattctaatgtcaaatgtaaactggtaatttgtagagtggggctccgtccccattaacttgagaatgccaccaca

SEQ ID NO: 53602 - DNA, 201 bp, Homo sapiens
gggaggctgaggcaggaagattgcttgaggccaggagttcaagaccagcctgggcaatatagtgagactttgtctccacaaaaactaaaaaaaattagccrggtgcagtgatgcatgcctatagttctagctacttgggaggctgaggttagaaggttgcttgagtccaggagtttgaggctgcagtgagctatgatcgtg

SEQ ID NO: 53603 - DNA, 201 bp, Homo sapiens
gaaagtaaaagtattccaggcccacaggtaatataatcagttaaatttggttggcttttgcaaacttacaatacatacataaaattacatgtatgtatatratgtgcatatgtttttaacatatctattatactatgcatactttttgtaactttttaaaaatttgatatagaatggacatttttctattgcagtacatac

SEQ ID NO: 53604 - DNA, 201 bp, Homo sapiens
tcttctcttgccttcattattttattttattatttcttctttttctcttttttagagccaccaatactggatttgtttgtttttcatttttttcttttgtrgaaacggagtcctcctgtgttgcccaggctggtattcaaactcctggccttatgcattcctcccaccctggcctcccagagtgctgggattacaggtgtg

SEQ ID NO: 53605 - DNA, 201 bp, Homo sapiens
ttagtagagatggggtttcaccatgttggccaggctggtcttgaactcctgaccttgtgatctgcctgcctcggcctcccaaagtgctgggattacaggcrtgagccaccacgcctggtcacttggttatttataaacctaagaattaagaaaaaattttttatgactttaaaataatatttattgtggcaaactcaggga

SEQ ID NO: 53606 - DNA, 201 bp, Homo sapiens
tgtctagaacaaagttggtgataaacacacagtgattattactactctgaatcaaaagtgaaggattgctaaaccttgtaagcagtcactgcagcttttargcctggtttttcagtgaaaagatcaaagagtagccttctttgttcacctaatgataattaagggtgaaaaatgttgatgcatttcctgaaaggtatgtct

SEQ ID NO: 53607 - DNA, 201 bp, Homo sapiens
acgcatacgtgaatgagcagactaaggtcacgggaagaaactcaaggaaggtttttttgaattgcaagagacaaaaactcttagcacataaagcctgtgcrttataagcaggatacgtcttggtggagctgctgtgcgtaggagcattgttcttagctttcagtgcatagaaactcagttttatactttgactcaggagtg

SEQ ID NO: 53608 - DNA, 201 bp, Homo sapiens
ttttaaatttttcatattgtgattattagaatgagtggtggtaggaggctatatgcagttcagcaatagaataagaagctctatttctccccagatggagrtatatttttatcacaagagtagtatatgcttgaaaaatagtcaaaagaaagcctgtactttacaatcttcactttcaacaatttaatatatacccttcta

SEQ ID NO: 53609 - DNA, 201 bp, Homo sapiens
tcatttgatctcattagaaccagggttgatttaataattttttcagtagtgcctttaatatgtgtgttgcttcacagtttcttatagaaaatagtaataaygttcattttgtataccctatttataaacccgtgcacttaatttatccccagaactgctgtttcttatgaactagttatggactctggttcacagctgtct

SEQ ID NO: 53610 - DNA, 201 bp, Homo sapiens
atatatctctaaacacactacagctgtcccccatcaagatgtaaagaacgtgaggacataggacaaagagtgagaggacaatatggcttgaacagatgtgrtaagacagctggagttgacctaaaaaagggtgtaaaatccaggtgtgtaaggcaataacagatgtaagggagggtagagttggaactcgggctttcaaac

SEQ ID NO: 53611 - DNA, 201 bp, Homo sapiens
tccctgagtgaaccacttttaatagttaatatccagatattccatgcacatgtaagtaatagttctcttaaaacattaatatttatgtagtatgtattctktgacatcacttgaaagtagcaaaccatggttgagtttctaaatgtataatatttatattttcatgggtctagggagaagagacttgctaagaaatactat

SEQ ID NO: 53612 - DNA, 201 bp, Homo sapiens
agaaagaaacaaatacaattataatttgtatttactatggtcgtatacagaacttatagaaagtaattatttgtgtcagtgttaagacttcattatcttayagaatgattttaattaatatacaagcataaaatatttacagtctcacttaacgttccttattatataaatcacatttaaaaaataagtattttaactgat

SEQ ID NO: 53613 - DNA, 201 bp, Homo sapiens
ggcaggaagattgcttgaggccaggagttcaagaccagcctgggcaatatagtgagactttgtctccacaaaaactaaaaaaaattagccgggtgcagtgrtgcatgcctatagttctagctacttgggaggctgaggttagaaggttgcttgagtccaggagtttgaggctgcagtgagctatgatcgtgccactgcatt

SEQ ID NO: 53614 - DNA, 201 bp, Homo sapiens
atttaggaacttgttagcaactcacaatctcagacccttccagatctactaacaagttcccagggcgaatcatatgcactaaagtttgagagaggcactgytgtatattatgtgattgttctgcattggttcaacatttccagggaaaaggaacccactactatcaaaaataaagctttacattttcaggtagttgtattt

SEQ ID NO: 53615 - DNA, 201 bp, Homo sapiens
ctcattagaggatgacaggaaagaatacatttcctgtttccttaccctgtagttcttatactcttcatctggtctaaaggggccaaaaactttgggttacraggcctcctatccaggaacattggaggaattgttactgtccatgtgtcacctgcccttttttactttatcatccttcagaaatattttccctgaggtctt

SEQ ID NO: 53616 - DNA, 201 bp, Homo sapiens
agatatctttgatgtgagacacatgttaatgtgcctgtggaacacagtttgtttttggaacaaattgacaacccatttttctaaaatagtgttattttcarttcctcaagctaatatttttattatatgtatgtgtgtatatatttgcatttttgaggtgatgaaggtcagattgttttctttggattgtttgtttaccct

SEQ ID NO: 53617 - DNA, 201 bp, Homo sapiens
ccctgtagttcttatactcttcatctggtctaaaggggccaaaaactttgggttacaaggcctcctatccaggaacattggaggaattgttactgtccatstgtcacctgcccttttttactttatcatccttcagaaatattttccctgaggtcttattgcaggaagctctgtatcgtggtgattttttttttaaattac

SEQ ID NO: 53618 - DNA, 201 bp, Homo sapiens
ttgtgctttttttaccaccaatcagcaatatattatgacaccaaacagctcctaagagaataaaatccttaattttttgcatttcagtatcaaagacatasaaagttcgtaaatgactatattttatactatggtggcaaaaaagaagacttcaagcgtttggggtaagtatcaggaagtttacatagaagggaatgtggg

SEQ ID NO: 53619 - DNA, 201 bp, Homo sapiens
tatatgcagttcagcaatagaataagaagctctatttctccccagatggagatatatttttatcacaagagtagtatatgcttgaaaaatagtcaaaagaragcctgtactttacaatcttcactttcaacaatttaatatatacccttctagattttctgaatgtgtaagcatgtatagtgtgtgaatatttttaaaaag

SEQ ID NO: 53620 - DNA, 201 bp, Homo sapiens
agttaattgtattggcgaataattcaaaatgtgctttaagtataataggtttttaaaaatcatcttttttaaatgaacaggaaactctgatgaggaagaamgtgcttcagaatctgaactttggaagggtccactaccagagacagatgaaaaatcacagtaagtgctgatattaatagagaatatgtaccttttcaatca

SEQ ID NO: 53621 - DNA, 201 bp, Homo sapiens
tttttgccttaatttaaggaaaaacttgtcccttagaactgtctgacaaaaggaatggagaaatgggctgcctctggagtagcgagtgttccagcatggaytggattggcacttattggaggtgttgcagtgaaagttcattcattggataagtgttggattaaatgacctccaggttcccctttcaactcagaaagtcag

SEQ ID NO: 53622 - DNA, 201 bp, Homo sapiens
gttaagttactgaattggagtcattaagatcattcctaacatatacaagaaattattagctacaaaagtaaaattagagaaggtgtattcatgatacattrttagcaaaggtctgaatataatgctttaatgattattacctttatacttttgcctttagaacattcagttgaatgttctgcatatttctaagtatgtaga

SEQ ID NO: 53623 - DNA, 201 bp, Homo sapiens
tattttacaaattaaagatttcatagcaagacaactttcaacaaaaaagaaaggtttatttttttcctttctttattaatttttggaataatgaattggtrttactgtttttcagccaaatccacatttcaaaagtagaagttaaatatcactttaatcccaatagaattttggggcaggctagtactcatttttggaagt

SEQ ID NO: 53624 - DNA, 201 bp, Homo sapiens
agcttcttccaatacaattgagtggcaactgaggtcttccagcatttctaagaatttcagttctaaaatgaagtcccagcattttgggatgctgaggtggrcggattgctcaagcccaggagtttgagaccggcgtgggcaacatggcgaaaccccttatctacaaaaaaaaaatttttttaagtttgccaggtgtgatta

SEQ ID NO: 53625 - DNA, 201 bp, Homo sapiens
aattgatgatgtactgttcacaaatactgtaattctcctggaatatagtaaatcatattccagagaggaaatttggagtaattgaaattgtgggcgcaggmatcaagtacagcagattagccacttactggatttgtaaatagatttacttaactttgattacttcattcctaaatgaagataactttctaacttgcagaa

SEQ ID NO: 53626 - DNA, 201 bp, Homo sapiens
tatacaagttggttgaacatattactctggtcagtttttaaaggctgactatggttaatttgcatattttagaagtacattttaggggtaatactagatcrtatagataaatattatcaccaactaccatagctaatattcctttcctttctgcaggtcaatttttctgtggaaataaatattgtgataaaaaagaaggct

SEQ ID NO: 53627 - DNA, 201 bp, Homo sapiens
atagaataagaagctctatttctccccagatggagatatatttttatcacaagagtagtatatgcttgaaaaatagtcaaaagaaagcctgtactttacartcttcactttcaacaatttaatatatacccttctagattttctgaatgtgtaagcatgtatagtgtgtgaatatttttaaaaagctaaatagactcatat

SEQ ID NO: 53628 - DNA, 201 bp, Homo sapiens
aaaaagtattcacaatgacttataaaaacatacacaataagtttttttaaggttaaaaaagtcagaataatggaaaaataaggtagaatagcaatgtaaarctacaggtgaaatttatacacacaaatgtattccaaaaagtcctgcataattgcagagatagatcacagatttgtcagtgttcttcctaacaaccaaacc

SEQ ID NO: 53629 - DNA, 201 bp, Homo sapiens
tgagaagagaaatgcacttgttaaattaagtaagttgattttagggggtatatgattgattcttccaagtttgtctttaatttaaaaatatatagactttmaaattcaaatgcaatttttaacatatctttctggaagtgctcttttttcttggagcttcccaaagtctcaaagaacttttcagcctcagttttttacatt

SEQ ID NO: 53630 - DNA, 201 bp, Homo sapiens
aggaaatgactatactcacattattattagatatctttgatgtgagacacatgttaatgtgcctgtggaacacagtttgtttttggaacaaattgacaacmcatttttctaaaatagtgttattttcaattcctcaagctaatatttttattatatgtatgtgtgtatatatttgcatttttgaggtgatgaaggtcagat

SEQ ID NO: 53631 - DNA, 201 bp, Homo sapiens
tttttttgtaagacagggtcttgttctgtcacccaggccccaggctggagtgctggaatacagtggcatgatcttggctcactgcagcaggcttaacctcrgaggcccatgtgatcctcctttctcagcctcccaggtaactgggactacaggcctgcactaccatactcagctaattttgttgttgttgttgttgcagag

SEQ ID NO: 53632 - DNA, 201 bp, Homo sapiens
ttcattattttttgttttgtgctggctattacagaccatatgagcacataagatatgatctctgcctaaaagaacgtaacattttaatgagggagataagrctaaggaacatgaaagattagaaaacagtgaagtgcttatctgtaagactataagcaaactagaatattgctaagaattctggttatagctacaatgatt

SEQ ID NO: 53633 - DNA, 201 bp, Homo sapiens
caggtattcattattttttgttttgtgctggctattacagaccatatgagcacataagatatgatctctgcctaaaagaacgtaacattttaatgagggasataagactaaggaacatgaaagattagaaaacagtgaagtgcttatctgtaagactataagcaaactagaatattgctaagaattctggttatagctaca

SEQ ID NO: 53634 - DNA, 201 bp, Homo sapiens
aaaatacattcaagtataagaccagtggaccaatgttatctcaggatgaaatcatagatacatacttcaacaaaggtgtacacaggctaaagtgggagagygtattttagttttcatccatttccaacagtgagaggtgtgaatgcttatgcaatatagaaaaaattcccctttttcagttctaattttttatccttaaaa

SEQ ID NO: 53635 - DNA, 201 bp, Homo sapiens
tattgtttaacacaaaggagaaaagaaatcaagtcaaaaaaaagaaaagataaaaccaaaaaagactgtgaagagtcatcacataaaaaatccagattatyttctgcagaagaggcctccaagaaaaaagataaaggtaaaaggaaattaagataaggcatctactcacatttgtgagcatgaaatataatctgccatatt

SEQ ID NO: 53636 - DNA, 201 bp, Homo sapiens
cctggacaattggcaacatagattctaaatagctgactttgtactcctttacagatgcatggtcatggaggctatgattctgattttagtgatgatgaacrctgtggagaatccagcaaaaggaaaaaaaggtaagtaatttttttttattgatctatttttcacatcctttctagattaatatgaagtataaataaacaa

SEQ ID NO: 53637 - DNA, 201 bp, Homo sapiens
tttcattcaactgtcaaggactgtttatttgtaaatgttgtagctcagaaggggcttgaatggtggtctcttgccattacttgccttcaaagtgaagttartatggaggatgaaagtataatgcagcacagttcttacgcatacgtgaatgagcagactaaggtcacgggaagaaactcaaggaaggtttttttgaattgc

SEQ ID NO: 53638 - DNA, 201 bp, Homo sapiens
ttataataaattacatttttgatgctttacattttctagatttttcattcaaaaatactactttgtaagaatagaatttgagcaaatctagttggatactytgctccaggattatattcatcactataactagggctgacagtctatggcagggtgtccagtcttttggctttcctgggccacatcggaagaagaattgtc

SEQ ID NO: 53639 - DNA, 201 bp, Homo sapiens
gaggctatatgcagttcagcaatagaataagaagctctatttctccccagatggagatatatttttatcacaagagtagtatatgcttgaaaaatagtcamaagaaagcctgtactttacaatcttcactttcaacaatttaatatatacccttctagattttctgaatgtgtaagcatgtatagtgtgtgaatattttta

SEQ ID NO: 53640 - DNA, 201 bp, Homo sapiens
tttacattttctagatttttcattcaaaaatactactttgtaagaatagaatttgagcaaatctagttggatactttgctccaggattatattcatcactrtaactagggctgacagtctatggcagggtgtccagtcttttggctttcctgggccacatcggaagaagaattgtcttgggccacgtactacagtggagca

SEQ ID NO: 53641 - DNA, 201 bp, Homo sapiens
ttccattttcattccattatgcttctactatattcctttattcttaagagtagaaatttctatttactggtggcttagagctgttcagcagtttcttcttmtttgtgtttttttaacatgtaggtggatatggattatgtgaagggaaatgaggcttttttttgtaatttagttttaaatggctaagtgatagaatataga

SEQ ID NO: 53642 - DNA, 201 bp, Homo sapiens
tcactgcgtattccaaatgaaagaactagtctctactttataaaatgttactcagtacaatcaaagtagatcaggtagatgaatgctcaggttcagggctraggttggacccttcgtattatgcgtacatatgcacatgatcttccttatagacatttttcccttagtgttctgtcagtagatgacacctatgttgaccta

SEQ ID NO: 53643 - DNA, 201 bp, Homo sapiens
ggcaccacactctaaagggaacattgaaaacttgaagcaggtcaagaagaaaaaaactgaggtatggagaaaacttgaaattatattgtaggaagaatgtyggaggaactgcagatgtttacctgggagaagagtgaaaggatgggagggaagaggtgaggaagtagacatggaaattactgtatggatatttgcaaggct

SEQ ID NO: 53644 - DNA, 201 bp, Homo sapiens
attagcagtgtggttattcaaaatcagccattcagtggtgtcttttctttttagggttatgccaagaatgttccattaaattaaatttccatcacaggtamtgtcttttaaaatgccattcttaatgtttagtaatccaggatatagtcatttacctgcactaagtatctaaatgtagacttaggtggttgatggttgaat

SEQ ID NO: 53645 - DNA, 201 bp, Homo sapiens
ggcgcactcgggggacggtgccatttagatgtaacacgtggccgtgtcggaccggaagtggtgcccagtcgggacccgtagggagaggcgggttgcgggcggcggcggcggcggcggcggcggtggtggttgtggcgaggctgtgcggcagggcgcacgggacctgtcctgcagcggctctctcaggccgtgggtcgtcgc

SEQ ID NO: 53646 - DNA, 201 bp, Homo sapiens
tgaggaagtagacatggaaattactgtatggatatttgcaaggctgctactatgtaggagacttattttttatgactctgggttggcagaactgcccaaaracagatttttgccttaatttaaggaaaaacttgtcccttagaactgtctgacaaaaggaatggagaaatgggctgcctctggagtagcgagtgttccagc

SEQ ID NO: 53647 - DNA, 201 bp, Homo sapiens
gcgcactcgggggacggtgccatttagatgtaacacgtggccgtgtcggaccggaagtggtgcccagtcgggacccgtagggagaggcgggttgcgggcggcggcggcggcggcggcggcggtggtggttgtggcgaggctgtgcggcagggcgcacgggacctgtcctgcagcggctctctcaggccgtgggtcgtcgct

SEQ ID NO: 53648 - DNA, 201 bp, Homo sapiens
cgcactcgggggacggtgccatttagatgtaacacgtggccgtgtcggaccggaagtggtgcccagtcgggacccgtagggagaggcgggttgcgggcggcggcggcggcggcggcggcggtggtggttgtggcgaggctgtgcggcagggcgcacgggacctgtcctgcagcggctctctcaggccgtgggtcgtcgctg

SEQ ID NO: 53649 - DNA, 201 bp, Homo sapiens
ccatttagatgtaacacgtggccgtgtcggaccggaagtggtgcccagtcgggacccgtagggagaggcgggttgcgggcggcggcggcggcggcggcggyggtggtggttgtggcgaggctgtgcggcagggcgcacgggacctgtcctgcagcggctctctcaggccgtgggtcgtcgctgcagctgccgggaaagaag

SEQ ID NO: 53650 - DNA, 201 bp, Homo sapiens
acagctactgtgccttctgattctgtcattcttccctgctttctattccggtgtgccttttttttttttttttttttttaagatggagtctcactctgtcrcccaggctggagaacagtggcttgatctcggctcactgcaacctgtgccgctgtggttcaagcgattctcctacctcaggctcccgagtagctgggatta

SEQ ID NO: 53651 - DNA, 201 bp, Homo sapiens
gggagaggtgccaccatatgaaatatttttattttaatcaatctgggtatagttatgattattctagaaactaagaattatttgatggctgaatcatggcratatattgatatatagcagaatcagccaatatgttgacttaaagtattttatttttattaatctcatataatgtatcatgtagtaatttttttactctat

SEQ ID NO: 53652 - DNA, 201 bp, Homo sapiens
atctagttggatactttgctccaggattatattcatcactataactagggctgacagtctatggcagggtgtccagtcttttggctttcctgggccacatyggaagaagaattgtcttgggccacgtactacagtggagcacacacaattgtgaatctgttggttcacattgttggcctgaagcagtgctgggcctgcgta

SEQ ID NO: 53653 - DNA, 201 bp, Homo sapiens
ttaatgtttagtaatccaggatatagtcatttacctgcactaagtatctaaatgtagacttaggtggttgatggttgaattggttgatcatgtagaaaatstggcattgtcgtatggctacataaacgaggggtttagaagtccgctatgccctattcttgccaagcagttttaaatgtaaaggcctatgtgaggtggtag

SEQ ID NO: 53654 - DNA, 201 bp, Homo sapiens
ttcttgggcaaactgcttaacctctgtaaggcttaattttatcacctgtaaaaatgaggctactcaggctattgtggggaataaatgaaagtgcatgtaargtgcttgccacagtacctggcattaaagatgttcacactgattcttcgcaacttgcctttgtgatggtcaggttttatgcgctggataacagttaaaagt

SEQ ID NO: 53655 - DNA, 201 bp, Homo sapiens
aaggaaaaaaaggtaagtaatttttttttattgatctatttttcacatcctttctagattaatatgaagtataaataaacaagagtgaaatttttgaattstgtttacatgtgaagacaattgctctagtgaatgaatttttgttcattaagctaatacattgattaaaaattggagaacaattgtgggaaaaataaaaat

SEQ ID NO: 53656 - DNA, 201 bp, Homo sapiens
tattgtctcaaagttgtcttgctaggctgactcttggtcatttggttagagagaacagcttttgttgacgattttttagtccgtgcctgttggtgtttccrggttgtcaccttctttacctccaattctaggatacatgagacaaaaagaaaacctagggaactcgctatcatgtcataccataggtcttcaggaggtccc

SEQ ID NO: 53657 - DNA, 201 bp, Homo sapiens
tccaggtatttggtttttctgtctctctcttttttttttttcctgaaatattaactggtttgttacaatatggaaataccataatctgattaaattgtctrttagtacacattatgatcagttaaatcactatacatgtttaatagtcacagagaatattgtagaaggtgaggttagctattatgtgcatgtttggctcta

SEQ ID NO: 53658 - DNA, 201 bp, Homo sapiens
caaacaatttgaaaatgtttaaaatagaaagtaaaagtattccaggcccacaggtaatataatcagttaaatttggttggcttttgcaaacttacaatacrtacataaaattacatgtatgtatatgatgtgcatatgtttttaacatatctattatactatgcatactttttgtaactttttaaaaatttgatatagaat

SEQ ID NO: 53659 - DNA, 201 bp, Homo sapiens
gaagaagcaagaaatagaaggtttcatctcatagctatggatgctgtatcctttttttatttccagatttttataactagtagaatattttaaaatctgcttttttgttttataaaatcttgtgaagtcaaataggcttttttatttttaaagataagtatttagtgatgtaggattttgccatttatacttttgggtaca

SEQ ID NO: 53660 - DNA, 201 bp, Homo sapiens
aatgtaaatcttaacttgcgtgtcttctgtgtaaccaagaaaaagaagaaactagatcagagacaactatattgcaagagataattgacttacaagagttratattggaattgctactttaactcagtgtaacttagagaagtttcgatgagacttaaaatccttggcctttttgctgagattctttggtaacccttggct

SEQ ID NO: 53661 - DNA, 201 bp, Homo sapiens
aaaccagcctaggcaatatagtgagaccttgtctctataaaaaataaaattagccaggcagggtagcacatgcctgaagtcctagctattcggaaggctgaaaaaaaaaaaaaaaaccccacaacaaactgaagttagcaaggcattgaacactttatatgaatcctctgtcttactataacaatccggtgaacttaaggt

SEQ ID NO: 53662 - DNA, 201 bp, Homo sapiens
ttatgctaatacttaaaactattaactattattaccattaaatattgaaaggtttcacccagctataagtgtgtgtactttggaaagtgcgtttttttttkgggggggtatttgtgagtatgttgttttttttgtttttgtttttttatttgtttttccttaaaccaactttctgagaaatatgtccattctttaatactg

SEQ ID NO: 53663 - DNA, 201 bp, Homo sapiens
attctttaatactgtctttccaaagtgtaagattccctaatagggagtcgctaaaatgtctatctaaatacagtctatcaagcaagaattctgtgactgattttttttggtaacagtactttgatttgatacttgtatacaagttggttgaacatattactctggtcagtttttaaaggctgactatggttaatttgcata

SEQ ID NO: 53664 - DNA, 201 bp, Homo sapiens
tcaggttttatgcgctggataacagttaaaagttcagcttttgcaactttataaaatgtatacataagcatattaattttaaaatagctttcttttttttcaatcacatgggttgtcaaaaaataacagctttgttataaatgtgcctatatagtattttagctgttaaaaataaatgttaaataatatttttaattctta

SEQ ID NO: 53665 - DNA, 201 bp, Homo sapiens; identical to SEQ ID NO: 21992

SEQ ID NO: 53666 - DNA, 201 bp, Homo sapiens; identical to SEQ ID NO: 19780

SEQ ID NO: 53667 - DNA, 201 bp, Homo sapiens; identical to SEQ ID NO: 19779

SEQ ID NO: 53668 - DNA, 201 bp, Homo sapiens; identical to SEQ ID NO: 21993

SEQ ID NO: 53669 - DNA, 201 bp, Homo sapiens; identical to SEQ ID NO: 19782

SEQ ID NO: 53670 - DNA, 201 bp, Homo sapiens; identical to SEQ ID NO: 19786

SEQ ID NO: 53671 - DNA, 201 bp, Homo sapiens; identical to SEQ ID NO: 19785

SEQ ID NO: 53672 - DNA, 201 bp, Homo sapiens; identical to SEQ ID NO: 19789

SEQ ID NO: 53673 - DNA, 201 bp, Homo sapiens; identical to SEQ ID NO: 19788

SEQ ID NO: 53674 - DNA, 201 bp, Homo sapiens; identical to SEQ ID NO: 19794

SEQ ID NO: 53675 - DNA, 201 bp, Homo sapiens; identical to SEQ ID NO: 19793

SEQ ID NO: 53676 - DNA, 201 bp, Homo sapiens; identical to SEQ ID NO: 19799

SEQ ID NO: 53677 - DNA, 201 bp, Homo sapiens; identical to SEQ ID NO: 19801

SEQ ID NO: 53678 - DNA, 201 bp, Homo sapiens; identical to SEQ ID NO: 18957

SEQ ID NO: 53679 - DNA, 201 bp, Homo sapiens; identical to SEQ ID NO: 19802

SEQ ID NO: 53680 - DNA, 201 bp, Homo sapiens; identical to SEQ ID NO: 18959

SEQ ID NO: 53681 - DNA, 201 bp, Homo sapiens; identical to SEQ ID NO: 21277

SEQ ID NO: 53682 - DNA, 201 bp, Homo sapiens; identical to SEQ ID NO: 18962

SEQ ID NO: 53683 - DNA, 201 bp, Homo sapiens; identical to SEQ ID NO: 21278

SEQ ID NO: 53684 - DNA, 201 bp, Homo sapiens; identical to SEQ ID NO: 19803

SEQ ID NO: 53685 - DNA, 201 bp, Homo sapiens; identical to SEQ ID NO: 19804

SEQ ID NO: 53686 - DNA, 201 bp, Homo sapiens; identical to SEQ ID NO: 18077

SEQ ID NO: 53687 - DNA, 201 bp, Homo sapiens; identical to SEQ ID NO: 18968

SEQ ID NO: 53688 - DNA, 201 bp, Homo sapiens; identical to SEQ ID NO: 18971

SEQ ID NO: 53689 - DNA, 201 bp, Homo sapiens; identical to SEQ ID NO: 21996

SEQ ID NO: 53690 - DNA, 201 bp, Homo sapiens; identical to SEQ ID NO: 18974

SEQ ID NO: 53691 - DNA, 201 bp, Homo sapiens; identical to SEQ ID NO: 21997

SEQ ID NO: 53692 - DNA, 201 bp, Homo sapiens; identical to SEQ ID NO: 18976

SEQ ID NO: 53693 - DNA, 201 bp, Homo sapiens; identical to SEQ ID NO: 18975

SEQ ID NO: 53694 - DNA, 201 bp, Homo sapiens; identical to SEQ ID NO: 18977

SEQ ID NO: 53695 - DNA, 201 bp, Homo sapiens; identical to SEQ ID NO: 23121

SEQ ID NO: 53696 - DNA, 201 bp, Homo sapiens; identical to SEQ ID NO: 21280

SEQ ID NO: 53697 - DNA, 201 bp, Homo sapiens; identical to SEQ ID NO: 22455

SEQ ID NO: 53698 - DNA, 201 bp, Homo sapiens; identical to SEQ ID NO: 23122

SEQ ID NO: 53699 - DNA, 201 bp, Homo sapiens; identical to SEQ ID NO: 21281

SEQ ID NO: 53700 - DNA, 201 bp, Homo sapiens; identical to SEQ ID NO: 22457

SEQ ID NO: 53701 - DNA, 201 bp, Homo sapiens; identical to SEQ ID NO: 23123

SEQ ID NO: 53702 - DNA, 201 bp, Homo sapiens; identical to SEQ ID NO: 22459

SEQ ID NO: 53703 - DNA, 201 bp, Homo sapiens; identical to SEQ ID NO: 22463

SEQ ID NO: 53704 - DNA, 201 bp, Homo sapiens; identical to SEQ ID NO: 22466

SEQ ID NO: 53705 - DNA, 201 bp, Homo sapiens; identical to SEQ ID NO: 22468

SEQ ID NO: 53706 - DNA, 201 bp, Homo sapiens; identical to SEQ ID NO: 22470

SEQ ID NO: 53707 - DNA, 201 bp, Homo sapiens; identical to SEQ ID NO: 22472

SEQ ID NO: 53708 - DNA, 201 bp, Homo sapiens; identical to SEQ ID NO: 22013

SEQ ID NO: 53709 - DNA, 201 bp, Homo sapiens; identical to SEQ ID NO: 19814

SEQ ID NO: 53710 - DNA, 201 bp, Homo sapiens; identical to SEQ ID NO: 22015

SEQ ID NO: 53711 - DNA, 201 bp, Homo sapiens; identical to SEQ ID NO: 19816

SEQ ID NO: 53712 - DNA, 201 bp, Homo sapiens; identical to SEQ ID NO: 22019

SEQ ID NO: 53713 - DNA, 201 bp, Homo sapiens; identical to SEQ ID NO: 23124

SEQ ID NO: 53714 - DNA, 201 bp, Homo sapiens; identical to SEQ ID NO: 19821

SEQ ID NO: 53715 - DNA, 201 bp, Homo sapiens; identical to SEQ ID NO: 19820

SEQ ID NO: 53716 - DNA, 201 bp, Homo sapiens; identical to SEQ ID NO: 19819

SEQ ID NO: 53717 - DNA, 201 bp, Homo sapiens; identical to SEQ ID NO: 19823

SEQ ID NO: 53718 - DNA, 201 bp, Homo sapiens; identical to SEQ ID NO: 19822

SEQ ID NO: 53719 - DNA, 201 bp, Homo sapiens; identical to SEQ ID NO: 19825

SEQ ID NO: 53720 - DNA, 201 bp, Homo sapiens; identical to SEQ ID NO: 19826

SEQ ID NO: 53721 - DNA, 201 bp, Homo sapiens; identical to SEQ ID NO: 19828

SEQ ID NO: 53722 - DNA, 201 bp, Homo sapiens; identical to SEQ ID NO: 19829

SEQ ID NO: 53723 - DNA, 201 bp, Homo sapiens; identical to SEQ ID NO: 19832

SEQ ID NO: 53724 - DNA, 201 bp, Homo sapiens; identical to SEQ ID NO: 19835

SEQ ID NO: 53725 - DNA, 201 bp, Homo sapiens; identical to SEQ ID NO: 20529

SEQ ID NO: 53726 - DNA, 201 bp, Homo sapiens; identical to SEQ ID NO: 19838

SEQ ID NO: 53727 - DNA, 201 bp, Homo sapiens; identical to SEQ ID NO: 19840

SEQ ID NO: 53728 - DNA, 201 bp, Homo sapiens; identical to SEQ ID NO: 22021

SEQ ID NO: 53729 - DNA, 201 bp, Homo sapiens; identical to SEQ ID NO: 22478

SEQ ID NO: 53730 - DNA, 201 bp, Homo sapiens; identical to SEQ ID NO: 21309

SEQ ID NO: 53731 - DNA, 201 bp, Homo sapiens; identical to SEQ ID NO: 19846

SEQ ID NO: 53732 - DNA, 201 bp, Homo sapiens; identical to SEQ ID NO: 18994

SEQ ID NO: 53733 - DNA, 201 bp, Homo sapiens; identical to SEQ ID NO: 22022

SEQ ID NO: 53734 - DNA, 201 bp, Homo sapiens; identical to SEQ ID NO: 18996

SEQ ID NO: 53735 - DNA, 201 bp, Homo sapiens; identical to SEQ ID NO: 18998

SEQ ID NO: 53736 - DNA, 201 bp, Homo sapiens; identical to SEQ ID NO: 19002

SEQ ID NO: 53737 - DNA, 201 bp, Homo sapiens; identical to SEQ ID NO: 19006

SEQ ID NO: 53738 - DNA, 201 bp, Homo sapiens; identical to SEQ ID NO: 21311

SEQ ID NO: 53739 - DNA, 201 bp, Homo sapiens; identical to SEQ ID NO: 18101

SEQ ID NO: 53740 - DNA, 201 bp, Homo sapiens; identical to SEQ ID NO: 22027

SEQ ID NO: 53741 - DNA, 201 bp, Homo sapiens; identical to SEQ ID NO: 19848

SEQ ID NO: 53742 - DNA, 201 bp, Homo sapiens; identical to SEQ ID NO: 18102

SEQ ID NO: 53743 - DNA, 201 bp, Homo sapiens; identical to SEQ ID NO: 18105

SEQ ID NO: 53744 - DNA, 201 bp, Homo sapiens; identical to SEQ ID NO: 22486

SEQ ID NO: 53745 - DNA, 201 bp, Homo sapiens; identical to SEQ ID NO: 19013

SEQ ID NO: 53746 - DNA, 201 bp, Homo sapiens; identical to SEQ ID NO: 22488

SEQ ID NO: 53747 - DNA, 201 bp, Homo sapiens; identical to SEQ ID NO: 19016

SEQ ID NO: 53748 - DNA, 201 bp, Homo sapiens; identical to SEQ ID NO: 23128

SEQ ID NO: 53749 - DNA, 201 bp, Homo sapiens; identical to SEQ ID NO: 23129

SEQ ID NO: 53750 - DNA, 201 bp, Homo sapiens; identical to SEQ ID NO: 22491

SEQ ID NO: 53751 - DNA, 201 bp, Homo sapiens; identical to SEQ ID NO: 23131

SEQ ID NO: 53752 - DNA, 201 bp, Homo sapiens; identical to SEQ ID NO: 23130

SEQ ID NO: 53753 - DNA, 201 bp, Homo sapiens; identical to SEQ ID NO: 22493

SEQ ID NO: 53754 - DNA, 201 bp, Homo sapiens; identical to SEQ ID NO: 22496

SEQ ID NO: 53755 - DNA, 201 bp, Homo sapiens; identical to SEQ ID NO: 22499

SEQ ID NO: 53756 - DNA, 201 bp, Homo sapiens; identical to SEQ ID NO: 20562

SEQ ID NO: 53757 - DNA, 201 bp, Homo sapiens; identical to SEQ ID NO: 20563

SEQ ID NO: 53758 - DNA, 201 bp, Homo sapiens; identical to SEQ ID NO: 23132

SEQ ID NO: 53759 - DNA, 201 bp, Homo sapiens; identical to SEQ ID NO: 20564

SEQ ID NO: 53760 - DNA, 201 bp, Homo sapiens; identical to SEQ ID NO: 19852

SEQ ID NO: 53761 - DNA, 201 bp, Homo sapiens; identical to SEQ ID NO: 20565

SEQ ID NO: 53762 - DNA, 201 bp, Homo sapiens; identical to SEQ ID NO: 19853

SEQ ID NO: 53763 - DNA, 201 bp, Homo sapiens; identical to SEQ ID NO: 20567

SEQ ID NO: 53764 - DNA, 201 bp, Homo sapiens; identical to SEQ ID NO: 19854

SEQ ID NO: 53765 - DNA, 201 bp, Homo sapiens; identical to SEQ ID NO: 20570

SEQ ID NO: 53766 - DNA, 201 bp, Homo sapiens; identical to SEQ ID NO: 19856

SEQ ID NO: 53767 - DNA, 201 bp, Homo sapiens; identical to SEQ ID NO: 19855

SEQ ID NO: 53768 - DNA, 201 bp, Homo sapiens; identical to SEQ ID NO: 20576

SEQ ID NO: 53769 - DNA, 201 bp, Homo sapiens; identical to SEQ ID NO: 19859

SEQ ID NO: 53770 - DNA, 201 bp, Homo sapiens; identical to SEQ ID NO: 20581

SEQ ID NO: 53771 - DNA, 201 bp, Homo sapiens; identical to SEQ ID NO: 19862

SEQ ID NO: 53772 - DNA, 201 bp, Homo sapiens; identical to SEQ ID NO: 20585

SEQ ID NO: 53773 - DNA, 201 bp, Homo sapiens; identical to SEQ ID NO: 19865

SEQ ID NO: 53774 - DNA, 201 bp, Homo sapiens; identical to SEQ ID NO: 20589

SEQ ID NO: 53775 - DNA, 201 bp, Homo sapiens; identical to SEQ ID NO: 19868

SEQ ID NO: 53776 - DNA, 201 bp, Homo sapiens; identical to SEQ ID NO: 19871

SEQ ID NO: 53777 - DNA, 201 bp, Homo sapiens; identical to SEQ ID NO: 19874

SEQ ID NO: 53778 - DNA, 201 bp, Homo sapiens; identical to SEQ ID NO: 20600

SEQ ID NO: 53779 - DNA, 201 bp, Homo sapiens; identical to SEQ ID NO: 20604

SEQ ID NO: 53780 - DNA, 201 bp, Homo sapiens; identical to SEQ ID NO: 22046

SEQ ID NO: 53781 - DNA, 201 bp, Homo sapiens; identical to SEQ ID NO: 19031

SEQ ID NO: 53782 - DNA, 201 bp, Homo sapiens; identical to SEQ ID NO: 19881

SEQ ID NO: 53783 - DNA, 201 bp, Homo sapiens; identical to SEQ ID NO: 22047

SEQ ID NO: 53784 - DNA, 201 bp, Homo sapiens; identical to SEQ ID NO: 22049

SEQ ID NO: 53785 - DNA, 201 bp, Homo sapiens; identical to SEQ ID NO: 22050

SEQ ID NO: 53786 - DNA, 201 bp, Homo sapiens; identical to SEQ ID NO: 22051

SEQ ID NO: 53787 - DNA, 201 bp, Homo sapiens; identical to SEQ ID NO: 19036

SEQ ID NO: 53788 - DNA, 201 bp, Homo sapiens; identical to SEQ ID NO: 19038

SEQ ID NO: 53789 - DNA, 201 bp, Homo sapiens; identical to SEQ ID NO: 19882

SEQ ID NO: 53790 - DNA, 201 bp, Homo sapiens; identical to SEQ ID NO: 18127

SEQ ID NO: 53791 - DNA, 201 bp, Homo sapiens; identical to SEQ ID NO: 19041

SEQ ID NO: 53792 - DNA, 201 bp, Homo sapiens; identical to SEQ ID NO: 19040

SEQ ID NO: 53793 - DNA, 201 bp, Homo sapiens; identical to SEQ ID NO: 19883

SEQ ID NO: 53794 - DNA, 201 bp, Homo sapiens; identical to SEQ ID NO: 21342

SEQ ID NO: 53795 - DNA, 201 bp, Homo sapiens; identical to SEQ ID NO: 18128

SEQ ID NO: 53796 - DNA, 201 bp, Homo sapiens; identical to SEQ ID NO: 19044

SEQ ID NO: 53797 - DNA, 201 bp, Homo sapiens; identical to SEQ ID NO: 19048

SEQ ID NO: 53798 - DNA, 201 bp, Homo sapiens; identical to SEQ ID NO: 19055

SEQ ID NO: 53799 - DNA, 201 bp, Homo sapiens; identical to SEQ ID NO: 22513

SEQ ID NO: 53800 - DNA, 201 bp, Homo sapiens; identical to SEQ ID NO: 22515

SEQ ID NO: 53801 - DNA, 201 bp, Homo sapiens; identical to SEQ ID NO: 22517
  misc_feature (1)...(201): n = A,T,C or G, or insertion/deletion polymorphism (see Tables 1-2)

SEQ ID NO: 53802 - DNA, 201 bp, Homo sapiens; identical to SEQ ID NO: 19060

SEQ ID NO: 53803 - DNA, 201 bp, Homo sapiens; identical to SEQ ID NO: 23134

SEQ ID NO: 53804 - DNA, 201 bp, Homo sapiens; identical to SEQ ID NO: 23135

SEQ ID NO: 53805 - DNA, 201 bp, Homo sapiens; identical to SEQ ID NO: 20633

SEQ ID NO: 53806 - DNA, 201 bp, Homo sapiens; identical to SEQ ID NO: 20635

SEQ ID NO: 53807 - DNA, 201 bp, Homo sapiens; identical to SEQ ID NO: 22519

SEQ ID NO: 53808 - DNA, 201 bp, Homo sapiens; identical to SEQ ID NO: 22520

SEQ ID NO: 53809 - DNA, 201 bp, Homo sapiens; identical to SEQ ID NO: 20637

SEQ ID NO: 53810 - DNA, 201 bp, Homo sapiens; identical to SEQ ID NO: 19886

SEQ ID NO: 53811 - DNA, 201 bp, Homo sapiens; identical to SEQ ID NO: 20639

SEQ ID NO: 53812 - DNA, 201 bp, Homo sapiens; identical to SEQ ID NO: 19887

SEQ ID NO: 53813 - DNA, 201 bp, Homo sapiens; identical to SEQ ID NO: 20642

SEQ ID NO: 53814 - DNA, 201 bp, Homo sapiens; identical to SEQ ID NO: 19888

SEQ ID NO: 53815 - DNA, 201 bp, Homo sapiens; identical to SEQ ID NO: 20645

SEQ ID NO: 53816 - DNA, 201 bp, Homo sapiens; identical to SEQ ID NO: 19069

SEQ ID NO: 53817 - DNA, 201 bp, Homo sapiens; identical to SEQ ID NO: 19889

SEQ ID NO: 53818 - DNA, 201 bp, Homo sapiens; identical to SEQ ID NO: 20648

SEQ ID NO: 53819 - DNA, 201 bp, Homo sapiens; identical to SEQ ID NO: 19070

SEQ ID NO: 53820 - DNA, 201 bp, Homo sapiens; identical to SEQ ID NO: 19890

SEQ ID NO: 53821 - DNA, 201 bp, Homo sapiens; identical to SEQ ID NO: 20653

SEQ ID NO: 53822 - DNA, 201 bp, Homo sapiens; identical to SEQ ID NO: 19071

SEQ ID NO: 53823 - DNA, 201 bp, Homo sapiens; identical to SEQ ID NO: 19891

SEQ ID NO: 53824 - DNA, 201 bp, Homo sapiens; identical to SEQ ID NO: 20658

SEQ ID NO: 53825 - DNA, 201 bp, Homo sapiens; identical to SEQ ID NO: 19072

SEQ ID NO: 53826 - DNA, 201 bp, Homo sapiens; identical to SEQ ID NO: 19893

SEQ ID NO: 53827 - DNA, 201 bp, Homo sapiens; identical to SEQ ID NO: 20663

SEQ ID NO: 53828 - DNA, 201 bp, Homo sapiens; identical to SEQ ID NO: 19073

SEQ ID NO: 53829 - DNA, 201 bp, Homo sapiens; identical to SEQ ID NO: 19894

SEQ ID NO: 53830 - DNA, 201 bp, Homo sapiens; identical to SEQ ID NO: 19074

SEQ ID NO: 53831 - DNA, 201 bp, Homo sapiens; identical to SEQ ID NO: 19896

SEQ ID NO: 53832 - DNA, 201 bp, Homo sapiens; identical to SEQ ID NO: 19075

SEQ ID NO: 53833 - DNA, 201 bp, Homo sapiens; identical to SEQ ID NO: 19898

SEQ ID NO: 53834 - DNA, 201 bp, Homo sapiens; identical to SEQ ID NO: 19076

SEQ ID NO: 53835 - DNA, 201 bp, Homo sapiens; identical to SEQ ID NO: 19077

SEQ ID NO: 53836 - DNA, 201 bp, Homo sapiens; identical to SEQ ID NO: 22069

SEQ ID NO: 53837 - DNA, 201 bp, Homo sapiens; identical to SEQ ID NO: 19079

SEQ ID NO: 53838 - DNA, 201 bp, Homo sapiens; identical to SEQ ID NO: 22070

SEQ ID NO: 53839 - DNA, 201 bp, Homo sapiens; identical to SEQ ID NO: 19082

SEQ ID NO: 53840 - DNA, 201 bp, Homo sapiens; identical to SEQ ID NO: 22073

SEQ ID NO: 53841 - DNA, 201 bp, Homo sapiens; identical to SEQ ID NO: 21374

SEQ ID NO: 53842 - DNA, 201 bp, Homo sapiens; identical to SEQ ID NO: 20686

SEQ ID NO: 53843 - DNA, 201 bp, Homo sapiens; identical to SEQ ID NO: 19083

SEQ ID NO: 53844 - DNA, 201 bp, Homo sapiens; identical to SEQ ID NO: 21376

SEQ ID NO: 53845 - DNA, 201 bp, Homo sapiens; identical to SEQ ID NO: 19907

SEQ ID NO: 53846 - DNA, 201 bp, Homo sapiens; identical to SEQ ID NO: 22079

SEQ ID NO: 53847 - DNA, 201 bp, Homo sapiens; identical to SEQ ID NO: 22535

SEQ ID NO: 53848 - DNA, 201 bp, Homo sapiens; identical to SEQ ID NO: 19085

SEQ ID NO: 53849 - DNA, 201 bp, Homo sapiens; identical to SEQ ID NO: 22084

SEQ ID NO: 53850 - DNA, 201 bp, Homo sapiens; identical to SEQ ID NO: 19911

SEQ ID NO: 53851 - DNA, 201 bp, Homo sapiens; identical to SEQ ID NO: 19087

SEQ ID NO: 53852 - DNA, 201 bp, Homo sapiens; identical to SEQ ID NO: 21384

SEQ ID NO: 53853 - DNA, 201 bp, Homo sapiens; identical to SEQ ID NO: 21385

SEQ ID NO: 53854 - DNA, 201 bp, Homo sapiens; identical to SEQ ID NO: 22538

SEQ ID NO: 53855 - DNA, 201 bp, Homo sapiens; identical to SEQ ID NO: 21387

SEQ ID NO: 53856 - DNA, 201 bp, Homo sapiens; identical to SEQ ID NO: 22539

SEQ ID NO: 53857 - DNA, 201 bp, Homo sapiens; identical to SEQ ID NO: 21389

SEQ ID NO: 53858 - DNA, 201 bp, Homo sapiens; identical to SEQ ID NO: 22540

SEQ ID NO: 53859 - DNA, 201 bp, Homo sapiens; identical to SEQ ID NO: 19095

SEQ ID NO: 53860 - DNA, 201 bp, Homo sapiens; identical to SEQ ID NO: 22541

SEQ ID NO: 53861 - DNA, 201 bp, Homo sapiens; identical to SEQ ID NO: 22542

SEQ ID NO: 53862 - DNA, 201 bp, Homo sapiens; identical to SEQ ID NO: 22543

SEQ ID NO: 53863 - DNA, 201 bp, Homo sapiens; identical to SEQ ID NO: 22544

SEQ ID NO: 53864 - DNA, 201 bp, Homo sapiens; identical to SEQ ID NO: 20707

SEQ ID NO: 53865 - DNA, 201 bp, Homo sapiens; identical to SEQ ID NO: 22545

SEQ ID NO: 53866 - DNA, 201 bp, Homo sapiens; identical to SEQ ID NO: 22547

SEQ ID NO: 53867 - DNA, 201 bp, Homo sapiens; identical to SEQ ID NO: 20709

SEQ ID NO: 53868 - DNA, 201 bp, Homo sapiens; identical to SEQ ID NO: 22546

SEQ ID NO: 53869 - DNA, 201 bp, Homo sapiens; identical to SEQ ID NO: 19919

SEQ ID NO: 53870 - DNA, 201 bp, Homo sapiens; identical to SEQ ID NO: 20714

SEQ ID NO: 53871 - DNA, 201 bp, Homo sapiens; identical to SEQ ID NO: 19920

SEQ ID NO: 53872 - DNA, 201 bp, Homo sapiens; identical to SEQ ID NO: 19922

SEQ ID NO: 53873 - DNA, 201 bp, Homo sapiens; identical to SEQ ID NO: 20720

SEQ ID NO: 53874 - DNA, 201 bp, Homo sapiens; identical to SEQ ID NO: 19104

SEQ ID NO: 53875 - DNA, 201 bp, Homo sapiens; identical to SEQ ID NO: 19924

SEQ ID NO: 53876 - DNA, 201 bp, Homo sapiens; identical to SEQ ID NO: 20725

SEQ ID NO: 53877 - DNA, 201 bp, Homo sapiens; identical to SEQ ID NO: 19105

SEQ ID NO: 53878 - DNA, 201 bp, Homo sapiens; identical to SEQ ID NO: 19926

SEQ ID NO: 53879 - DNA, 201 bp, Homo sapiens; identical to SEQ ID NO: 20728

SEQ ID NO: 53880 - DNA, 201 bp, Homo sapiens; identical to SEQ ID NO: 19106

SEQ ID NO: 53881 - DNA, 201 bp, Homo sapiens; identical to SEQ ID NO: 19927

SEQ ID NO: 53882 - DNA, 201 bp, Homo sapiens; identical to SEQ ID NO: 20730

SEQ ID NO: 53883 - DNA, 201 bp, Homo sapiens; identical to SEQ ID NO: 19107

SEQ ID NO: 53884 - DNA, 201 bp, Homo sapiens; identical to SEQ ID NO: 19928

SEQ ID NO: 53885 - DNA, 201 bp, Homo sapiens; identical to SEQ ID NO: 20733

SEQ ID NO: 53886 - DNA, 201 bp, Homo sapiens; identical to SEQ ID NO: 19108

SEQ ID NO: 53887 - DNA, 201 bp, Homo sapiens; identical to SEQ ID NO: 19109

SEQ ID NO: 53888 - DNA, 201 bp, Homo sapiens; identical to SEQ ID NO: 19930

SEQ ID NO: 53889 - DNA, 201 bp, Homo sapiens; identical to SEQ ID NO: 19110

SEQ ID NO: 53890 - DNA, 201 bp, Homo sapiens; identical to SEQ ID NO: 19932

SEQ ID NO: 53891 - DNA, 201 bp, Homo sapiens; identical to SEQ ID NO: 19111

SEQ ID NO: 53892 - DNA, 201 bp, Homo sapiens; identical to SEQ ID NO: 19112

SEQ ID NO: 53893 - DNA, 201 bp, Homo sapiens; identical to SEQ ID NO: 19934

SEQ ID NO: 53894 - DNA, 201 bp, Homo sapiens; identical to SEQ ID NO: 19114

SEQ ID NO: 53895 - DNA, 201 bp, Homo sapiens; identical to SEQ ID NO: 20740

SEQ ID NO: 53896 - DNA, 201 bp, Homo sapiens; identical to SEQ ID NO: 22101

SEQ ID NO: 53897 - DNA, 201 bp, Homo sapiens; identical to SEQ ID NO: 19116

SEQ ID NO: 53898 - DNA, 201 bp, Homo sapiens; identical to SEQ ID NO: 19118

SEQ ID NO: 53899 - DNA, 201 bp, Homo sapiens; identical to SEQ ID NO: 19119

SEQ ID NO: 53900 - DNA, 201 bp, Homo sapiens; identical to SEQ ID NO: 22105

SEQ ID NO: 53901 - DNA, 201 bp, Homo sapiens; identical to SEQ ID NO: 19936

SEQ ID NO: 53902 - DNA, 201 bp, Homo sapiens; identical to SEQ ID NO: 19121

SEQ ID NO: 53903 - DNA, 201 bp, Homo sapiens; identical to SEQ ID NO: 21417

SEQ ID NO: 53904 - DNA, 201 bp, Homo sapiens; identical to SEQ ID NO: 19939

SEQ ID NO: 53905 - DNA, 201 bp, Homo sapiens; identical to SEQ ID NO: 20755

SEQ ID NO: 53906 - DNA, 201 bp, Homo sapiens; identical to SEQ ID NO: 21431

SEQ ID NO: 53907 - DNA, 201 bp, Homo sapiens; identical to SEQ ID NO: 20757

SEQ ID NO: 53908 - DNA, 201 bp, Homo sapiens; identical to SEQ ID NO: 21433

SEQ ID NO: 53909 - DNA, 201 bp, Homo sapiens; identical to SEQ ID NO: 21435

SEQ ID NO: 53910 - DNA, 201 bp, Homo sapiens; identical to SEQ ID NO: 19950

SEQ ID NO: 53911 - DNA, 201 bp, Homo sapiens; identical to SEQ ID NO: 19951

SEQ ID NO: 53912 - DNA, 201 bp, Homo sapiens; identical to SEQ ID NO: 21439

SEQ ID NO: 53913 - DNA, 201 bp, Homo sapiens; identical to SEQ ID NO: 19952

SEQ ID NO: 53914 - DNA, 201 bp, Homo sapiens; identical to SEQ ID NO: 20760

SEQ ID NO: 53915 - DNA, 201 bp, Homo sapiens; identical to SEQ ID NO: 21441

SEQ ID NO: 53916 - DNA, 201 bp, Homo sapiens; identical to SEQ ID NO: 19954

SEQ ID NO: 53917 - DNA, 201 bp, Homo sapiens; identical to SEQ ID NO: 20761

SEQ ID NO: 53918 - DNA, 201 bp, Homo sapiens; identical to SEQ ID NO: 20762

SEQ ID NO: 53919 - DNA, 201 bp, Homo sapiens; identical to SEQ ID NO: 19956

SEQ ID NO: 53920 - DNA, 201 bp, Homo sapiens; identical to SEQ ID NO: 20764

SEQ ID NO: 53921 - DNA, 201 bp, Homo sapiens; identical to SEQ ID NO: 19958

SEQ ID NO: 53922 - DNA, 201 bp, Homo sapiens; identical to SEQ ID NO: 19957

SEQ ID NO: 53923 - DNA, 201 bp, Homo sapiens; identical to SEQ ID NO: 20765

SEQ ID NO: 53924 - DNA, 201 bp, Homo sapiens; identical to SEQ ID NO: 21448

SEQ ID NO: 53925 - DNA, 201 bp, Homo sapiens; identical to SEQ ID NO: 19960

SEQ ID NO: 53926 - DNA, 201 bp, Homo sapiens; identical to SEQ ID NO: 19959

SEQ ID NO: 53927 - DNA, 201 bp, Homo sapiens; identical to SEQ ID NO: 20766

SEQ ID NO: 53928 - DNA, 201 bp, Homo sapiens; identical to SEQ ID NO: 21451

SEQ ID NO: 53929 - DNA, 201 bp, Homo sapiens; identical to SEQ ID NO: 19962

SEQ ID NO: 53930 - DNA, 201 bp, Homo sapiens; identical to SEQ ID NO: 20767

SEQ ID NO: 53931 - DNA, 201 bp, Homo sapiens; identical to SEQ ID NO: 19129

SEQ ID NO: 53932 - DNA, 201 bp, Homo sapiens; identical to SEQ ID NO: 19965

SEQ ID NO: 53933 - DNA, 201 bp, Homo sapiens; identical to SEQ ID NO: 19964

SEQ ID NO: 53934 - DNA, 201 bp, Homo sapiens; identical to SEQ ID NO: 20769

SEQ ID NO: 53935 - DNA, 201 bp, Homo sapiens; identical to SEQ ID NO: 19130

SEQ ID NO: 53936 - DNA, 201 bp, Homo sapiens; identical to SEQ ID NO: 19968

SEQ ID NO: 53937 - DNA, 201 bp, Homo sapiens; identical to SEQ ID NO: 19131

SEQ ID NO: 53938 - DNA, 201 bp, Homo sapiens; identical to SEQ ID NO: 19971

SEQ ID NO: 53939 - DNA, 201 bp, Homo sapiens; identical to SEQ ID NO: 20773

SEQ ID NO: 53940 - DNA, 201 bp, Homo sapiens; identical to SEQ ID NO: 19132

SEQ ID NO: 53941 - DNA, 201 bp, Homo sapiens; identical to SEQ ID NO: 19975

SEQ ID NO: 53942 - DNA, 201 bp, Homo sapiens; identical to SEQ ID NO: 20775

SEQ ID NO: 53943 - DNA, 201 bp, Homo sapiens; identical to SEQ ID NO: 19133

SEQ ID NO: 53944 - DNA, 201 bp, Homo sapiens; identical to SEQ ID NO: 19979

SEQ ID NO: 53945 - DNA, 201 bp, Homo sapiens; identical to SEQ ID NO: 21464

SEQ ID NO: 53946 - DNA, 201 bp, Homo sapiens; identical to SEQ ID NO: 19134

SEQ ID NO: 53947 - DNA, 201 bp, Homo sapiens; identical to SEQ ID NO: 19982

SEQ ID NO: 53948 - DNA, 201 bp, Homo sapiens; identical to SEQ ID NO: 19135

SEQ ID NO: 53949 - DNA, 201 bp, Homo sapiens; identical to SEQ ID NO: 19983

SEQ ID NO: 53950 - DNA, 201 bp, Homo sapiens; identical to SEQ ID NO: 19136

SEQ ID NO: 53951 - DNA, 201 bp, Homo sapiens; identical to SEQ ID NO: 19137

SEQ ID NO: 53952 - DNA, 201 bp, Homo sapiens; identical to SEQ ID NO: 19138

SEQ ID NO: 53953 - DNA, 201 bp, Homo sapiens; identical to SEQ ID NO: 22142

SEQ ID NO: 53954 - DNA, 201 bp, Homo sapiens; identical to SEQ ID NO: 21480

SEQ ID NO: 53955 - DNA, 201 bp, Homo sapiens; identical to SEQ ID NO: 19989

SEQ ID NO: 53956 - DNA, 201 bp, Homo sapiens; identical to SEQ ID NO: 19990

SEQ ID NO: 53957 - DNA, 201 bp, Homo sapiens; identical to SEQ ID NO: 20806

SEQ ID NO: 53958 - DNA, 201 bp, Homo sapiens; identical to SEQ ID NO: 19992

SEQ ID NO: 53959 - DNA, 201 bp, Homo sapiens; identical to SEQ ID NO: 20807

SEQ ID NO: 53960 - DNA, 201 bp, Homo sapiens; identical to SEQ ID NO: 19994

SEQ ID NO: 53961 - DNA, 201 bp, Homo sapiens; identical to SEQ ID NO: 20809

SEQ ID NO: 53962 - DNA, 201 bp, Homo sapiens; identical to SEQ ID NO: 19997

SEQ ID NO: 53963 - DNA, 201 bp, Homo sapiens; identical to SEQ ID NO: 19996

SEQ ID NO: 53964 - DNA, 201 bp, Homo sapiens; identical to SEQ ID NO: 20810

SEQ ID NO: 53965 - DNA, 201 bp, Homo sapiens; identical to SEQ ID NO: 22581

SEQ ID NO: 53966 - DNA, 201 bp, Homo sapiens; identical to SEQ ID NO: 19999

SEQ ID NO: 53967 - DNA, 201 bp, Homo sapiens; identical to SEQ ID NO: 19998

SEQ ID NO: 53968 - DNA, 201 bp, Homo sapiens; identical to SEQ ID NO: 20811

SEQ ID NO: 53969 - DNA, 201 bp, Homo sapiens; identical to SEQ ID NO: 20001

SEQ ID NO: 53970 - DNA, 201 bp, Homo sapiens; identical to SEQ ID NO: 20000

SEQ ID NO: 53971 - DNA, 201 bp, Homo sapiens; identical to SEQ ID NO: 20814

SEQ ID NO: 53972 - DNA, 201 bp, Homo sapiens; identical to SEQ ID NO: 20003

SEQ ID NO: 53973 - DNA, 201 bp, Homo sapiens; identical to SEQ ID NO: 20002

SEQ ID NO: 53974 - DNA, 201 bp, Homo sapiens; identical to SEQ ID NO: 20818

SEQ ID NO: 53975 - DNA, 201 bp, Homo sapiens; identical to SEQ ID NO: 20004

SEQ ID NO: 53976 - DNA, 201 bp, Homo sapiens; identical to SEQ ID NO: 20005

SEQ ID NO: 53977 - DNA, 201 bp, Homo sapiens; identical to SEQ ID NO: 20824

SEQ ID NO: 53978 - DNA, 201 bp, Homo sapiens; identical to SEQ ID NO: 20007

SEQ ID NO: 53979 - DNA, 201 bp, Homo sapiens; identical to SEQ ID NO: 20828

SEQ ID NO: 53980 - DNA, 201 bp, Homo sapiens; identical to SEQ ID NO: 20008

SEQ ID NO: 53981 - DNA, 201 bp, Homo sapiens; identical to SEQ ID NO: 20832

SEQ ID NO: 53982 - DNA, 201 bp, Homo sapiens; identical to SEQ ID NO: 21508

SEQ ID NO: 53983 - DNA, 201 bp, Homo sapiens; identical to SEQ ID NO: 20010

SEQ ID NO: 53984 - DNA, 201 bp, Homo sapiens; identical to SEQ ID NO: 20835

SEQ ID NO: 53985 - DNA, 201 bp, Homo sapiens; identical to SEQ ID NO: 21510

SEQ ID NO: 53986 - DNA, 201 bp, Homo sapiens; identical to SEQ ID NO: 20012

SEQ ID NO: 53987 - DNA, 201 bp, Homo sapiens; identical to SEQ ID NO: 21515

SEQ ID NO: 53988 - DNA, 201 bp, Homo sapiens; identical to SEQ ID NO: 22589

SEQ ID NO: 53989 - DNA, 201 bp, Homo sapiens; identical to SEQ ID NO: 22166

SEQ ID NO: 53990 - DNA, 201 bp, Homo sapiens; identical to SEQ ID NO: 21517

SEQ ID NO: 53991 - DNA, 201 bp, Homo sapiens; identical to SEQ ID NO: 22590

SEQ ID NO: 53992 - DNA, 201 bp, Homo sapiens; identical to SEQ ID NO: 22167

SEQ ID NO: 53993 - DNA, 201 bp, Homo sapiens; identical to SEQ ID NO: 20015

SEQ ID NO: 53994 - DNA, 201 bp, Homo sapiens; identical to SEQ ID NO: 22169

SEQ ID NO: 53995 - DNA, 201 bp, Homo sapiens; identical to SEQ ID NO: 22598

SEQ ID NO: 53996 - DNA, 201 bp, Homo sapiens; identical to SEQ ID NO: 22172

SEQ ID NO: 53997 - DNA, 201 bp, Homo sapiens; identical to SEQ ID NO: 22601

SEQ ID NO: 53998 - DNA, 201 bp, Homo sapiens; identical to SEQ ID NO: 22602

SEQ ID NO: 53999 - DNA, 201 bp, Homo sapiens; identical to SEQ ID NO: 20022

SEQ ID NO: 54000 - DNA, 201 bp, Homo sapiens; identical to SEQ ID NO: 20023

SEQ ID NO: 54001 - DNA, 201 bp, Homo sapiens; identical to SEQ ID NO: 20024

SEQ ID NO: 54002 - DNA, 201 bp, Homo sapiens; identical to SEQ ID NO: 20858

SEQ ID NO: 54003 - DNA, 201 bp, Homo sapiens; identical to SEQ ID NO: 20859

SEQ ID NO: 54004 - DNA, 201 bp, Homo sapiens; identical to SEQ ID NO: 20026

SEQ ID NO: 54005 - DNA, 201 bp, Homo sapiens; identical to SEQ ID NO: 20860

SEQ ID NO: 54006 - DNA, 201 bp, Homo sapiens; identical to SEQ ID NO: 20028

SEQ ID NO: 54007 - DNA, 201 bp, Homo sapiens; identical to SEQ ID NO: 20027

SEQ ID NO: 54008 - DNA, 201 bp, Homo sapiens; identical to SEQ ID NO: 20861

SEQ ID NO: 54009 - DNA, 201 bp, Homo sapiens; identical to SEQ ID NO: 20030

SEQ ID NO: 54010 - DNA, 201 bp, Homo sapiens; identical to SEQ ID NO: 20029

SEQ ID NO: 54011 - DNA, 201 bp, Homo sapiens; identical to SEQ ID NO: 20033

SEQ ID NO: 54012 - DNA, 201 bp, Homo sapiens; identical to SEQ ID NO: 20863

SEQ ID NO: 54013 - DNA, 201 bp, Homo sapiens; identical to SEQ ID NO: 20032

SEQ ID NO: 54014 - DNA, 201 bp, Homo sapiens; identical to SEQ ID NO: 20035

SEQ ID NO: 54015 - DNA, 201 bp, Homo sapiens; identical to SEQ ID NO: 20864

SEQ ID NO: 54016 - DNA, 201 bp, Homo sapiens; identical to SEQ ID NO: 20034

SEQ ID NO: 54017 - DNA, 201 bp, Homo sapiens; identical to SEQ ID NO: 20038

SEQ ID NO: 54018 - DNA, 201 bp, Homo sapiens; identical to SEQ ID NO: 20865

SEQ ID NO: 54019 - DNA, 201 bp, Homo sapiens; identical to SEQ ID NO: 20040

SEQ ID NO: 54020 - DNA, 201 bp, Homo sapiens; identical to SEQ ID NO: 20866

SEQ ID NO: 54021 - DNA, 201 bp, Homo sapiens; identical to SEQ ID NO: 18223

SEQ ID NO: 54022 - DNA, 201 bp, Homo sapiens; identical to SEQ ID NO: 20042

SEQ ID NO: 54023 - DNA, 201 bp, Homo sapiens; identical to SEQ ID NO: 20868

SEQ ID NO: 54024 - DNA, 201 bp, Homo sapiens; identical to SEQ ID NO: 20043

SEQ ID NO: 54025 - DNA, 201 bp, Homo sapiens; identical to SEQ ID NO: 20870

SEQ ID NO: 54026 - DNA, 201 bp, Homo sapiens; identical to SEQ ID NO: 20044

SEQ ID NO: 54027 - DNA, 201 bp, Homo sapiens; identical to SEQ ID NO: 20872

SEQ ID NO: 54028 - DNA, 201 bp, Homo sapiens; identical to SEQ ID NO: 20873

SEQ ID NO: 54029 - DNA, 201 bp, Homo sapiens; identical to SEQ ID NO: 20046

SEQ ID NO: 54030 - DNA, 201 bp, Homo sapiens; identical to SEQ ID NO: 20876

SEQ ID NO: 54031 - DNA, 201 bp, Homo sapiens; identical to SEQ ID NO: 20877

SEQ ID NO: 54032 - DNA, 201 bp, Homo sapiens; identical to SEQ ID NO: 22182

SEQ ID NO: 54033 - DNA, 201 bp, Homo sapiens; identical to SEQ ID NO: 23200

SEQ ID NO: 54034 - DNA, 201 bp, Homo sapiens; identical to SEQ ID NO: 23199

SEQ ID NO: 54035 - DNA, 201 bp, Homo sapiens; identical to SEQ ID NO: 20051

SEQ ID NO: 54036 - DNA, 201 bp, Homo sapiens; identical to SEQ ID NO: 20052

SEQ ID NO: 54037 - DNA, 201 bp, Homo sapiens; identical to SEQ ID NO: 20053

SEQ ID NO: 54038 - DNA, 201 bp, Homo sapiens; identical to SEQ ID NO: 22623

SEQ ID NO: 54039 - DNA, 201 bp, Homo sapiens; identical to SEQ ID NO: 20891

SEQ ID NO: 54040 - DNA, 201 bp, Homo sapiens; identical to SEQ ID NO: 20054

SEQ ID NO: 54041 - DNA, 201 bp, Homo sapiens; identical to SEQ ID NO: 20895

SEQ ID NO: 54042 - DNA, 201 bp, Homo sapiens; identical to SEQ ID NO: 20055

SEQ ID NO: 54043 - DNA, 201 bp, Homo sapiens; identical to SEQ ID NO: 19162

SEQ ID NO: 54044 - DNA, 201 bp, Homo sapiens; identical to SEQ ID NO: 20057

SEQ ID NO: 54045 - DNA, 201 bp, Homo sapiens; identical to SEQ ID NO: 20896

SEQ ID NO: 54046 - DNA, 201 bp, Homo sapiens; identical to SEQ ID NO: 20056

SEQ ID NO: 54047 - DNA, 201 bp, Homo sapiens; identical to SEQ ID NO: 19164

SEQ ID NO: 54048 - DNA, 201 bp, Homo sapiens; identical to SEQ ID NO: 20058

SEQ ID NO: 54049 - DNA, 201 bp, Homo sapiens; identical to SEQ ID NO: 20898

SEQ ID NO: 54050 - DNA, 201 bp, Homo sapiens; identical to SEQ ID NO: 19166

SEQ ID NO: 54051 - DNA, 201 bp, Homo sapiens; identical to SEQ ID NO: 20059

SEQ ID NO: 54052 - DNA, 201 bp, Homo sapiens; identical to SEQ ID NO: 20899

SEQ ID NO: 54053 - DNA, 201 bp, Homo sapiens; identical to SEQ ID NO: 19168

SEQ ID NO: 54054 - DNA, 201 bp, Homo sapiens; identical to SEQ ID NO: 20061

SEQ ID NO: 54055 - DNA, 201 bp, Homo sapiens; identical to SEQ ID NO: 20900

SEQ ID NO: 54056 - DNA, 201 bp, Homo sapiens; identical to SEQ ID NO: 20060

SEQ ID NO: 54057 - DNA, 201 bp, Homo sapiens; identical to SEQ ID NO: 19170

SEQ ID NO: 54058 - DNA, 201 bp, Homo sapiens; identical to SEQ ID NO: 20062

SEQ ID NO: 54059 - DNA, 201 bp, Homo sapiens; identical to SEQ ID NO: 20063

SEQ ID NO: 54060 - DNA, 201 bp, Homo sapiens; identical to SEQ ID NO: 20903

SEQ ID NO: 54061 - DNA, 201 bp, Homo sapiens; identical to SEQ ID NO: 20064

SEQ ID NO: 54062 - DNA, 201 bp, Homo sapiens; identical to SEQ ID NO: 20905

SEQ ID NO: 54063 - DNA, 201 bp, Homo sapiens; identical to SEQ ID NO: 20065

SEQ ID NO: 54064 - DNA, 201 bp, Homo sapiens; identical to SEQ ID NO: 20066

SEQ ID NO: 54065 - DNA, 201 bp, Homo sapiens; identical to SEQ ID NO: 20067

SEQ ID NO: 54066 - DNA, 201 bp, Homo sapiens; identical to SEQ ID NO: 20906

SEQ ID NO: 54067 - DNA, 201 bp, Homo sapiens; identical to SEQ ID NO: 20907

SEQ ID NO: 54068 - DNA, 201 bp, Homo sapiens; identical to SEQ ID NO: 20069

SEQ ID NO: 54069 - DNA, 201 bp, Homo sapiens; identical to SEQ ID NO: 20070

SEQ ID NO: 54070 - DNA, 201 bp, Homo sapiens; identical to SEQ ID NO: 23202

SEQ ID NO: 54071 - DNA, 201 bp, Homo sapiens; identical to SEQ ID NO: 23203

SEQ ID NO: 54072 - DNA, 201 bp, Homo sapiens; identical to SEQ ID NO: 22638

SEQ ID NO: 54073 - DNA, 201 bp, Homo sapiens; identical to SEQ ID NO: 22640

SEQ ID NO: 54074 - DNA, 201 bp, Homo sapiens; identical to SEQ ID NO: 23205

SEQ ID NO: 54075 - DNA, 201 bp, Homo sapiens; identical to SEQ ID NO: 23204

SEQ ID NO: 54076 - DNA, 201 bp, Homo sapiens; identical to SEQ ID NO: 22641

SEQ ID NO: 54077 - DNA, 201 bp, Homo sapiens; identical to SEQ ID NO: 22642

SEQ ID NO: 54078 - DNA, 201 bp, Homo sapiens; identical to SEQ ID NO: 22643

SEQ ID NO: 54079 - DNA, 201 bp, Homo sapiens; identical to SEQ ID NO: 22644

SEQ ID NO: 54080 - DNA, 201 bp, Homo sapiens; identical to SEQ ID NO: 22645

SEQ ID NO: 54081 - DNA, 201 bp, Homo sapiens; identical to SEQ ID NO: 22646

SEQ ID NO: 54082 - DNA, 201 bp, Homo sapiens; identical to SEQ ID NO: 20072

SEQ ID NO: 54083 - DNA, 201 bp, Homo sapiens; identical to SEQ ID NO: 20916

SEQ ID NO: 54084 - DNA, 201 bp, Homo sapiens; identical to SEQ ID NO: 20918

SEQ ID NO: 54085 - DNA, 201 bp, Homo sapiens; identical to SEQ ID NO: 20919

SEQ ID NO: 54086 - DNA, 201 bp, Homo sapiens; identical to SEQ ID NO: 19190

SEQ ID NO: 54087 - DNA, 201 bp, Homo sapiens; identical to SEQ ID NO: 20920

SEQ ID NO: 54088 - DNA, 201 bp, Homo sapiens; identical to SEQ ID NO: 20921

SEQ ID NO: 54089 - DNA, 201 bp, Homo sapiens; identical to SEQ ID NO: 19193

SEQ ID NO: 54090 - DNA, 201 bp, Homo sapiens; identical to SEQ ID NO: 20922

SEQ ID NO: 54091 - DNA, 201 bp, Homo sapiens; identical to SEQ ID NO: 19195

SEQ ID NO: 54092 - DNA, 201 bp, Homo sapiens; identical to SEQ ID NO: 20924

SEQ ID NO: 54093 - DNA, 201 bp, Homo sapiens; identical to SEQ ID NO: 19197

SEQ ID NO: 54094 - DNA, 201 bp, Homo sapiens; identical to SEQ ID NO: 20927

SEQ ID NO: 54095 - DNA, 201 bp, Homo sapiens; identical to SEQ ID NO: 19198

SEQ ID NO: 54096 - DNA, 201 bp, Homo sapiens; identical to SEQ ID NO: 20929

SEQ ID NO: 54097 - DNA, 201 bp, Homo sapiens; identical to SEQ ID NO: 19199

SEQ ID NO: 54098 - DNA, 201 bp, Homo sapiens; identical to SEQ ID NO: 20930

SEQ ID NO: 54099 - DNA, 201 bp, Homo sapiens; identical to SEQ ID NO: 20931

SEQ ID NO: 54100 - DNA, 201 bp, Homo sapiens; identical to SEQ ID NO: 23214

SEQ ID NO: 54101 - DNA, 201 bp, Homo sapiens; identical to SEQ ID NO: 20932

SEQ ID NO: 54102 - DNA, 201 bp, Homo sapiens; identical to SEQ ID NO: 20933

SEQ ID NO: 54103 - DNA, 201 bp, Homo sapiens; identical to SEQ ID NO: 23215

SEQ ID NO: 54104 - DNA, 201 bp, Homo sapiens; identical to SEQ ID NO: 23218

SEQ ID NO: 54105 - DNA, 201 bp, Homo sapiens; identical to SEQ ID NO: 20076

SEQ ID NO: 54106 - DNA, 201 bp, Homo sapiens; identical to SEQ ID NO: 20077

SEQ ID NO: 54107 - DNA, 201 bp, Homo sapiens; identical to SEQ ID NO: 22663

SEQ ID NO: 54108 - DNA, 201 bp, Homo sapiens; identical to SEQ ID NO: 22664

SEQ ID NO: 54109 - DNA, 201 bp, Homo sapiens; identical to SEQ ID NO: 22665

SEQ ID NO: 54110 - DNA, 201 bp, Homo sapiens; identical to SEQ ID NO: 20080

SEQ ID NO: 54111 - DNA, 201 bp, Homo sapiens; identical to SEQ ID NO: 20081

SEQ ID NO: 54112 - DNA, 201 bp, Homo sapiens; identical to SEQ ID NO: 20082

SEQ ID NO: 54113 - DNA, 201 bp, Homo sapiens; identical to SEQ ID NO: 20083

SEQ ID NO: 54114 - DNA, 201 bp, Homo sapiens; identical to SEQ ID NO: 20943

SEQ ID NO: 54115 - DNA, 201 bp, Homo sapiens; identical to SEQ ID NO: 20946

SEQ ID NO: 54116 - DNA, 201 bp, Homo sapiens; identical to SEQ ID NO: 20948

SEQ ID NO: 54117 - DNA, 201 bp, Homo sapiens; identical to SEQ ID NO: 19217

SEQ ID NO: 54118 - DNA, 201 bp, Homo sapiens; identical to SEQ ID NO: 22202

SEQ ID NO: 54119 - DNA, 201 bp, Homo sapiens; identical to SEQ ID NO: 20950

SEQ ID NO: 54120 - DNA, 201 bp, Homo sapiens; identical to SEQ ID NO: 19220

SEQ ID NO: 54121 - DNA, 201 bp, Homo sapiens; identical to SEQ ID NO: 20952

SEQ ID NO: 54122 - DNA, 201 bp, Homo sapiens; identical to SEQ ID NO: 19222

SEQ ID NO: 54123 - DNA, 201 bp, Homo sapiens; identical to SEQ ID NO: 20953

SEQ ID NO: 54124 - DNA, 201 bp, Homo sapiens; identical to SEQ ID NO: 19224

SEQ ID NO: 54125 - DNA, 201 bp, Homo sapiens; identical to SEQ ID NO: 20085

SEQ ID NO: 54126 - DNA, 201 bp, Homo sapiens; identical to SEQ ID NO: 19226

SEQ ID NO: 54127 - DNA, 201 bp, Homo sapiens; identical to SEQ ID NO: 20955

SEQ ID NO: 54128 - DNA, 201 bp, Homo sapiens; identical to SEQ ID NO: 19227

SEQ ID NO: 54129 - DNA, 201 bp, Homo sapiens; identical to SEQ ID NO: 20956

SEQ ID NO: 54130 - DNA, 201 bp, Homo sapiens; identical to SEQ ID NO: 19228

SEQ ID NO: 54131 - DNA, 201 bp, Homo sapiens; identical to SEQ ID NO: 20957

SEQ ID NO: 54132 - DNA, 201 bp, Homo sapiens; identical to SEQ ID NO: 23220

SEQ ID NO: 54133 - DNA, 201 bp, Homo sapiens; identical to SEQ ID NO: 23221

SEQ ID NO: 54134 - DNA, 201 bp, Homo sapiens; identical to SEQ ID NO: 23222

SEQ ID NO: 54135 - DNA, 201 bp, Homo sapiens; identical to SEQ ID NO: 23224

SEQ ID NO: 54136 - DNA, 201 bp, Homo sapiens; identical to SEQ ID NO: 20099

SEQ ID NO: 54137 - DNA, 201 bp, Homo sapiens; identical to SEQ ID NO: 19253

SEQ ID NO: 54138 - DNA, 201 bp, Homo sapiens; identical to SEQ ID NO: 22214

SEQ ID NO: 54139 - DNA, 201 bp, Homo sapiens; identical to SEQ ID NO: 20975

SEQ ID NO: 54140 - DNA, 201 bp, Homo sapiens; identical to SEQ ID NO: 19257

SEQ ID NO: 54141 - DNA, 201 bp, Homo sapiens; identical to SEQ ID NO: 20977

SEQ ID NO: 54142 - DNA, 201 bp, Homo sapiens; identical to SEQ ID NO: 21667

SEQ ID NO: 54143 - DNA, 201 bp, Homo sapiens; identical to SEQ ID NO: 19259

SEQ ID NO: 54144 - DNA, 201 bp, Homo sapiens; identical to SEQ ID NO: 21668

SEQ ID NO: 54145 - DNA, 201 bp, Homo sapiens; identical to SEQ ID NO: 20981

SEQ ID NO: 54146 - DNA, 201 bp, Homo sapiens; identical to SEQ ID NO: 21669

SEQ ID NO: 54147 - DNA, 201 bp, Homo sapiens; identical to SEQ ID NO: 20982

SEQ ID NO: 54148 - DNA, 201 bp, Homo sapiens; identical to SEQ ID NO: 21670

SEQ ID NO: 54149 - DNA, 201 bp, Homo sapiens; identical to SEQ ID NO: 20983

SEQ ID NO: 54150 - DNA, 201 bp, Homo sapiens; identical to SEQ ID NO: 21671

SEQ ID NO: 54151 - DNA, 201 bp, Homo sapiens; identical to SEQ ID NO: 19267

SEQ ID NO: 54152 - DNA, 201 bp, Homo sapiens; identical to SEQ ID NO: 20984

SEQ ID NO: 54153 - DNA, 201 bp, Homo sapiens; identical to SEQ ID NO: 19268

SEQ ID NO: 54154 - DNA, 201 bp, Homo sapiens; identical to SEQ ID NO: 20985

SEQ ID NO: 54155 - DNA, 201 bp, Homo sapiens; identical to SEQ ID NO: 20986

SEQ ID NO: 54156 - DNA, 201 bp, Homo sapiens; identical to SEQ ID NO: 19269

SEQ ID NO: 54157 - DNA, 201 bp, Homo sapiens; identical to SEQ ID NO: 21679

SEQ ID NO: 54158 - DNA, 201 bp, Homo sapiens; identical to SEQ ID NO: 21680

SEQ ID NO: 54159 - DNA, 201 bp, Homo sapiens; identical to SEQ ID NO: 20109

SEQ ID NO: 54160 - DNA, 201 bp, Homo sapiens; identical to SEQ ID NO: 23233

SEQ ID NO: 54161 - DNA, 201 bp, Homo sapiens; identical to SEQ ID NO: 23234

SEQ ID NO: 54162 - DNA, 201 bp, Homo sapiens; identical to SEQ ID NO: 23235

SEQ ID NO: 54163 - DNA, 201 bp, Homo sapiens; identical to SEQ ID NO: 22235

SEQ ID NO: 54164 - DNA, 201 bp, Homo sapiens; identical to SEQ ID NO: 18355

SEQ ID NO: 54165 - DNA, 201 bp, Homo sapiens; identical to SEQ ID NO: 21685

SEQ ID NO: 54166 - DNA, 201 bp, Homo sapiens; identical to SEQ ID NO: 21686

SEQ ID NO: 54167 - DNA, 201 bp, Homo sapiens; identical to SEQ ID NO: 18360

SEQ ID NO: 54168 - DNA, 201 bp, Homo sapiens; identical to SEQ ID NO: 21689

SEQ ID NO: 54169 - DNA, 201 bp, Homo sapiens; identical to SEQ ID NO: 18366

SEQ ID NO: 54170 - DNA, 201 bp, Homo sapiens; identical to SEQ ID NO: 18371

SEQ ID NO: 54171 - DNA, 201 bp, Homo sapiens; identical to SEQ ID NO: 21703

SEQ ID NO: 54172 - DNA, 201 bp, Homo sapiens; identical to SEQ ID NO: 21704

SEQ ID NO: 54173 - DNA, 201 bp, Homo sapiens; identical to SEQ ID NO: 21706

SEQ ID NO: 54174 - DNA, 201 bp, Homo sapiens; identical to SEQ ID NO: 22711

SEQ ID NO: 54175 - DNA, 201 bp, Homo sapiens; identical to SEQ ID NO: 22713

SEQ ID NO: 54176 - DNA, 201 bp, Homo sapiens; identical to SEQ ID NO: 22714

SEQ ID NO: 54177 - DNA, 201 bp, Homo sapiens; identical to SEQ ID NO: 22251

SEQ ID NO: 54178 - DNA, 201 bp, Homo sapiens; identical to SEQ ID NO: 22253

SEQ ID NO: 54179 - DNA, 201 bp, Homo sapiens; identical to SEQ ID NO: 21729

SEQ ID NO: 54180 - DNA, 201 bp, Homo sapiens; identical to SEQ ID NO: 18424

SEQ ID NO: 54181 - DNA, 201 bp, Homo sapiens; identical to SEQ ID NO: 21731

SEQ ID NO: 54182 - DNA, 201 bp, Homo sapiens; identical to SEQ ID NO: 18425

SEQ ID NO: 54183 - DNA, 201 bp, Homo sapiens; identical to SEQ ID NO: 21732

SEQ ID NO: 54184 - DNA, 201 bp, Homo sapiens; identical to SEQ ID NO: 21024

SEQ ID NO: 54185 - DNA, 201 bp, Homo sapiens; identical to SEQ ID NO: 21734

SEQ ID NO: 54186 - DNA, 201 bp, Homo sapiens; identical to SEQ ID NO: 21736

SEQ ID NO: 54187 - DNA, 201 bp, Homo sapiens; identical to SEQ ID NO: 21737

SEQ ID NO: 54188 - DNA, 201 bp, Homo sapiens; identical to SEQ ID NO: 21738

SEQ ID NO: 54189 - DNA, 201 bp, Homo sapiens; identical to SEQ ID NO: 22729

SEQ ID NO: 54190 - DNA, 201 bp, Homo sapiens; identical to SEQ ID NO: 22730

SEQ ID NO: 54191 - DNA, 201 bp, Homo sapiens; identical to SEQ ID NO: 22734

SEQ ID NO: 54192 - DNA, 201 bp, Homo sapiens; identical to SEQ ID NO: 21038

SEQ ID NO: 54193 - DNA, 201 bp, Homo sapiens; identical to SEQ ID NO: 21040

SEQ ID NO: 54194 - DNA, 201 bp, Homo sapiens; identical to SEQ ID NO: 18456

SEQ ID NO: 54195 - DNA, 201 bp, Homo sapiens; identical to SEQ ID NO: 21764

SEQ ID NO: 54196 - DNA, 201 bp, Homo sapiens; identical to SEQ ID NO: 18457

SEQ ID NO: 54197 - DNA, 201 bp, Homo sapiens; identical to SEQ ID NO: 21765

SEQ ID NO: 54198 - DNA, 201 bp, Homo sapiens; identical to SEQ ID NO: 21767

SEQ ID NO: 54199 - DNA, 201 bp, Homo sapiens; identical to SEQ ID NO: 20169

SEQ ID NO: 54200 - DNA, 201 bp, Homo sapiens; identical to SEQ ID NO: 22760

SEQ ID NO: 54201 - DNA, 201 bp, Homo sapiens; identical to SEQ ID NO: 21054

SEQ ID NO: 54202 - DNA, 201 bp, Homo sapiens; identical to SEQ ID NO: 21055

SEQ ID NO: 54203 - DNA, 201 bp, Homo sapiens; identical to SEQ ID NO: 21056

SEQ ID NO: 54204 - DNA, 201 bp, Homo sapiens; identical to SEQ ID NO: 18479

SEQ ID NO: 54205 - DNA, 201 bp, Homo sapiens; identical to SEQ ID NO: 21775

SEQ ID NO: 54206 - DNA, 201 bp, Homo sapiens; identical to SEQ ID NO: 18480

SEQ ID NO: 54207 - DNA, 201 bp, Homo sapiens; identical to SEQ ID NO: 21776

SEQ ID NO: 54208 - DNA, 201 bp, Homo sapiens; identical to SEQ ID NO: 21779

SEQ ID NO: 54209 - DNA, 201 bp, Homo sapiens; identical to SEQ ID NO: 18481

SEQ ID NO: 54210 - DNA, 201 bp, Homo sapiens; identical to SEQ ID NO: 18483

SEQ ID NO: 54211 - DNA, 201 bp, Homo sapiens; identical to SEQ ID NO: 21780

SEQ ID NO: 54212 - DNA, 201 bp, Homo sapiens; identical to SEQ ID NO: 18485

SEQ ID NO: 54213 - DNA, 201 bp, Homo sapiens; identical to SEQ ID NO: 20176

SEQ ID NO: 54214 - DNA, 201 bp, Homo sapiens; identical to SEQ ID NO: 22790

SEQ ID NO: 54215 - DNA, 201 bp, Homo sapiens; identical to SEQ ID NO: 20177

SEQ ID NO: 54216 - DNA, 201 bp, Homo sapiens; identical to SEQ ID NO: 19384

SEQ ID NO: 54217 - DNA, 201 bp, Homo sapiens; identical to SEQ ID NO: 21789

SEQ ID NO: 54218 - DNA, 201 bp, Homo sapiens; identical to SEQ ID NO: 19387

SEQ ID NO: 54219 - DNA, 201 bp, Homo sapiens; identical to SEQ ID NO: 21089

SEQ ID NO: 54220 - DNA, 201 bp, Homo sapiens; identical to SEQ ID NO: 19389

SEQ ID NO: 54221 - DNA, 201 bp, Homo sapiens; identical to SEQ ID NO: 21790

SEQ ID NO: 54222 - DNA, 201 bp, Homo sapiens; identical to SEQ ID NO: 21791

SEQ ID NO: 54223 - DNA, 201 bp, Homo sapiens; identical to SEQ ID NO: 21792

SEQ ID NO: 54224 - DNA, 201 bp, Homo sapiens; identical to SEQ ID NO: 21095

SEQ ID NO: 54225 - DNA, 201 bp, Homo sapiens; identical to SEQ ID NO: 21097

SEQ ID NO: 54226 - DNA, 201 bp, Homo sapiens; identical to SEQ ID NO: 23298

SEQ ID NO: 54227 - DNA, 201 bp, Homo sapiens; identical to SEQ ID NO: 21099

SEQ ID NO: 54228 - DNA, 201 bp, Homo sapiens; identical to SEQ ID NO: 23301

SEQ ID NO: 54229 - DNA, 201 bp, Homo sapiens; identical to SEQ ID NO: 21100

SEQ ID NO: 54230 - DNA, 201 bp, Homo sapiens; identical to SEQ ID NO: 23302

SEQ ID NO: 54231 - DNA, 201 bp, Homo sapiens; identical to SEQ ID NO: 23303

SEQ ID NO: 54232 - DNA, 201 bp, Homo sapiens; identical to SEQ ID NO: 23304

SEQ ID NO: 54233 - DNA, 201 bp, Homo sapiens; identical to SEQ ID NO: 23306

SEQ ID NO: 54234 - DNA, 201 bp, Homo sapiens; identical to SEQ ID NO: 23307

SEQ ID NO: 54235 - DNA, 201 bp, Homo sapiens; identical to SEQ ID NO: 23308

SEQ ID NO: 54236 - DNA, 201 bp, Homo sapiens; identical to SEQ ID NO: 23315

SEQ ID NO: 54237 - DNA, 201 bp, Homo sapiens; identical to SEQ ID NO: 22291

SEQ ID NO: 54238 - DNA, 201 bp, Homo sapiens; identical to SEQ ID NO: 21104

SEQ ID NO: 54239 - DNA, 201 bp, Homo sapiens; identical to SEQ ID NO: 21105

SEQ ID NO: 54240 - DNA, 201 bp, Homo sapiens; identical to SEQ ID NO: 21106

SEQ ID NO: 54241 - DNA, 201 bp, Homo sapiens; identical to SEQ ID NO: 23332

SEQ ID NO: 54242 - DNA, 201 bp, Homo sapiens; identical to SEQ ID NO: 23333

SEQ ID NO: 54243 - DNA, 201 bp, Homo sapiens; identical to SEQ ID NO: 21107

SEQ ID NO: 54244 - DNA, 201 bp, Homo sapiens; identical to SEQ ID NO: 21108

SEQ ID NO: 54245 - DNA, 201 bp, Homo sapiens; identical to SEQ ID NO: 21109

SEQ ID NO: 54246 - DNA, 201 bp, Homo sapiens; identical to SEQ ID NO: 21817

SEQ ID NO: 54247 - DNA, 201 bp, Homo sapiens; identical to SEQ ID NO: 18540

SEQ ID NO: 54248 - DNA, 201 bp, Homo sapiens; identical to SEQ ID NO: 18541

SEQ ID NO: 54249 - DNA, 201 bp, Homo sapiens; identical to SEQ ID NO: 23357

SEQ ID NO: 54250 - DNA, 201 bp, Homo sapiens; identical to SEQ ID NO: 21115

SEQ ID NO: 54251 - DNA, 201 bp, Homo sapiens; identical to SEQ ID NO: 21116

SEQ ID NO: 54252 - DNA, 201 bp, Homo sapiens; identical to SEQ ID NO: 21117

SEQ ID NO: 54253 - DNA, 201 bp, Homo sapiens; identical to SEQ ID NO: 18559

SEQ ID NO: 54254 - DNA, 201 bp, Homo sapiens; identical to SEQ ID NO: 23368

SEQ ID NO: 54255 - DNA, 201 bp, Homo sapiens; identical to SEQ ID NO: 23371

SEQ ID NO: 54256 - DNA, 201 bp, Homo sapiens; identical to SEQ ID NO: 23374

SEQ ID NO: 54257 - DNA, 201 bp, Homo sapiens; identical to SEQ ID NO: 22889

SEQ ID NO: 54258 - DNA, 201 bp, Homo sapiens; identical to SEQ ID NO: 20211

SEQ ID NO: 54259 - DNA, 201 bp, Homo sapiens; identical to SEQ ID NO: 22321

SEQ ID NO: 54260 - DNA, 201 bp, Homo sapiens; identical to SEQ ID NO: 18563

SEQ ID NO: 54261 - DNA, 201 bp, Homo sapiens; identical to SEQ ID NO: 23385

SEQ ID NO: 54262 - DNA, 201 bp, Homo sapiens; identical to SEQ ID NO: 18564

SEQ ID NO: 54263 - DNA, 201 bp, Homo sapiens; identical to SEQ ID NO: 23389

SEQ ID NO: 54264 - DNA, 201 bp, Homo sapiens; identical to SEQ ID NO: 23392

SEQ ID NO: 54265 - DNA, 201 bp, Homo sapiens; identical to SEQ ID NO: 23394

SEQ ID NO: 54266 - DNA, 201 bp, Homo sapiens; identical to SEQ ID NO: 23398

SEQ ID NO: 54267 - DNA, 201 bp, Homo sapiens; identical to SEQ ID NO: 23399

SEQ ID NO: 54268 - DNA, 201 bp, Homo sapiens; identical to SEQ ID NO: 18566

SEQ ID NO: 54269 - DNA, 201 bp, Homo sapiens; identical to SEQ ID NO: 18568

SEQ ID NO: 54270 - DNA, 201 bp, Homo sapiens; identical to SEQ ID NO: 23401

SEQ ID NO: 54271 - DNA, 201 bp, Homo sapiens; identical to SEQ ID NO: 21135

SEQ ID NO: 54272 - DNA, 201 bp, Homo sapiens; identical to SEQ ID NO: 18576

SEQ ID NO: 54273 - DNA, 201 bp, Homo sapiens; identical to SEQ ID NO: 23407

SEQ ID NO: 54274 - DNA, 201 bp, Homo sapiens; identical to SEQ ID NO: 18581

SEQ ID NO: 54275 - DNA, 201 bp, Homo sapiens; identical to SEQ ID NO: 22909

SEQ ID NO: 54276 - DNA, 201 bp, Homo sapiens; identical to SEQ ID NO: 23420
  misc_feature (1)...(201): n = A,T,C or G, or insertion/deletion polymorphism (see Tables 1-2)

SEQ ID NO: 54277 - DNA, 201 bp, Homo sapiens; identical to SEQ ID NO: 23422

SEQ ID NO: 54278 - DNA, 201 bp, Homo sapiens; identical to SEQ ID NO: 23424

SEQ ID NO: 54279 - DNA, 201 bp, Homo sapiens; identical to SEQ ID NO: 21140

SEQ ID NO: 54280 - DNA, 201 bp, Homo sapiens; identical to SEQ ID NO: 22342

SEQ ID NO: 54281 - DNA, 201 bp, Homo sapiens; identical to SEQ ID NO: 23436

SEQ ID NO: 54282 - DNA, 201 bp, Homo sapiens; identical to SEQ ID NO: 18593

SEQ ID NO: 54283 - DNA, 201 bp, Homo sapiens; identical to SEQ ID NO: 22345

SEQ ID NO: 54284 - DNA, 201 bp, Homo sapiens; identical to SEQ ID NO: 23438

SEQ ID NO: 54285 - DNA, 201 bp, Homo sapiens; identical to SEQ ID NO: 18595

SEQ ID NO: 54286 - DNA, 201 bp, Homo sapiens; identical to SEQ ID NO: 23439

SEQ ID NO: 54287 - DNA, 201 bp, Homo sapiens; identical to SEQ ID NO: 23441

SEQ ID NO: 54288 - DNA, 201 bp, Homo sapiens; identical to SEQ ID NO: 22346

SEQ ID NO: 54289 - DNA, 201 bp, Homo sapiens; identical to SEQ ID NO: 23446

SEQ ID NO: 54290 - DNA, 201 bp, Homo sapiens; identical to SEQ ID NO: 22935

SEQ ID NO: 54291 - DNA, 201 bp, Homo sapiens; identical to SEQ ID NO: 22936

SEQ ID NO: 54292 - DNA, 201 bp, Homo sapiens; identical to SEQ ID NO: 18613

SEQ ID NO: 54293 - DNA, 201 bp, Homo sapiens; identical to SEQ ID NO: 22937

SEQ ID NO: 54294 - DNA, 201 bp, Homo sapiens; identical to SEQ ID NO: 18614

SEQ ID NO: 54295 - DNA, 201 bp, Homo sapiens; identical to SEQ ID NO: 18622

SEQ ID NO: 54296 - DNA, 201 bp, Homo sapiens; identical to SEQ ID NO: 18631

SEQ ID NO: 54297 - DNA, 201 bp, Homo sapiens; identical to SEQ ID NO: 18634

SEQ ID NO: 54298 - DNA, 201 bp, Homo sapiens; identical to SEQ ID NO: 18633

SEQ ID NO: 54299 - DNA, 201 bp, Homo sapiens; identical to SEQ ID NO: 23474

SEQ ID NO: 54300 - DNA, 201 bp, Homo sapiens; identical to SEQ ID NO: 23476

SEQ ID NO: 54301 - DNA, 201 bp, Homo sapiens; identical to SEQ ID NO: 19441

SEQ ID NO: 54302 - DNA, 201 bp, Homo sapiens; identical to SEQ ID NO: 22976

SEQ ID NO: 54303 - DNA, 201 bp, Homo sapiens; identical to SEQ ID NO: 22977

SEQ ID NO: 54304 - DNA, 201 bp, Homo sapiens; identical to SEQ ID NO: 22979

SEQ ID NO: 54305 - DNA, 201 bp, Homo sapiens; identical to SEQ ID NO: 22980

SEQ ID NO: 54306 - DNA, 201 bp, Homo sapiens; identical to SEQ ID NO: 22981

SEQ ID NO: 54307 - DNA, 201 bp, Homo sapiens; identical to SEQ ID NO: 22982

SEQ ID NO: 54308 - DNA, 201 bp, Homo sapiens; identical to SEQ ID NO: 22984

SEQ ID NO: 54309 - DNA, 201 bp, Homo sapiens; identical to SEQ ID NO: 22987

SEQ ID NO: 54310 - DNA, 201 bp, Homo sapiens; identical to SEQ ID NO: 22989

SEQ ID NO: 54311 - DNA, 201 bp, Homo sapiens; identical to SEQ ID NO: 22991

SEQ ID NO: 54312 - DNA, 201 bp, Homo sapiens; identical to SEQ ID NO: 18653

SEQ ID NO: 54313 - DNA, 201 bp, Homo sapiens; identical to SEQ ID NO: 23494

SEQ ID NO: 54314 - DNA, 201 bp, Homo sapiens; identical to SEQ ID NO: 23496

SEQ ID NO: 54315 - DNA, 201 bp, Homo sapiens; identical to SEQ ID NO: 23498

SEQ ID NO: 54316 - DNA, 201 bp, Homo sapiens; identical to SEQ ID NO: 23502

SEQ ID NO: 54317 - DNA, 201 bp, Homo sapiens; identical to SEQ ID NO: 23504

SEQ ID NO: 54318 - DNA, 201 bp, Homo sapiens; identical to SEQ ID NO: 23025

SEQ ID NO: 54319 - DNA, 201 bp, Homo sapiens; identical to SEQ ID NO: 23027

SEQ ID NO: 54320 - DNA, 201 bp, Homo sapiens; identical to SEQ ID NO: 23028

SEQ ID NO: 54321 - DNA, 201 bp, Homo sapiens; identical to SEQ ID NO: 23029

SEQ ID NO: 54322 - DNA, 201 bp, Homo sapiens; identical to SEQ ID NO: 23031

SEQ ID NO: 54323 - DNA, 201 bp, Homo sapiens; identical to SEQ ID NO: 23030

SEQ ID NO: 54324 - DNA, 201 bp, Homo sapiens; identical to SEQ ID NO: 23033

SEQ ID NO: 54325 - DNA, 201 bp, Homo sapiens; identical to SEQ ID NO: 23034

SEQ ID NO: 54326 - DNA, 201 bp, Homo sapiens; identical to SEQ ID NO: 23035

SEQ ID NO: 54327 - DNA, 201 bp, Homo sapiens; identical to SEQ ID NO: 23037

SEQ ID NO: 54328 - DNA, 201 bp, Homo sapiens; identical to SEQ ID NO: 23038

SEQ ID NO: 54329 - DNA, 201 bp, Homo sapiens; identical to SEQ ID NO: 23516

SEQ ID NO: 54330 - DNA, 201 bp, Homo sapiens; identical to SEQ ID NO: 23041

SEQ ID NO: 54331 - DNA, 201 bp, Homo sapiens; identical to SEQ ID NO: 19511

SEQ ID NO: 54332 - DNA, 201 bp, Homo sapiens; identical to SEQ ID NO: 23528

SEQ ID NO: 54333 - DNA, 201 bp, Homo sapiens; identical to SEQ ID NO: 23529

SEQ ID NO: 54334 - DNA, 201 bp, Homo sapiens; identical to SEQ ID NO: 23530

SEQ ID NO: 54335 - DNA, 201 bp, Homo sapiens; identical to SEQ ID NO: 23057

SEQ ID NO: 54336 - DNA, 201 bp, Homo sapiens; identical to SEQ ID NO: 23058

SEQ ID NO: 54337 - DNA, 201 bp, Homo sapiens; identical to SEQ ID NO: 18703

SEQ ID NO: 54338 - DNA, 201 bp, Homo sapiens; identical to SEQ ID NO: 18704

SEQ ID NO: 54339 - DNA, 201 bp, Homo sapiens; identical to SEQ ID NO: 21190

SEQ ID NO: 54340 - DNA, 201 bp, Homo sapiens; identical to SEQ ID NO: 23550

SEQ ID NO: 54341 - DNA, 201 bp, Homo sapiens; identical to SEQ ID NO: 23553

SEQ ID NO: 54342 - DNA, 201 bp, Homo sapiens; identical to SEQ ID NO: 18717

SEQ ID NO: 54343 - DNA, 201 bp, Homo sapiens; identical to SEQ ID NO: 23555

SEQ ID NO: 54344 - DNA, 201 bp, Homo sapiens; identical to SEQ ID NO: 22365

SEQ ID NO: 54345 - DNA, 201 bp, Homo sapiens; identical to SEQ ID NO: 22366

SEQ ID NO: 54346 - DNA, 201 bp, Homo sapiens; identical to SEQ ID NO: 22367

SEQ ID NO: 54347 - DNA, 201 bp, Homo sapiens; identical to SEQ ID NO: 22368

SEQ ID NO: 54348 - DNA, 201 bp, Homo sapiens; identical to SEQ ID NO: 22369

SEQ ID NO: 54349 - DNA, 201 bp, Homo sapiens; identical to SEQ ID NO: 22370

SEQ ID NO: 54350 - DNA, 201 bp, Homo sapiens; identical to SEQ ID NO: 22371

SEQ ID NO: 54351 - DNA, 201 bp, Homo sapiens; identical to SEQ ID NO: 23568

SEQ ID NO: 54352 - DNA, 201 bp, Homo sapiens; identical to SEQ ID NO: 19571

SEQ ID NO: 54353 - DNA, 201 bp, Homo sapiens; identical to SEQ ID NO: 23570

SEQ ID NO: 54354 - DNA, 201 bp, Homo sapiens; identical to SEQ ID NO: 23076

SEQ ID NO: 54355 - DNA, 201 bp, Homo sapiens; identical to SEQ ID NO: 19583

SEQ ID NO: 54356 - DNA, 201 bp, Homo sapiens; identical to SEQ ID NO: 18749

SEQ ID NO: 54357 - DNA, 201 bp, Homo sapiens; identical to SEQ ID NO: 18750

SEQ ID NO: 54358 - DNA, 201 bp, Homo sapiens; identical to SEQ ID NO: 21904

SEQ ID NO: 54359 - DNA, 201 bp, Homo sapiens; identical to SEQ ID NO: 18753

SEQ ID NO: 54360 - DNA, 201 bp, Homo sapiens; identical to SEQ ID NO: 18756

SEQ ID NO: 54361 - DNA, 201 bp, Homo sapiens; identical to SEQ ID NO: 19592

SEQ ID NO: 54362 - DNA, 201 bp, Homo sapiens; identical to SEQ ID NO: 18758

SEQ ID NO: 54363 - DNA, 201 bp, Homo sapiens; identical to SEQ ID NO: 22378

SEQ ID NO: 54364 - DNA, 201 bp, Homo sapiens; identical to SEQ ID NO: 19593

SEQ ID NO: 54365 - DNA, 201 bp, Homo sapiens; identical to SEQ ID NO: 18765

SEQ ID NO: 54366 - DNA, 201 bp, Homo sapiens; identical to SEQ ID NO: 18766

SEQ ID NO: 54367 - DNA, 201 bp, Homo sapiens; identical to SEQ ID NO: 23582

SEQ ID NO: 54368 - DNA, 201 bp, Homo sapiens; identical to SEQ ID NO: 23585

SEQ ID NO: 54369 - DNA, 201 bp, Homo sapiens; identical to SEQ ID NO: 23586

SEQ ID NO: 54370 - DNA, 201 bp, Homo sapiens; identical to SEQ ID NO: 22379

SEQ ID NO: 54371 - DNA, 201 bp, Homo sapiens; identical to SEQ ID NO: 19598

SEQ ID NO: 54372 - DNA, 201 bp, Homo sapiens; identical to SEQ ID NO: 22380

SEQ ID NO: 54373 - DNA, 201 bp, Homo sapiens; identical to SEQ ID NO: 18770

SEQ ID NO: 54374 - DNA, 201 bp, Homo sapiens; identical to SEQ ID NO: 22381

SEQ ID NO: 54375 - DNA, 201 bp, Homo sapiens; identical to SEQ ID NO: 22382

SEQ ID NO: 54376 - DNA, 201 bp, Homo sapiens; identical to SEQ ID NO: 23077

SEQ ID NO: 54377 - DNA, 201 bp, Homo sapiens; identical to SEQ ID NO: 23592

SEQ ID NO: 54378 - DNA, 201 bp, Homo sapiens; identical to SEQ ID NO: 21909

SEQ ID NO: 54379 - DNA, 201 bp, Homo sapiens; identical to SEQ ID NO: 22383

SEQ ID NO: 54380 - DNA, 201 bp, Homo sapiens; identical to SEQ ID NO: 18789

SEQ ID NO: 54381 - DNA, 201 bp, Homo sapiens; identical to SEQ ID NO: 18792

SEQ ID NO: 54382 - DNA, 201 bp, Homo sapiens; identical to SEQ ID NO: 18794

SEQ ID NO: 54383 - DNA, 201 bp, Homo sapiens; identical to SEQ ID NO: 21915

SEQ ID NO: 54384 - DNA, 201 bp, Homo sapiens; identical to SEQ ID NO: 20355

SEQ ID NO: 54385 - DNA, 201 bp, Homo sapiens; identical to SEQ ID NO: 21202

SEQ ID NO: 54386 - DNA, 201 bp, Homo sapiens; identical to SEQ ID NO: 23612

SEQ ID NO: 54387 - DNA, 201 bp, Homo sapiens; identical to SEQ ID NO: 23615

SEQ ID NO: 54388 - DNA, 201 bp, Homo sapiens; identical to SEQ ID NO: 21203

SEQ ID NO: 54389 - DNA, 201 bp, Homo sapiens; identical to SEQ ID NO: 21204

SEQ ID NO: 54390 - DNA, 201 bp, Homo sapiens; identical to SEQ ID NO: 19625

SEQ ID NO: 54391 - DNA, 201 bp, Homo sapiens; identical to SEQ ID NO: 18802

SEQ ID NO: 54392 - DNA, 201 bp, Homo sapiens; identical to SEQ ID NO: 23088

SEQ ID NO: 54393 - DNA, 201 bp, Homo sapiens; identical to SEQ ID NO: 18804

SEQ ID NO: 54394 - DNA, 201 bp, Homo sapiens; identical to SEQ ID NO: 22392

SEQ ID NO: 54395 - DNA, 201 bp, Homo sapiens; identical to SEQ ID NO: 23089

SEQ ID NO: 54396 - DNA, 201 bp, Homo sapiens; identical to SEQ ID NO: 22393

SEQ ID NO: 54397 - DNA, 201 bp, Homo sapiens; identical to SEQ ID NO: 22394

SEQ ID NO: 54398 - DNA, 201 bp, Homo sapiens; identical to SEQ ID NO: 22395

SEQ ID NO: 54399 - DNA, 201 bp, Homo sapiens; identical to SEQ ID NO: 22396

SEQ ID NO: 54400 - DNA, 201 bp, Homo sapiens; identical to SEQ ID NO: 22397

SEQ ID NO: 54401 - DNA, 201 bp, Homo sapiens; identical to SEQ ID NO: 22398

SEQ ID NO: 54402 - DNA, 201 bp, Homo sapiens; identical to SEQ ID NO: 22399

SEQ ID NO: 54403 - DNA, 201 bp, Homo sapiens; identical to SEQ ID NO: 22400

SEQ ID NO: 54404 - DNA, 201 bp, Homo sapiens; identical to SEQ ID NO: 18823

SEQ ID NO: 54405 - DNA, 201 bp, Homo sapiens; identical to SEQ ID NO: 18826

SEQ ID NO: 54406 - DNA, 201 bp, Homo sapiens; identical to SEQ ID NO: 18829

SEQ ID NO: 54407 - DNA, 201 bp, Homo sapiens; identical to SEQ ID NO: 18828

SEQ ID NO: 54408 - DNA, 201 bp, Homo sapiens; identical to SEQ ID NO: 18835

SEQ ID NO: 54409 - DNA, 201 bp, Homo sapiens; identical to SEQ ID NO: 19659

SEQ ID NO: 54410 - DNA, 201 bp, Homo sapiens; identical to SEQ ID NO: 18838

SEQ ID NO: 54411 - DNA, 201 bp, Homo sapiens; identical to SEQ ID NO: 18839

SEQ ID NO: 54412 - DNA, 201 bp, Homo sapiens; identical to SEQ ID NO: 19661

SEQ ID NO: 54413 - DNA, 201 bp, Homo sapiens; identical to SEQ ID NO: 23624

SEQ ID NO: 54414 - DNA, 201 bp, Homo sapiens; identical to SEQ ID NO: 23625

SEQ ID NO: 54415 - DNA, 201 bp, Homo sapiens; identical to SEQ ID NO: 23627

SEQ ID NO: 54416 - DNA, 201 bp, Homo sapiens; identical to SEQ ID NO: 19668

SEQ ID NO: 54417 - DNA, 201 bp, Homo sapiens; identical to SEQ ID NO: 21206

SEQ ID NO: 54418 - DNA, 201 bp, Homo sapiens; identical to SEQ ID NO: 18847

SEQ ID NO: 54419 - DNA, 201 bp, Homo sapiens; identical to SEQ ID NO: 22407

SEQ ID NO: 54420 - DNA, 201 bp, Homo sapiens; identical to SEQ ID NO: 18850

SEQ ID NO: 54421 - DNA, 201 bp, Homo sapiens; identical to SEQ ID NO: 22409

SEQ ID NO: 54422 - DNA, 201 bp, Homo sapiens; identical to SEQ ID NO: 22410

SEQ ID NO: 54423 - DNA, 201 bp, Homo sapiens; identical to SEQ ID NO: 22411

SEQ ID NO: 54424 - DNA, 201 bp, Homo sapiens; identical to SEQ ID NO: 22413

SEQ ID NO: 54425 - DNA, 201 bp, Homo sapiens; identical to SEQ ID NO: 22414

SEQ ID NO: 54426 - DNA, 201 bp, Homo sapiens; identical to SEQ ID NO: 19672

SEQ ID NO: 54427 - DNA, 201 bp, Homo sapiens; identical to SEQ ID NO: 19674

SEQ ID NO: 54428 - DNA, 201 bp, Homo sapiens; identical to SEQ ID NO: 22415

SEQ ID NO: 54429 - DNA, 201 bp, Homo sapiens; identical to SEQ ID NO: 22416

SEQ ID NO: 54430 - DNA, 201 bp, Homo sapiens; identical to SEQ ID NO: 23103

SEQ ID NO: 54431 - DNA, 201 bp, Homo sapiens; identical to SEQ ID NO: 21946

SEQ ID NO: 54432 - DNA, 201 bp, Homo sapiens; identical to SEQ ID NO: 23104

SEQ ID NO: 54433 - DNA, 201 bp, Homo sapiens; identical to SEQ ID NO: 21947

SEQ ID NO: 54434 - DNA, 201 bp, Homo sapiens; identical to SEQ ID NO: 23106

SEQ ID NO: 54435 - DNA, 201 bp, Homo sapiens; identical to SEQ ID NO: 21950

SEQ ID NO: 54436 - DNA, 201 bp, Homo sapiens; identical to SEQ ID NO: 19683

SEQ ID NO: 54437 - DNA, 201 bp, Homo sapiens; identical to SEQ ID NO: 19686

SEQ ID NO: 54438 - DNA, 201 bp, Homo sapiens; identical to SEQ ID NO: 18861

SEQ ID NO: 54439 - DNA, 201 bp, Homo sapiens; identical to SEQ ID NO: 19690

SEQ ID NO: 54440 - DNA, 201 bp, Homo sapiens; identical to SEQ ID NO: 20412

SEQ ID NO: 54441 - DNA, 201 bp, Homo sapiens; identical to SEQ ID NO: 19699

SEQ ID NO: 54442 - DNA, 201 bp, Homo sapiens; identical to SEQ ID NO: 18866

SEQ ID NO: 54443 - DNA, 201 bp, Homo sapiens; identical to SEQ ID NO: 19703

SEQ ID NO: 54444 - DNA, 201 bp, Homo sapiens; identical to SEQ ID NO: 19704

SEQ ID NO: 54445 - DNA, 201 bp, Homo sapiens; identical to SEQ ID NO: 19706

SEQ ID NO: 54446 - DNA, 201 bp, Homo sapiens; identical to SEQ ID NO: 21217

SEQ ID NO: 54447 - DNA, 201 bp, Homo sapiens; identical to SEQ ID NO: 19708

SEQ ID NO: 54448 - DNA, 201 bp, Homo sapiens; identical to SEQ ID NO: 21952

SEQ ID NO: 54449 - DNA, 201 bp, Homo sapiens; identical to SEQ ID NO: 21953

SEQ ID NO: 54450 - DNA, 201 bp, Homo sapiens; identical to SEQ ID NO: 21218

SEQ ID NO: 54451 - DNA, 201 bp, Homo sapiens; identical to SEQ ID NO: 18876

SEQ ID NO: 54452 - DNA, 201 bp, Homo sapiens; identical to SEQ ID NO: 23645

SEQ ID NO: 54453 - DNA, 201 bp, Homo sapiens; identical to SEQ ID NO: 18877

SEQ ID NO: 54454 - DNA, 201 bp, Homo sapiens; identical to SEQ ID NO: 21954

SEQ ID NO: 54455 - DNA, 201 bp, Homo sapiens; identical to SEQ ID NO: 18879

SEQ ID NO: 54456 - DNA, 201 bp, Homo sapiens; identical to SEQ ID NO: 23649

SEQ ID NO: 54457 - DNA, 201 bp, Homo sapiens; identical to SEQ ID NO: 18880

SEQ ID NO: 54458 - DNA, 201 bp, Homo sapiens; identical to SEQ ID NO: 18881

SEQ ID NO: 54459 - DNA, 201 bp, Homo sapiens; identical to SEQ ID NO: 23652

SEQ ID NO: 54460 - DNA, 201 bp, Homo sapiens; identical to SEQ ID NO: 18882

SEQ ID NO: 54461 - DNA, 201 bp, Homo sapiens; identical to SEQ ID NO: 18884

SEQ ID NO: 54462 - DNA, 201 bp, Homo sapiens; identical to SEQ ID NO: 21955

SEQ ID NO: 54463 - DNA, 201 bp, Homo sapiens; identical to SEQ ID NO: 21219

SEQ ID NO: 54464 - DNA, 201 bp, Homo sapiens; identical to SEQ ID NO: 18887

SEQ ID NO: 54465 - DNA, 201 bp, Homo sapiens; identical to SEQ ID NO: 21221

SEQ ID NO: 54466 - DNA, 201 bp, Homo sapiens; identical to SEQ ID NO: 23658

SEQ ID NO: 54467 - DNA, 201 bp, Homo sapiens; identical to SEQ ID NO: 22423

SEQ ID NO: 54468 - DNA, 201 bp, Homo sapiens; identical to SEQ ID NO: 22424

SEQ ID NO: 54469 - DNA, 201 bp, Homo sapiens; identical to SEQ ID NO: 19717

SEQ ID NO: 54470 - DNA, 201 bp, Homo sapiens; identical to SEQ ID NO: 23660

SEQ ID NO: 54471 - DNA, 201 bp, Homo sapiens; identical to SEQ ID NO: 22425

SEQ ID NO: 54472 - DNA, 201 bp, Homo sapiens; identical to SEQ ID NO: 18895

SEQ ID NO: 54473 - DNA, 201 bp, Homo sapiens; identical to SEQ ID NO: 19718

SEQ ID NO: 54474 - DNA, 201 bp, Homo sapiens; identical to SEQ ID NO: 22426

SEQ ID NO: 54475 - DNA, 201 bp, Homo sapiens; identical to SEQ ID NO: 19719

SEQ ID NO: 54476 - DNA, 201 bp, Homo sapiens; identical to SEQ ID NO: 22427

SEQ ID NO: 54477 - DNA, 201 bp, Homo sapiens; identical to SEQ ID NO: 22428

SEQ ID NO: 54478 - DNA, 201 bp, Homo sapiens; identical to SEQ ID NO: 22429

SEQ ID NO: 54479 - DNA, 201 bp, Homo sapiens; identical to SEQ ID NO: 22430

SEQ ID NO: 54480 - DNA, 201 bp, Homo sapiens; identical to SEQ ID NO: 22431

SEQ ID NO: 54481 - DNA, 201 bp, Homo sapiens; identical to SEQ ID NO: 19720

SEQ ID NO: 54482 - DNA, 201 bp, Homo sapiens; identical to SEQ ID NO: 19721

SEQ ID NO: 54483 - DNA, 201 bp, Homo sapiens; identical to SEQ ID NO: 19722

SEQ ID NO: 54484 - DNA, 201 bp, Homo sapiens; identical to SEQ ID NO: 19724

SEQ ID NO: 54485 - DNA, 201 bp, Homo sapiens; identical to SEQ ID NO: 19725

SEQ ID NO: 54486 - DNA, 201 bp, Homo sapiens; identical to SEQ ID NO: 19726

SEQ ID NO: 54487 - DNA, 201 bp, Homo sapiens; identical to SEQ ID NO: 19727

SEQ ID NO: 54488 - DNA, 201 bp, Homo sapiens; identical to SEQ ID NO: 23115

SEQ ID NO: 54489 - DNA, 201 bp, Homo sapiens; identical to SEQ ID NO: 19730

SEQ ID NO: 54490 - DNA, 201 bp, Homo sapiens; identical to SEQ ID NO: 23668

SEQ ID NO: 54491 - DNA, 201 bp, Homo sapiens; identical to SEQ ID NO: 19737

SEQ ID NO: 54492 - DNA, 201 bp, Homo sapiens; identical to SEQ ID NO: 19740

SEQ ID NO: 54493 - DNA, 201 bp, Homo sapiens; identical to SEQ ID NO: 19746

SEQ ID NO: 54494 - DNA, 201 bp, Homo sapiens; identical to SEQ ID NO: 19748

SEQ ID NO: 54495 - DNA, 201 bp, Homo sapiens; identical to SEQ ID NO: 19752

SEQ ID NO: 54496 - DNA, 201 bp, Homo sapiens; identical to SEQ ID NO: 21242

SEQ ID NO: 54497 - DNA, 201 bp, Homo sapiens; identical to SEQ ID NO: 21974

SEQ ID NO: 54498 - DNA, 201 bp, Homo sapiens; identical to SEQ ID NO: 22441

SEQ ID NO: 54499 - DNA, 201 bp, Homo sapiens; identical to SEQ ID NO: 19757

SEQ ID NO: 54500 - DNA, 201 bp, Homo sapiens; identical to SEQ ID NO: 18922

SEQ ID NO: 54501 - DNA, 201 bp, Homo sapiens; identical to SEQ ID NO: 23675

SEQ ID NO: 54502 - DNA, 201 bp, Homo sapiens; identical to SEQ ID NO: 19756

SEQ ID NO: 54503 - DNA, 201 bp, Homo sapiens; identical to SEQ ID NO: 21976

SEQ ID NO: 54504 - DNA, 201 bp, Homo sapiens; identical to SEQ ID NO: 19758

SEQ ID NO: 54505 - DNA, 201 bp, Homo sapiens; identical to SEQ ID NO: 21243

SEQ ID NO: 54506 - DNA, 201 bp, Homo sapiens; identical to SEQ ID NO: 18924

SEQ ID NO: 54507 - DNA, 201 bp, Homo sapiens; identical to SEQ ID NO: 19760

SEQ ID NO: 54508 - DNA, 201 bp, Homo sapiens; identical to SEQ ID NO: 21244

SEQ ID NO: 54509 - DNA, 201 bp, Homo sapiens; identical to SEQ ID NO: 21245

SEQ ID NO: 54510 - DNA, 201 bp, Homo sapiens; identical to SEQ ID NO: 21246

SEQ ID NO: 54511 - DNA, 201 bp, Homo sapiens; identical to SEQ ID NO: 21247

SEQ ID NO: 54512 - DNA, 201 bp, Homo sapiens; identical to SEQ ID NO: 22446

SEQ ID NO: 54513 - DNA, 201 bp, Homo sapiens; identical to SEQ ID NO: 22447

SEQ ID NO: 54514 - DNA, 201 bp, Homo sapiens; identical to SEQ ID NO: 22448

SEQ ID NO: 54515 - DNA, 201 bp, Homo sapiens; identical to SEQ ID NO: 20466

SEQ ID NO: 54516 - DNA, 201 bp, Homo sapiens; identical to SEQ ID NO: 22449

SEQ ID NO: 54517 - DNA, 201 bp, Homo sapiens; identical to SEQ ID NO: 18940

SEQ ID NO: 54518 - DNA, 201 bp, Homo sapiens; identical to SEQ ID NO: 22450

SEQ ID NO: 54519 - DNA, 201 bp, Homo sapiens; identical to SEQ ID NO: 19767

SEQ ID NO: 54520 - DNA, 201 bp, Homo sapiens; identical to SEQ ID NO: 23120

SEQ ID NO: 54521 - DNA, 201 bp, Homo sapiens; identical to SEQ ID NO: 19771

SEQ ID NO: 54522 - DNA, 201 bp, Homo sapiens; identical to SEQ ID NO: 19774

SEQ ID NO: 54523 - DNA, 201 bp, Homo sapiens
ctcacatcttgctgttccggcgcccactacccaagaaaccaaagaaatgaagctggcaagctacttttcagcctcaagctttacacagctgtccttacttyctaacatctttctgataacattattatgttgccttcttgtttctcactttgatatttaaaagatgttcaatacactgtttgaatgtgctggtaactgctt

SEQ ID NO: 54524 - DNA, 201 bp, Homo sapiens
aataaataaataggccaagtgattatggggaaaatcagttatgaaggaggaaagtaacctataaaaagacaaaaactaccatgttccatgtccaatcgctytcataataattaacatgactataacacttaatagtttacaacatactttcatatatatattatcctcatgacagccctgaggagtaggattatttatccc

SEQ ID NO: 54525 - DNA, 201 bp, Homo sapiens
cagtggctggactggtgggtgctgtcaaccaccaccaagtcctgctgttctttgtatcctgacctgaagtgatgggggcaaccgggggcttgggagggctrtcatctaaggaagatgttagaagggtaggggacctcagggatcttggacacgtctccttgccctgccctgtcccataatctacgaaacaagagctgattt

SEQ ID NO: 54526 - DNA, 201 bp, Homo sapiens
catccacatcatcggcggagtcattgctgtgggagtcttccttctccttattgcagtggctggactggtgggtgctgtcaaccaccaccaagtcctgctgktctttgtatcctgacctgaagtgatgggggcaaccgggggcttgggagggctgtcatctaaggaagatgttagaagggtaggggacctcagggatcttgg

SEQ ID NO: 54527 - DNA, 201 bp, Homo sapiens
cttgggctgtgccgcatgctagaattgttgagatgtatcctgctctttcttcgtagctggtgagcttgttgctcattggagtggctgcttggggcaagggyctgggtctggtgtccagcatccacatcatcggcggagtcattgctgtgggagtcttccttctccttattgcagtggctggactggtgggtgctgtcaacc

SEQ ID NO: 54528 - DNA, 201 bp, Homo sapiens
ttgtctgagggtgggggaatgaactgaaggccgtgggcgtaagttccatacctccttcctgtgaacctcagtttcttccaaactggaagtgataggatgawcctgagggttcatcttttgcattcatactaccatccctgccaccccctccccgccatcctagccattctaacctttgggagtgcctagggatgctcccgg

SEQ ID NO: 54529 - DNA, 201 bp, Homo sapiens
taagttcctccagagccgtctccctgggaattagccctctcctaactccgaccacagaaagctcagctttcaacctaagcttttggagtttaggctgtagyccctaagagagtctctagaaaccctgcccctagttttaagtttcgcccaatgaaaaaacaaaaggagagggacagaaggcgggtcggtgacgtaatgcgg

SEQ ID NO: 54530 - DNA, 201 bp, Homo sapiens
cgcgttggcctcccaacgtgctgggattataggcgtgagccaccacgccccgcctaaaatccatattcaaagaagcaatttcagttcctttctaagctttstcagtcaaggggctccactgacttcctaggccctgtaatttaaccagtctttaaggttttgcaggaaagtcccttcttccaagtggtttttccaaatcgc

SEQ ID NO: 54531 - DNA, 201 bp, Homo sapiens
aagtaaaagccatttaaaaatctatattctttttttttttttgacacagagtcttgctctgttgcccaggctggagtgcaatggcatgatctcggctcacygcaacctctgcctcccgggttcaagcgatcctcctgcctcagtctcccaagtagctgggattacaggtgtgcaccaccacgcctgactaattttgtattt

SEQ ID NO: 54532 - DNA, 201 bp, Homo sapiens
cactgcagaacagggggaagggggtggggaagggccctccttctacgggcggagccctttttgcccagctctcagagcggccccctacccgcccctcccgscgtctccccttcacctaagttcctccagagccgtctccctgggaattagccctctcctaactccgaccacagaaagctcagctttcaacctaagcttttg

SEQ ID NO: 54533 - DNA, 201 bp, Homo sapiens
ctgtgttgtcatcacttgctctaatggcactaaggaggtagagcggaaggtgtgtggggggaagacaggaacaggagcaaggggaggagaggggaccaagragagttctggggacctatctgcactttggctctgcagagcatagtgtgtgagagttagtatgcgcttgggagcctgagattctctgcatggtgtacttca

SEQ ID NO: 54534 - DNA, 201 bp, Homo sapiens
gcataggatgggggctggagtcattcttagctgtttcccttcctctgtccatatactggatcacctcaacataccctggtgtggctctaagggtaaatcasggatagggccaaggagaaaacaaccaagaactctttcctgtaataagcaggatccagtttgagaaagtttagcgaatataaaagtaaaagccatttaaaa

SEQ ID NO: 54535 - DNA, 201 bp, Homo sapiens
cggatggtgttgccatggcagcatttcctccctgtgttgtcatcacttgctctaatggcactaaggaggtagagcggaaggtgtgtggggggaagacaggracaggagcaaggggaggagaggggaccaagaagagttctggggacctatctgcactttggctctgcagagcatagtgtgtgagagttagtatgcgcttgg

SEQ ID NO: 54536 - DNA, 201 bp, Homo sapiens
tgatccacccgcgttggcctcccaacgtgctgggattataggcgtgagccaccacgccccgcctaaaatccatattcaaagaagcaatttcagttcctttytaagctttgtcagtcaaggggctccactgacttcctaggccctgtaatttaaccagtctttaaggttttgcaggaaagtcccttcttccaagtggttttt

SEQ ID NO: 54537 - DNA, 201 bp, Homo sapiens
ggtgtccttgagggaaagaatgatctcttgacaaccacccaggtaggcaggtaacaatggagaagactgaaatggctggaagagatcaggatatgatggargaagtgtttccaccagatacctttcatgagcaaagaaggctgcttttgttagctctttgctgcatcagaggtgaatggaatgacagcgagctggaacaac

SEQ ID NO: 54538 - DNA, 201 bp, Homo sapiens
accagatacctttcatgagcaaagaaggctgcttttgttagctctttgctgcatcagaggtgaatggaatgacagcgagctggaacaacctccagttccaycagttcctcagtggtagggccttgtggatggagagaagctgttcctgccagggctccaccacaggactgaagcctggggtgggcaggaggatgtggcgga

SEQ ID NO: 54539 - DNA, 201 bp, Homo sapiens
aaatgtattctttcccagagtcccatcttggggactaggaagtagctgactgggaattgatatatgatacagctaaaccttctatgcacctgctagtcccygatacacccaagttgagggctgacctttctcttacctcgaatgctgtccaatgaggcctggatgctgtcctggagttcggggtcgtccaccctctctgcc

SEQ ID NO: 54540 - DNA, 201 bp, Homo sapiens
aaagaatgatctcttgacaaccacccaggtaggcaggtaacaatggagaagactgaaatggctggaagagatcaggatatgatggaagaagtgtttccacyagatacctttcatgagcaaagaaggctgcttttgttagctctttgctgcatcagaggtgaatggaatgacagcgagctggaacaacctccagttccacca

SEQ ID NO: 54541 - DNA, 201 bp, Homo sapiens
aatgatctcttgacaaccacccaggtaggcaggtaacaatggagaagactgaaatggctggaagagatcaggatatgatggaagaagtgtttccaccagayacctttcatgagcaaagaaggctgcttttgttagctctttgctgcatcagaggtgaatggaatgacagcgagctggaacaacctccagttccaccagttc

SEQ ID NO: 54542 - DNA, 201 bp, Homo sapiens
acccgggaggtgaaggttgcagtgaactgagatcgcgccactacactccagcctgggcgacagagggagactctgtctcaaaataataataatgataatarcttaattaccttgtttcaagacccaaacacctctctcgccctgtcaaacatctattctcctgcatacctttttggtattaatttctgtaagagtttatat

SEQ ID NO: 54543 - DNA, 201 bp, Homo sapiens
gtccatatactggatcacctcaacataccctggtgtggctctaagggtaaatcagggatagggccaaggagaaaacaaccaagaactctttcctgtaatargcaggatccagtttgagaaagtttagcgaatataaaagtaaaagccatttaaaaatctatattctttttttttttttgacacagagtcttgctctgttgc

SEQ ID NO: 54544 - DNA, 201 bp, Homo sapiens
attaccttgtttcaagacccaaacacctctctcgccctgtcaaacatctattctcctgcatacctttttggtattaatttctgtaagagtttatataaatrctgtgtagttaaagataagggaattgaggttggaattgcccacaggaacctgtaaaatgacctgaaaagtaataactaacattgagtgtttactatatgc

SEQ ID NO: 54545 - DNA, 201 bp, Homo sapiens
ccttctccttattgcagtggctggactggtgggtgctgtcaaccaccaccaagtcctgctgttctttgtatcctgacctgaagtgatgggggcaaccgggrgcttgggagggctgtcatctaaggaagatgttagaagggtaggggacctcagggatcttggacacgtctccttgccctgccctgtcccataatctacgaa

SEQ ID NO: 54546 - DNA, 201 bp, Homo sapiens
tccaaatcgcacaatggcaaagccaaacagaggaagaaacattaaaaaaaaaaaaaagaccattatttctttgttttgtttttcctgtataaaaaaggacmccaaatataaaggtagggaaagggacaagagggaacataccccttagtgtagagaaatgggaaggagaaggagaagcctcaaaaggagaggtgggagggg

SEQ ID NO: 54547 - DNA, 201 bp, Homo sapiens
ccagtccctgctatgatttcccagccaggtggatggagaaatcttaacagtgtcccagggcctcctgtgggaggtggctaattaagatgggtgttggttcygggagaatatggcaagctaggtccgaggtgcaatcctaaactcttgatgacctgcggatttcaaactctcacaggaattcatgcacatttggtctgttac

SEQ ID NO: 54548 - DNA, 201 bp, Homo sapiens
aatgaactcattatccagtcccagaacctgctgccccagactgcttcctgctctggactccccaggcagggaacaagtctaccatgagtctgtcacagccyatcttccccatgctcacacatttcttcattgccaagaaggtcagctcaacagggacctgtattttgatctcctgggagaaggatcagagcagggaaagag

SEQ ID NO: 54549 - DNA, 201 bp, Homo sapiens
caaagaagcaatttcagttcctttctaagctttgtcagtcaaggggctccactgacttcctaggccctgtaatttaaccagtctttaaggttttgcaggamagtcccttcttccaagtggtttttccaaatcgcacaatggcaaagccaaacagaggaagaaacattaaaaaaaaaaaaaagaccattatttctttgtttt

SEQ ID NO: 54550 - DNA, 201 bp, Homo sapiens
ataaataaataggccaagtgattatggggaaaatcagttatgaaggaggaaagtaacctataaaaagacaaaaactaccatgttccatgtccaatcgcttycataataattaacatgactataacacttaatagtttacaacatactttcatatatatattatcctcatgacagccctgaggagtaggattatttatccct

SEQ ID NO: 54551 - DNA, 201 bp, Homo sapiens
gacctttgtagtagaaccttctgggatttcaggtatggtgcctagtttccagtgcatctgtacctcccctttgaaactaggatctgatgcgccagtttctwagaggcctagatttccttcatgccaattgcatcgttcaccgagatctgaagccagagaacattctggtgacaagtggtggaacagtcaagctggctgact

SEQ ID NO: 54552 - DNA, 201 bp, Homo sapiens
gcctttcgagctctgcagcactcttatctacataaggatgaaggtaatccggagtgagcaatggagtggctgccatggaaggaagaaaagctgccatttcscttctggacactgagagggcaatctttgcctttatctctgaggctatggagggtcctcctccatctttctacagagattactttgctgccttaatgacat

SEQ ID NO: 54553 - DNA, 201 bp, Homo sapiens
tttctacagagattactttgctgccttaatgacattcccctcccacctctccttttgaggcttctccttctccttcccatttctctacactaaggggtatrttccctcttgtccctttccctacctttatatttggggtccttttttatacaggaaaaacaaaacaaagaaataatggtcttttttttttttttaatgttt

SEQ ID NO: 54554 - DNA, 201 bp, Homo sapiens
cccattcttttacttgcgtactactaacttgcccatagcagaaagctctgaaatgttctggaattaggaacttcatatccctttattctctttattttttatttatttatttatttatttatttatttatttatttatttattgagataaggtttcactctgtcacccaggctggagtgcagtggcccaattacagctcac

SEQ ID NO: 54555 - DNA, 201 bp, Homo sapiens
ccagtggctgaaattggtgtcggtgcctatgggacagtgtacaaggcccgtgatccccacagtggccactttgtggccctcaagagtgtgagagtccccartggaggaggaggtggaggaggccttcccatcagcacagttcgtgaggtggctttactgaggcgactggaggcttttgagcatcccaatgttgtccggtga

SEQ ID NO: 54556 - DNA, 201 bp, Homo sapiens
attcttttacttgcgtactactaacttgcccatagcagaaagctctgaaatgttctggaattaggaacttcatatccctttattctctttattttttattkatttatttatttatttatttatttatttatttatttattgagataaggtttcactctgtcacccaggctggagtgcagtggcccaattacagctcactgt

SEQ ID NO: 54557 - DNA, 201 bp, Homo sapiens
acagtgtacaaggcccgtgatccccacagtggccactttgtggccctcaagagtgtgagagtccccaatggaggaggaggtggaggaggccttcccatcarcacagttcgtgaggtggctttactgaggcgactggaggcttttgagcatcccaatgttgtccggtgagaaggtggtggagggttgggcgtggggagtaaa

SEQ ID NO: 54558 - DNA, 201 bp, Homo sapiens
atcacttcaactcaggaggcggaggttgcagtgagctgagatcataccattgcactccagcctgggtgatagagcgagactccgtctcaaaaaaaaaaaaraagaaaaaagaagaaagctcatcccaggtattgttgtgggtgggcagaagtctgttttcttcatggttttctgacctttgcctctcccctcaggaaatgc

SEQ ID NO: 54559 - DNA, 201 bp, Homo sapiens
gcgatttggaaaaaccacttggaagaagggactttcctgcaaaaccttaaagactggttaaattacagggcctaggaagtcagtggagccccttgactgasaaagcttagaaaggaactgaaattgcttctttgaatatggattttaggcggggcgtggtggctcacgcctataatcccagcacgttgggaggccaacgcg

SEQ ID NO: 54560 - DNA, 201 bp, Homo sapiens
aaatacaaaattagtcaggcgtggtggtgcacacctgtaatcccagctacttgggagactgaggcaggaggatcgcttgaacccgggaggcagaggttgcrgtgagccgagatcatgccattgcactccagcctgggcaacagagcaagactctgtgtcaaaaaaaaaaaaagaatatagatttttaaatggcttttactt

SEQ ID NO: 54561 - DNA, 201 bp, Homo sapiens
aagctggctgactttggcctggccagaatctacagctaccagatggcacttacacccgtggtcagtagaaagatggtaccaaaatgggttctggttgggartaggagagtgattgcccgtagcaattgagaagtcatgtgcttcatgtgttcagtcaagcaagttgtgtttcatggtaacccatggggtccccatccattc

SEQ ID NO: 54562 - DNA, 201 bp, Homo sapiens
aaaaaccacttggaagaagggactttcctgcaaaaccttaaagactggttaaattacagggcctaggaagtcagtggagccccttgactgacaaagcttaraaaggaactgaaattgcttctttgaatatggattttaggcggggcgtggtggctcacgcctataatcccagcacgttgggaggccaacgcgggtggatca

SEQ ID NO: 54563 - DNA, 201 bp, Homo sapiens
tggggagtaaagggaaaagacagcctataggtggggtgtgatgatctgtagagaagtggggaccctgaggaaataatgagaggccatgttgggttaaaggrgattgaaaagtgagcatttactctggtcaggctgatggacgtctgtgccacatcccgaactgaccgggagatcaaggtaaccctggtgtttgagcatgta

SEQ ID NO: 54564 - DNA, 201 bp, Homo sapiens
tgggaggccaaggtgggcgtatcacctgaggtcaggagttcgagaccagcctggccaacatggtgaaacctcgtctctactaaaagtacaaaaataagccrggggtggtggcacacgcctgtaatctcagctacttgggaggctgagataggagaatcacttcaactcaggaggcggaggttgcagtgagctgagatcata

SEQ ID NO: 54565 - DNA, 201 bp, Homo sapiens
ccctcccagtttccgcgcgcctctttggcagctggtcacatggtgagggtgggggtgagggggcctctctagcttgcggcctgtgtctatggtcgggcccyctgcgtccagctgctccggaccgagctcgggtgtatggggccgtaggaaccggctccggggccccgataacgggccgcccccacagcaccccgggctggc

SEQ ID NO: 54566 - DNA, 201 bp, Homo sapiens
cccctcccacctctccttttgaggcttctccttctccttcccatttctctacactaaggggtatgttccctcttgtccctttccctacctttatatttggkgtccttttttatacaggaaaaacaaaacaaagaaataatggtcttttttttttttttaatgtttcttcctctgtttggctttgccattgtgcgatttgga

SEQ ID NO: 54567 - DNA, 201 bp, Homo sapiens
tgtgattgtagggtctcccttgatctgagaatggctacctctcgatatgagccagtggctgaaattggtgtcggtgcctatgggacagtgtacaaggcccrtgatccccacagtggccactttgtggccctcaagagtgtgagagtccccaatggaggaggaggtggaggaggccttcccatcagcacagttcgtgaggtg

SEQ ID NO: 54568 - DNA, 201 bp, Homo sapiens
tggctgtgggcacagggaaagaaatagagactggggaaagaaatagagcagtatgcagggccctggccactgtggttaatgaaacttggttggtagatggkctgtagtttttattacagctgcaaatagccacccacagagaaggatatagaagagaacccatcctggctgggcacggtggctcacgcctgtaatcccagc

SEQ ID NO: 54569 - DNA, 201 bp, Homo sapiens
tgtgggcacagggaaagaaatagagactggggaaagaaatagagcagtatgcagggccctggccactgtggttaatgaaacttggttggtagatgggctgyagtttttattacagctgcaaatagccacccacagagaaggatatagaagagaacccatcctggctgggcacggtggctcacgcctgtaatcccagcactt

SEQ ID NO: 54570 - DNA, 201 bp, Homo sapiens
ggacatatctggacaaggcacccccaccaggcttgccagccgaaacgatcaaggtgagtggggttggtaggcattgagaggtggattgggacctttgtagyagaaccttctgggatttcaggtatggtgcctagtttccagtgcatctgtacctcccctttgaaactaggatctgatgcgccagtttctaagaggcctaga

SEQ ID NO: 54571 - DNA, 201 bp, Homo sapiens
aaaacaaagaaataatggtcttttttttttttttaatgtttcttcctctgtttggctttgccattgtgcgatttggaaaaaccacttggaagaagggactktcctgcaaaaccttaaagactggttaaattacagggcctaggaagtcagtggagccccttgactgacaaagcttagaaaggaactgaaattgcttctttg

SEQ ID NO: 54572 - DNA, 201 bp, Homo sapiens
caacagatcacgtggctgccatcgcccctccgcccccttacactcttcgccctcctcccagtcgaagcacctcctgtccgcccctcagcgcatgggtggcrgtcacgtgcccagaacgtccggcgttcgccccgccctcccagtttccgcgcgcctctttggcagctggtcacatggtgagggtgggggtgagggggcctc

SEQ ID NO: 54573 - DNA, 201 bp, Homo sapiens
gaaactaggatctgatgcgccagtttctaagaggcctagatttccttcatgccaattgcatcgttcaccgagatctgaagccagagaacattctggtgacragtggtggaacagtcaagctggctgactttggcctggccagaatctacagctaccagatggcacttacacccgtggtcagtagaaagatggtaccaaaat

SEQ ID NO: 54574 - DNA, 201 bp, Homo sapiens
ctgtgattgtagggtctcccttgatctgagaatggctacctctcgatatgagccagtggctgaaattggtgtcggtgcctatgggacagtgtacaaggccygtgatccccacagtggccactttgtggccctcaagagtgtgagagtccccaatggaggaggaggtggaggaggccttcccatcagcacagttcgtgaggt

SEQ ID NO: 54575 - DNA, 201 bp, Homo sapiens
atcgcgtggacgagcccttgtcctgctcttatgtgctgaccattcgcactcctcggctctgcccccaccctctcctccggcccccacccagtgctgcaccrcaggccatcctctgtcacccttccctacagcctgaggagtacatggcctacgttcagaggcaagccggtgagtaattagagaaggaggagaagacgggga

SEQ ID NO: 54576 - DNA, 201 bp, Homo sapiens
ttccaaatggaaggtgcgctaagtgcaaaaggcctggagacaagaggcaatggcctatcccaggaactgacagatactcacagggactgaggggataatcrtgggaagaggagtgtaggagatgagtctgggtggttggtaggggacaggtcatgaagggctctgtagctatgatgaggaatttagacaatccaagagaca

SEQ ID NO: 54577 - DNA, 201 bp, Homo sapiens
attccctcctattcctagttgattgtttttttacatgaaaaggttattgaatttatcaagtccattttctgcatcagttgagatgatcatttgggtttttyccccttcattctattaatgtatatgacattgatttacctatgttgaaccatccttgcattcttggagtgaatccaacataaatcatgatgtataatgctt

SEQ ID NO: 54578 - DNA, 201 bp, Homo sapiens
atttctccagggaaatacctagaaagtagaatcactgggttacaggagtgtatgttattggtgaattcaattttttgtttgttttgttttgttttgttttgttttgagatagagtttcactcttgttgcccaggctggagtgcaatggcgtgatcttggctcactgcaacctccgcctcccaggatcaagcgattgtcctg

SEQ ID NO: 54579 - DNA, 201 bp, Homo sapiens
ccgctgtcaaccttcaggtctcagtttatgatcgaaacacccggactccgcccccgtggagaaatgggagcgccctctcctctcacccactaaatacagcyggagggcttatggcttattctgtcttcgactgatctcttccccagggtttgaagagggatttcgttgttctccctgatcccagcctttctttgcttcctt

SEQ ID NO: 54580 - DNA, 201 bp, Homo sapiens
gtcctaccttgggaggttgaagtgggaagattgcttggacctaggaggttgaggcttcagtgagctgtgatcatgccactgcactccagcctgggtgacasagtgagaccctgtctgaaaaaaaaaaaaagatttagtagattttcttgagtaaacatttcttcatttgttatatgtccttaggaaaatttccaaagagtt

SEQ ID NO: 54581 - DNA, 201 bp, Homo sapiens
gctgaggagagaggatcacttgagcccaggagtttgagaccagcctgggcaacagagcaagaccctgcatctattaaaaaagaagaaaaagaaagtaagcraaaaaagcataattgccaggtgcaagttatggatatttaaagattgtcttttttaaactttttattacagaaacttaaaaacatatataaactccctaca

SEQ ID NO: 54582 - DNA, 201 bp, Homo sapiens
gaggagcaggatggggatggggagggtcactgcagctggggccattgtgaggtgacctacatctacctagggatgcaaggatatccccagaacctttgccytcatagtatggagggcatgaacaggctttcatacttgactctctccttttctcctcgtcaggagcaggacccaagccctgaggcagcagattcagcttct

SEQ ID NO: 54583 - DNA, 201 bp, Homo sapiens
tgctttgtgtttttaaattttcatcagtaatggagtttccctgtggagtgtgcgaaatccctcatgctgccatttcagaagtaggaccgctcccacttttkgtttttgagacaaggtcttgctttccacacgggttggaatgcagtgtggcatgatcatagctcactgtaactttgaactcctgggcttaagggatcttcc

SEQ ID NO: 54584 - DNA, 201 bp, Homo sapiens
cctgtagtcctaccttgggaggttgaagtgggaagattgcttggacctaggaggttgaggcttcagtgagctgtgatcatgccactgcactccagcctggrtgacacagtgagaccctgtctgaaaaaaaaaaaaagatttagtagattttcttgagtaaacatttcttcatttgttatatgtccttaggaaaatttccaa

SEQ ID NO: 54585 - DNA, 201 bp, Homo sapiens
taatgattgaaaaaatatataacctaaaagttatcattctaacagtctttaagtgtacaattcagtggaaacattcagtgttctatcaccatcactactayttccaaaacttttttcatcatcccaaacaaaaataactcctatttctccctctcccagactctgttctactttctgtctgtatgagtttcctgttctagg

SEQ ID NO: 54586 - DNA, 201 bp, Homo sapiens
agatgcttaatgagccagaggaccaggccccaggaggggaggaggtgccggctgaggtgagaccagctgcctcagaggagcaggatggggatggggagggycactgcagctggggccattgtgaggtgacctacatctacctagggatgcaaggatatccccagaacctttgccttcatagtatggagggcatgaacaggc

SEQ ID NO: 54587 - DNA, 201 bp, Homo sapiens
ctgaggagagaggatcacttgagcccaggagtttgagaccagcctgggcaacagagcaagaccctgcatctattaaaaaagaagaaaaagaaagtaagcamaaaaagcataattgccaggtgcaagttatggatatttaaagattgtcttttttaaactttttattacagaaacttaaaaacatatataaactccctacaa

SEQ ID NO: 54588 - DNA, 201 bp, Homo sapiens
cagattctaagggaagagggttgcatcttatagtcggggcgggggcggggggggtcccctcccagaccctaaatccaaagtttaaaacatatttccagccrggcgcagtggcttatgcctgtaatcccagcactttgggaggccgaggcgggcagatcacctgaggtcaggagttcaagaccagcctgaccaatatggtga

SEQ ID NO: 54589 - DNA, 201 bp, Homo sapiens
gagcccaatgagagatgctccctgcttgctgaaggtgaaagggactgggttagatagaatgagggcttggaaactagcagttcatccaagaactggagtccactgaatgaggcaggatctaggggacctgtagtggttaagaagaccactggaggagtagacagattacacggacaggaaagaagcaaagaatcctgcaac

SEQ ID NO: 54590 - DNA, 201 bp, Homo sapiens
ggcttgcttcacttggaaggacattcctgctttatgagcagggagctaggcagggatgacaacctctgctctctcggtttgcatctccttttgtgaaaccwccactctctgagcaagcttccgtgagggcaatcagggccccgatacttttgtcccactgcacttgaggtaaagcctctgccctgtgggtggggctgagtg

SEQ ID NO: 54591 - DNA, 201 bp, Homo sapiens
ctgagggtgctcattctctccccactttctggaacactgtcctcacttgcgcctgcttcccaacaccgtcatccctttgcgtgtttacctcctattcatcyctctgggaagcagcttttagagcatatctgctggttttctggtttgctcctgtacacccagtgcctagcactctgcctggcacacaatggatgatcagta

SEQ ID NO: 54592 - DNA, 201 bp, Homo sapiens
accctgtcccctacaatttgtgcttctgagttgaggagccttcacctctgttgctgaggaaatggtagaatgctgcctatcacctccagcacaatcccagygaaaaaggtgtgaagcacccaccatgttcttgaacaatcaggtttctaaataaacaactggaccatcaatccatcaaccttttttgtggggtgggggttc

SEQ ID NO: 54593 - DNA, 201 bp, Homo sapiens
gttgaggagccttcacctctgttgctgaggaaatggtagaatgctgcctatcacctccagcacaatcccagtgaaaaaggtgtgaagcacccaccatgttyttgaacaatcaggtttctaaataaacaactggaccatcaatccatcaaccttttttgtggggtgggggttccagcagggagaaggctcagtgttcttttc

SEQ ID NO: 54594 - DNA, 201 bp, Homo sapiens
gcttctgagttgaggagccttcacctctgttgctgaggaaatggtagaatgctgcctatcacctccagcacaatcccagtgaaaaaggtgtgaagcacccmccatgttcttgaacaatcaggtttctaaataaacaactggaccatcaatccatcaaccttttttgtggggtgggggttccagcagggagaaggctcagtg

SEQ ID NO: 54595 - DNA, 201 bp, Homo sapiens
acatggtcacattattggttttacatattgatcttacactcagcaactcttttttgaactctttcatttttagtagttcacaaattcttgtggattttctrtatagataattatgtcatctgcaagagaaacagttttggtttcttcctttctaagttgtatacatttcatttttcttatacctcgagtgcaacagaagtg

SEQ ID NO: 54596 - DNA, 201 bp, Homo sapiens
tctaaaaaagtagaaaagtgtgaatagagtttctcatactttggactacaattcagtaaaaatttatcttaatgtatgttataaggttaggacctagatayacctattttccacagttgccccagcactgtttattgaatagtccatacattcctctctgatttgtaatgcctcctcagttatttaccaagttctcaaata

SEQ ID NO: 54597 - DNA, 201 bp, Homo sapiens
ggagggcaggacacttagcaggcactgagcaagcaggcccccacctgcccttagtgatgtttggagtcgttttaccctcttctattgaattgccttgggawttccttctccctttccctgcccaccctgtcccctacaatttgtgcttctgagttgaggagccttcacctctgttgctgaggaaatggtagaatgctgcct

SEQ ID NO: 54598 - DNA, 201 bp, Homo sapiens
cctctgttgctgaggaaatggtagaatgctgcctatcacctccagcacaatcccagtgaaaaaggtgtgaagcacccaccatgttcttgaacaatcaggtytctaaataaacaactggaccatcaatccatcaaccttttttgtggggtgggggttccagcagggagaaggctcagtgttcttttcagatcatgctctgat

SEQ ID NO: 54599 - DNA, 201 bp, Homo sapiens
attcagtaggatcttttgagtggaggtgggtagagagagcaaggagggcaggacacttagcaggcactgagcaagcaggcccccacctgcccttagtgatrtttggagtcgttttaccctcttctattgaattgccttgggatttccttctccctttccctgcccaccctgtcccctacaatttgtgcttctgagttgagg

SEQ ID NO: 54600 - DNA, 201 bp, Homo sapiens
gaggatgaggatgaagatgaggatgaacggcagttactgggagaatttgagaaggaactggaagggatcctgcttccgtcagaccgagaccggctccgttyggaggtgaaggctggcatggagcgggaactggaaaacatcatccaggaggcaagcccagctcttcctcctgttgcttccacagccgcctggtcccgtgga

SEQ ID NO: 54601 - DNA, 201 bp, Homo sapiens
aaagcctctgccctgtgggtggggctgagtggaggaagggagcccttgatctttttcaggaatttagttgctgtatcttggagctggtggccctcctggtraaataccatatatcatatctcatgactggatgttgagagaataggaagtccctccccctccaccgccccaccccactttttttttttttttttttaacta

SEQ ID NO: 54602 - DNA, 201 bp, Homo sapiens
ctgttatggacgccacatccagcaataccacatggaaggtaactcactcctatattttccttaagcccttagtgtcatatcatggaagttccccagttccytcctcctcctcctcctcttaagagtaacagtgcttcactgtggcttcccttgcagattcagagatcaaaggtgaagtcctctatctcggctactaccaat

SEQ ID NO: 54603 - DNA, 201 bp, Homo sapiens
taatggcttgcttcacttggaaggacattcctgctttatgagcagggagctaggcagggatgacaacctctgctctctcggtttgcatctccttttgtgaracctccactctctgagcaagcttccgtgagggcaatcagggccccgatacttttgtcccactgcacttgaggtaaagcctctgccctgtgggtggggctg

SEQ ID NO: 54604 - DNA, 201 bp, Homo sapiens
tctgttcccagaggggaccctgttccttcccttctgagggtgctcattctctccccactttctggaacactgtcctcacttgcgcctgcttcccaacaccrtcatccctttgcgtgtttacctcctattcatccctctgggaagcagcttttagagcatatctgctggttttctggtttgctcctgtacacccagtgccta

SEQ ID NO: 54605 - DNA, 201 bp, Homo sapiens
cgggaggcagaggttgcagtgagcagagattgcaccactgtgctccagcttgggtgacagtgcaagactctgtctcaaaaaaaaaaaaaaaaaaaaaaaaaagaatttaaacacaacagaacaggttcatgattattattctttcatctcagattttcagaacaacgtgcaggtcaaagtcattcgaagccctgcggattt

SEQ ID NO: 54606 - DNA, 201 bp, Homo sapiens
tactgggagaatttgagaaggaactggaagggatcctgcttccgtcagaccgagaccggctccgttcggaggtgaaggctggcatggagcgggaactggaraacatcatccaggaggcaagcccagctcttcctcctgttgcttccacagccgcctggtcccgtggagcaggacaggctgacgggctaaaagaaacagagg

SEQ ID NO: 54607 - DNA, 201 bp, Homo sapiens
ccgggaggcagaggttgcagtgagcagagattgcaccactgtgctccagcttgggtgacagtgcaagactctgtctcaaaaaaaaaaaaaaaaaaaaaaaaaagaatttaaacacaacagaacaggttcatgattattattctttcatctcagattttcagaacaacgtgcaggtcaaagtcattcgaagccctgcggatt

SEQ ID NO: 54608 - DNA, 201 bp, Homo sapiens
gttttggagccctgtattcttacggactgcctctccccctgggcaaaatccccgaggccctgctctggagttggggtcaggaataatggcttgcttcactyggaaggacattcctgctttatgagcagggagctaggcagggatgacaacctctgctctctcggtttgcatctccttttgtgaaacctccactctctgagc

SEQ ID NO: 54609 - DNA, 201 bp, Homo sapiens
gatatggtggcacacacctgtagtcctaccttgggaggttgaagtgggaagattgcttggacctaggaggttgaggcttcagtgagctgtgatcatgccaytgcactccagcctgggtgacacagtgagaccctgtctgaaaaaaaaaaaaagatttagtagattttcttgagtaaacatttcttcatttgttatatgtcc

SEQ ID NO: 54610 - DNA, 201 bp, Homo sapiens
gtgcgccaccacacccagctaatttttgtattgttagtagagatggagtttcaccatgttgaccaggatggccttgatctcttgacctcgtgatctgccckccttggcctcccaaagtgctgggattataggcatgagccaccatgcctggcccttttttgtttttatagctgcataaaattccattgtgtgttccatcat

SEQ ID NO: 54611 - DNA, 201 bp, Homo sapiens
aattttttatttatatgttttaaggctatgtttaattttgaaattaaataatttataggttttctaatgttgcaccaactttgcattcctgaaatgaaccraatgtggtcatatatattatccctgacgatccctttttttttttgttattactttttttttgagacagagtctcactatgtcacccaggctggagtgcag

SEQ ID NO: 54612 - DNA, 201 bp, Homo sapiens
ccattctgtacctagactgctggatattttcaccatgtataggtgtggaagtttaacacatgcttattctgtgtctattgagatagtcatatggttttttwaatattaaaaatgttaatttattttctagtttttttttattctttcacttctgggataatccatggtcatgaagttttttttttgtacattgctatattc

SEQ ID NO: 54613 - DNA, 201 bp, Homo sapiens
ctccagggaaatacctagaaagtagaatcactgggttacaggagtgtatgttattggtgaattcaattttttgtttgttttgttttgttttgttttgttttgagatagagtttcactcttgttgcccaggctggagtgcaatggcgtgatcttggctcactgcaacctccgcctcccaggatcaagcgattgtcctgcctc

SEQ ID NO: 54614 - DNA, 201 bp, Homo sapiens
tctccagggaaatacctagaaagtagaatcactgggttacaggagtgtatgttattggtgaattcaattttttgtttgttttgttttgttttgttttgttttgagatagagtttcactcttgttgcccaggctggagtgcaatggcgtgatcttggctcactgcaacctccgcctcccaggatcaagcgattgtcctgcct

SEQ ID NO: 54615 - DNA, 201 bp, Homo sapiens
ttccctgcccaccctgtcccctacaatttgtgcttctgagttgaggagccttcacctctgttgctgaggaaatggtagaatgctgcctatcacctccagcmcaatcccagtgaaaaaggtgtgaagcacccaccatgttcttgaacaatcaggtttctaaataaacaactggaccatcaatccatcaaccttttttgtggg

SEQ ID NO: 54616 - DNA, 201 bp, Homo sapiens
cttctccctttccctgcccaccctgtcccctacaatttgtgcttctgagttgaggagccttcacctctgttgctgaggaaatggtagaatgctgcctatcmcctccagcacaatcccagtgaaaaaggtgtgaagcacccaccatgttcttgaacaatcaggtttctaaataaacaactggaccatcaatccatcaacctt

SEQ ID NO: 54617 - DNA, 201 bp, Homo sapiens
ccttagtgatgtttggagtcgttttaccctcttctattgaattgccttgggatttccttctccctttccctgcccaccctgtcccctacaatttgtgcttytgagttgaggagccttcacctctgttgctgaggaaatggtagaatgctgcctatcacctccagcacaatcccagtgaaaaaggtgtgaagcacccaccat

SEQ ID NO: 54618 - DNA, 201 bp, Homo sapiens
gcccagctcttcctcctgttgcttccacagccgcctggtcccgtggagcaggacaggctgacgggctaaaagaaacagagggcacagcacagggcaaggayggggcacttggaagtggtagctgtttccctaattaatcggggctgttggggaagggggaccagagagagggacaagacttaaatatcagactctctggcc

SEQ ID NO: 54619 - DNA, 201 bp, Homo sapiens
tgctgcctacctggagattcagtaggatcttttgagtggaggtgggtagagagagcaaggagggcaggacacttagcaggcactgagcaagcaggcccccmcctgcccttagtgatgtttggagtcgttttaccctcttctattgaattgccttgggatttccttctccctttccctgcccaccctgtcccctacaatttg

SEQ ID NO: 54620 - DNA, 201 bp, Homo sapiens
ctgtggcttttcctgttattgtcccctaatgataggatattccctgctgcctacctggagattcagtaggatcttttgagtggaggtgggtagagagagcwaggagggcaggacacttagcaggcactgagcaagcaggcccccacctgcccttagtgatgtttggagtcgttttaccctcttctattgaattgccttggg

SEQ ID NO: 54621 - DNA, 201 bp, Homo sapiens
caagagaggccccagctgtcagggcatgaataggagagcccagctgcacatgagccaatagcttggatagactttaaattatttcttcttcttgtatcccmttgtgtccatttcatagtgtcctatgggtgtggacatcagatattctaaatggaatgttccagtttcaaaccttccattcccactctctctataaacatt

SEQ ID NO: 54622 - DNA, 201 bp, Homo sapiens
  misc_feature (1)...(201): n = A,T,C or G, or insertion/deletion polymorphism (see Tables 1-2)
aattgctttattgtttttgacatgtggggcataagttgttccatagtttagtccagttaattgtgggcccctttgtcgggctagtttttgagggcaatatntaggtttgttctgagtccaggacggctctcagttgccctttccctggttctctctgttaaactagctgtcccaaggtttagcctgttgctatcatggagc

SEQ ID NO: 54623 - DNA, 201 bp, Homo sapiens
tctacttgggacagtttaagttttcttttcaggagttcatttcatctaacttttaagatttattggcataaagttcattgtattcttctatctttttaatmtctgtggcatctgtaattaggttcctcttttcattcctcatgggttatttttgcatcactaatttgttactggtcagtcacatcagaggttagtcagttt

SEQ ID NO: 54624 - DNA, 201 bp, Homo sapiens
aatcttttaaaagggaggaatggaaagaccacaagtggaaaacagactttagagatatctctccaagtcacagaaggaaagcagccctccctccttactgwaagtctggagaattgagagtggaagtgaagggaagagaattgagtgtgtaagtagatgagaggttatgtgtcttggagccaggagactctggttccaaga

SEQ ID NO: 54625 - DNA, 201 bp, Homo sapiens
cagagaaaagtattaacacatcttgtccctcattagcctctttccatccttaaagaaaggtaaccattgttaatttctttatatactctgagattttttttaaatgcacatataagcatatatctttgcactctttccaaatcaatatatatataaaaccttacttgggccaggtgtggtggctcatgcctgtaatcctag

SEQ ID NO: 54626 - DNA, 201 bp, Homo sapiens
acccttccctacagcctgaggagtacatggcctacgttcagaggcaagccggtgagtaattagagaaggaggagaagacggggagatacgggggcaggggktggcaaaagatcaagtattgaatagctggaggaatgtgttcctggcctgcttgcatgctgtttctcagtagactcaaagcagtatggagataaaatcata

SEQ ID NO: 54627 - DNA, 201 bp, Homo sapiens
ttgaaaccccaactgtctttctccccactccctacccacccaggggaagccaaatataggccaagagcagcctgtggatgatgctgcagaagtccctcagwgggaaccagagaaggaaaggggtgatccagaacggcagagagagatggaagaagaggaggatgaggatgaggatgaggatgaagatgaggatgaacggca

SEQ ID NO: 54628 - DNA, 201 bp, Homo sapiens
aatcgcttgaacctgggagacggaggttgcagcaaaccaagattgcaccactgctctccaacctgggtgacagagcaagactccatctccaaaaaaaaaaagatattagtctattgttttcttgtagtattttgtagtagtattgtctagctttgatattatggtaatgccagcctcacagaataagttaggaacgcattc

SEQ ID NO: 54629 - DNA, 201 bp, Homo sapiens
tgcttctgggactcctgttacccgcaagtctgaccggcggtgtcgggagcctgaacctggaggagctgagtgagatgcgttatgggatcgagatcctgccrttgcctgtcatgggagggcaggtgagaggcgtataaggggcgagggtctgggcagaagaggaagcgggtaagagatagaggaagaagggcagctccggag

SEQ ID NO: 54630 - DNA, 201 bp, Homo sapiens
gctgctcaatctgagagttcataatgcccagtgtcaatttccttccaaagaatgccaagttctccatcaagaaagaagctccctttgtcctggaggcatcsgaaatcggttcagatctgtttgcaggagtggaagccaaagggttaagcattaggtaagtacatttcctccaagtttatatgtttaaatgcaaagaaaaaa

SEQ ID NO: 54631 - DNA, 201 bp, Homo sapiens
ttagaggccctggcagctattgtgcaagggtgataagacatgaactgctattgtagccaagtgaatggaacaaggtaataaaaagtagggagatgcttctrcaggaatgagaaaatgtaggaactaatcagataggaggtggaggaaaggacagcgcaagaaatctggggagtaatggaaaaagatggctttgtgttctta

SEQ ID NO: 54632 - DNA, 201 bp, Homo sapiens
gttaaatgaaaaagtatgtttgctgaaactagggtttctcaatgttggcaccttgacatttggggtgggaccattctccactgtgggggctgtgctgtgcrctgtaggacgttcagcagcagccctggtctccgcccactcactagataccagcagcacttcccccagcctggacaatcacagtgccaaatgtcccctggg

SEQ ID NO: 54633 - DNA, 201 bp, Homo sapiens
acacacagagactgtcccagcaggctaaaggaagatgtgggcagaaatacaaacctttgcatagaacattagagccagaggacctgttggaaaggcatcaygtccaacccattcacttctcaaaggagaaacatcgtactacctctaactccattaactttgaactctttaagcttgcttaacctgctgcctggaagctat

SEQ ID NO: 54634 - DNA, 201 bp, Homo sapiens
ccccgtgctacctgcagataacaaacccccacaatagtgtgggcttctctgtacagtcccaagaatggttgcgtctgtttccaacacctagttaaaggaayggcacttaggtcatcagtctttgttaaatgaaaaagtatgtttgctgaaactagggtttctcaatgttggcaccttgacatttggggtgggaccattctc

SEQ ID NO: 54635 - DNA, 201 bp, Homo sapiens
gatctagcattcctactgccctacctgccagaaggctgtgcatctatccatctcagagcatgagagcaaagagcttccagggccagctcctctttctaaargcctcacaaggattcagtgatttaatgggaagagtcatgagcatgattaacaagacatcatgtctttgagtatatcctggtgaactagaaatcagctgtg

SEQ ID NO: 54636 - DNA, 201 bp, Homo sapiens
ctacctgtggtttcacagatacattccttgttccaaatggactaattttaattccatgttaaacgtggtgcagtcattaaataaatgcagcaaaaactgtragagtgactcttcaatgactgaagtttggggaaaacttttgtcacagctggtgaggaatagcagggaaggtgtttttaaccaactgcttttgcatgctca

SEQ ID NO: 54637 - DNA, 201 bp, Homo sapiens
tgcccaacacatagtagttgatcaatacattgtggtagtggttgttattgttgttgatgattgtactgggaatctgggaatctgatcctacacttcccaamccacgctgaaatctgctcaggcaaaaagtagcaacgagtgagggcagaggcgggtgttgtatgtgctcagtccctgtgtccttgggcgattcagtataac

SEQ ID NO: 54638 - DNA, 201 bp, Homo sapiens
tcatgagcatgattaacaagacatcatgtctttgagtatatcctggtgaactagaaatcagctgtgtggtctcaggtcagtcacttttcaagtggatgttyaagatcccctccagctctaatattctgtgattttagagcccaacaagtcaggcgaaagagtctcagaaatcgtgcttatagtcagaagaaggaaagagca

SEQ ID NO: 54639 - DNA, 201 bp, Homo sapiens
agacagattttgctctcatcattacaggagaatcatgtaaatcaacttttaaaattccaatcctagattctcatcgtttttaagttctacactgaaagccmtagagtaccatgcaccatcactgatttctatttgtcagaggtccacaacctaggtttatctgtcaggttctttgtactgataaatgtgagctacagaatc

SEQ ID NO: 54640 - DNA, 201 bp, Homo sapiens
ctgtgggaaggcgggaagctgtagcggctctatcttagaggacagtcaccaagctatggccaagggccaaggcccaggtgccacctggttttgtggcctgsgaattaagaacagttttcacgtttttatgtggttcaaaaaaagaatcaaaacaacaatatttcgtgacatgtagaaattacgtgaaattcagggccaggc

SEQ ID NO: 54641 - DNA, 201 bp, Homo sapiens
ttttaaactgaattattacctttgagacgttggaatatcatacaaatattgtattctcattatagagaatttggaagaatacataaaaatacaaagaagaaaaccaaaaatgcccataattttatccctttgtatcagcctgtgttaacatttagacggtatccttcagtcattatttctgtgcttatattaaaaatgtga

SEQ ID NO: 54642 - DNA, 201 bp, Homo sapiens
tttttaaactgaattattacctttgagacgttggaatatcatacaaatattgtattctcattatagagaatttggaagaatacataaaaatacaaagaagaaaaccaaaaatgcccataattttatccctttgtatcagcctgtgttaacatttagacggtatccttcagtcattatttctgtgcttatattaaaaatgtg

SEQ ID NO: 54643 - DNA, 201 bp, Homo sapiens
ttttttaaactgaattattacctttgagacgttggaatatcatacaaatattgtattctcattatagagaatttggaagaatacataaaaatacaaagaagaaaaccaaaaatgcccataattttatccctttgtatcagcctgtgttaacatttagacggtatccttcagtcattatttctgtgcttatattaaaaatgt

SEQ ID NO: 54644 - DNA, 201 bp, Homo sapiens
ctcctagctcatcaacttgacctcacagttgtgaagatcaagtgaggtgctgctaatcaaaatgcctgggaaggttagaggtcatataaccacctcgggarccttgtgtgtaaatcgctcagcagctcttgctggagttcaaggagatgacagttcactcttctttccccatctgcctcagctgccccacggatgaaaccg

SEQ ID NO: 54645 - DNA, 201 bp, Homo sapiens
gttaagcattaggtaagtacatttcctccaagtttatatgtttaaatgcaaagaaaaaaaagactagctgacatactttttaatcatcagatgtttgtagrcataagattctctgtttcaaagtgatgccattttgttttatttccaggtttaaagtggtcttgaacagctgttgggccaccccctcggctgacttcatgt

SEQ ID NO: 54646 - DNA, 201 bp, Homo sapiens
ccctcggctgacttcatgtatcccttgcagtggcagctgatcaacaaggggtaggtacactatctagagacagggctgaacagtggaaccaggcatttatygggctactttgctctggcttgggaaagcttgggaggaagaggtgaagcctgctggagttacagcagtgacaccatctgtggttccaggcaaagaacaaat

SEQ ID NO: 54647 - DNA, 201 bp, Homo sapiens
cctgtgttaacatttagacggtatccttcagtcattatttctgtgcttatattaaaaatgtgaccacatttttacaaaagtaactatgtagatatatatartttaaataatataccataaatacaaattttcaatgcaaaacctcacagttcacacacagaaatgtgttgggtgtgacttgagcttaggcagctgtggcag

SEQ ID NO: 54648 - DNA, 201 bp, Homo sapiens
taaccagataaaattatagatatgatcccatgaaggttttacaatagttggcaacacggagacaccaggattgtcaaaaatcattgcccaccatcagctgygtagagctgagcttcaggcataaacaaaacatcaagtcttagaactggaatgagcttattttcttaaaaaaaaataataataataagagacatgtcctca

SEQ ID NO: 54649 - DNA, 201 bp, Homo sapiens
atcgtactacctctaactccattaactttgaactctttaagcttgcttaacctgctgcctggaagctatcagccctgctgaactcagaaggcgagagctgyaagggatcctagaataacctagtctgttgtacagatgaggaccagaagcccagagggaggaaggattagcctgagagcccacaggtagttcagagcggtg

SEQ ID NO: 54650 - DNA, 201 bp, Homo sapiens
caatcttccgcaaagatataagaccaaccttcccattttacagatgagaaaactgaggcaaggtcaacagacaataagacagccaatgtctgactcttagwcaagattagttttcactacaaccccctccagagatttatatttaagatctagctcttaaaatatttggcccaatgtattgaggttcctgactgggacagg

SEQ ID NO: 54651 - DNA, 201 bp, Homo sapiens
aaaattaatgtcaaggataaacataattggataacaaaagtggagctattttggacctctatttttatttagcaaacacttatacagctcttacaatataycaaacattgttctagataggtgttttacaaatattaatttatctaaatgtcattaaaccctctctaaagtagacagtataataatcattattttatagag

SEQ ID NO: 54652 - DNA, 201 bp, Homo sapiens
tatagcttctcaggtaaggaaaagagacacttctgggatttcgtggggctatgctgttaaaaggcagagagtgttttaagagaagcttaactttggccccrgcaaaacttttaaggattgaaaattatactttaaagcacacctgagtggcgcagagggggcgagatcaagaggtctccctctgaccagcccctgaactct

SEQ ID NO: 54653 - DNA, 201 bp, Homo sapiens
aacccatcaggccaaggaaaaattaatgtcaaggataaacataattggataacaaaagtggagctattttggacctctatttttatttagcaaacacttayacagctcttacaatataccaaacattgttctagataggtgttttacaaatattaatttatctaaatgtcattaaaccctctctaaagtagacagtataat

SEQ ID NO: 54654 - DNA, 201 bp, Homo sapiens
gtggttaagaaaatgggccttctcaacagaccactagtttgaagccttgttccatcatttactagttgtgtgactttgggcaagttagttaaccaacctcyctgggcttctatctctgcatttgttagcagggataataatagcacttaccccataggtttgttatagaattaaatgaaataatctttaggaagcacttag

SEQ ID NO: 54655 - DNA, 201 bp, Homo sapiens
aactgtctgaaaggcaatggagcacctgatggtttaatcaggggaggattgtggtcaggttttgtgttttatttatttatttatatttatttttttgagamcgtgtcgcccaggttggagtgcaatgacgtgatctcagcttcaagcaattctcctgactcagcctcctgagtagctgggattacaggcacgtgccaccac

SEQ ID NO: 54656 - DNA, 201 bp, Homo sapiens
ctgctttggagagaaagcgttgtgagatgaaactttgtaaacccccagtataaactgtctgaaaggcaatggagcacctgatggtttaatcaggggaggaytgtggtcaggttttgtgttttatttatttatttatatttatttttttgagaccgtgtcgcccaggttggagtgcaatgacgtgatctcagcttcaagcaa

SEQ ID NO: 54657 - DNA, 201 bp, Homo sapiens
gttttatagcttttctagataatgtcctatggtctatagttacatattatatcatttacttacttactgtttgtctcccctgctagaatatgccagatcaytgaaggcagatatctttgctttgttcgctaacaaaatcctgacagagtccatcgtcagtgcccaacacatagtagttgatcaatacattgtggtagtggt

SEQ ID NO: 54658 - DNA, 201 bp, Homo sapiens
ggttgttattgttgttgatgattgtactgggaatctgggaatctgatcctacacttcccaacccacgctgaaatctgctcaggcaaaaagtagcaacgagygagggcagaggcgggtgttgtatgtgctcagtccctgtgtccttgggcgattcagtataacacagtgccttaatatccctgaatttcacttgttttccat

SEQ ID NO: 54659 - DNA, 201 bp, Homo sapiens
tctgcaaaatcgtgtgctccaaataaagcaggtatgtcctcgccaagtccattttcctgggacgaaaagtttcctgaagtttccttttacaatgctcagcrcttctgtgcttaacttgttataaaaatgtaatgatgtagccaagcaggaaagtacttaagcaccccctccaataccaatcagacttttcccaaatggagc

SEQ ID NO: 54660 - DNA, 201 bp, Homo sapiens
gtgacgaaggcctttgtcttgttggccatctttgcagaagcctctgcaaaatcgtgtgctccaaataaagcaggtatgtcctcgccaagtccattttcctrggacgaaaagtttcctgaagtttccttttacaatgctcagcacttctgtgcttaacttgttataaaaatgtaatgatgtagccaagcaggaaagtactta

SEQ ID NO: 54661 - DNA, 201 bp, Homo sapiens
ttcaaggagatgacagttcactcttctttccccatctgcctcagctgccccacggatgaaaccgtcctcgtgcatgagaatgggagagatcacagggcaaycttccaattcaatgctttccggttccagaacatccccaaactctccaaggtgtggttacactgtgagacgttcatctgcgacagtgagaaactctcctgc

SEQ ID NO: 54662 - DNA, 201 bp, Homo sapiens
ctgcaacctgcccttcctcacactcctgatcttccttatcccactctgcatgttttatagcttttctagataatgtcctatggtctatagttacatattayatcatttacttacttactgtttgtctcccctgctagaatatgccagatcattgaaggcagatatctttgctttgttcgctaacaaaatcctgacagagtc

SEQ ID NO: 54663 - DNA, 201 bp, Homo sapiens
caaatattgtattctcattatagagaatttggaagaatacataaaaatacaaagaagaaaaccaaaaatgcccataattttatccctttgtatcagcctgygttaacatttagacggtatccttcagtcattatttctgtgcttatattaaaaatgtgaccacatttttacaaaagtaactatgtagatatatataattta

SEQ ID NO: 54664 - DNA, 201 bp, Homo sapiens
aatatctttattgcaaattccattcagccaattaattctcatagagtgctttccttaatttctgctgaattcatctgtagccaagctatgattgcaattgktgagtaaacatagtttcgacatgattattggttgatatttttatttatgttaaggagtaagacaaatgggaaacaacaaagactagatgtaagtcaggac

SEQ ID NO: 54665 - DNA, 201 bp, Homo sapiens
ttttccttgattctcagaaggtcacagaaagtggcagacatagagacaagccaacacacaaagagagaaaggcagcggggccgcatgtgacactctgaggmgctgtcagaggcaggcctgcaggggaaaaggagaaaccgggaaacaaccagaaagacagtcagcaaacttatgtgggtttatggtagtcatggacttcct

SEQ ID NO: 54666 - DNA, 201 bp, Homo sapiens
acagaaggggaatccacatggagggaacagtgtatgggaaggcatgaggaccagagagaggacagcacagtcaagagcaggagcaagctcagcacagctgrggtgttgtgtggggtgtggagacataggaggggaaacctgagacgtcagtaagagccagaccatcagtctttcctggccagctgagaagcttggaaatag

SEQ ID NO: 54667 - DNA, 201 bp, Homo sapiens
ccgggctcgtgcatgttgttgcaaatgataggattgcattcttttttatggctcaatagtattccactgtgtatgcaccacaatttctttatccattcatwtgttgttgaacacatgggttgattctgtaccttggctattgtgaatagtgctgcagtaaacatgggagtgcaaatacctctttgatatactgatttcatt

SEQ ID NO: 54668 - DNA, 201 bp, Homo sapiens
cacaatttctttatccattcatttgttgttgaacacatgggttgattctgtaccttggctattgtgaatagtgctgcagtaaacatgggagtgcaaatacrtctttgatatactgatttcattttctttggataaatacccatactgggggttgctggattatatggtagttctagtttcaatttttttgaggaacttcta

SEQ ID NO: 54669 - DNA, 201 bp, Homo sapiens
cctggagctcaatcccctgcggtccattcaagatgcccatttgcatgcacagggtaaagactccccagggctcccccactccctctgcctccccatccccygaagccgacccaagcctgggcaaatcagggaatcagggaaatgtggttctagactgccagaacatgacggagaggagagggagggtatgggctccctgga

SEQ ID NO: 54670 - DNA, 201 bp, Homo sapiens
caatgattgttttaccaatgggaaagcaggggtccagaggggaagggcaacttcccaaattcccccagcaccatctgtggcagagcttgggcctcagtgcwccctcccagggtccgttccaggctccggctgccatctgctatagctcaaccaggaaaaacggcagccgactcctagaggggctggtgtcacgccaccaac

SEQ ID NO: 54671 - DNA, 201 bp, Homo sapiens
atggtgggtcaagtcctcctcacatcgaatcacttcagtctgcctctgactcttctgtttccctcttccacacttaaagacccacctttaaattggcccakccggataatccaggctaatctccttatcttaaatctccttatctcagctgtttagcaaccacaacctccctcccaccaccttgccatgtaacatcgtacg

SEQ ID NO: 54672 - DNA, 201 bp, Homo sapiens
cttagtctggctcagtgaatctgcacttttacataaacaatagggtagaggaagcaatcagatatgcatttgtctggggtgaacaaagggataactttgayttctgtctgtcctttgtactgcacgtgtgaagataagccatcaatttacatagccaaggtgaaattcaacagaactgttttagggtaaagaccctgaggc

SEQ ID NO: 54673 - DNA, 201 bp, Homo sapiens
gagaatcctgaacccttgagtcattctgagcttcctttgccaatggaagcagcttgcctgtcatgtctgagaagactctctttcccttgcttaaggacccrgtgttaagatcacccaaggcagttgccttgcaagagataccttttctcctcaaaacctagggcttgtggccactagactttcaactgacatcagaactct

SEQ ID NO: 54674 - DNA, 201 bp, Homo sapiens
gcgtgaacccaggaggcagagcttgcagtgagccgagatcgcaccactgcactccagcctgggtgacagagtgagactctgtctcaaaaaaaaaaaaaaawgattggtctgtaaatgggcggggcacacatcacatccgagcagaaactttaaatgcaatggtgtgtgcagcctggccacagaacggacatgttccacact

SEQ ID NO: 54675 - DNA, 201 bp, Homo sapiens
ccactgcacctggcccttcctggggcttctatccaaatgtaaggtttgtgctgggaccacgtgtaggaaattgccaccttgtgggtaatgctggaattackgatctagaaatgatgatgttccttatttctgaattcagtatgtatttgctaataattacaagccacagtgctggaataaggagtctatcaggtggagaga

SEQ ID NO: 54676 - DNA, 201 bp, Homo sapiens
ttctcatcaatgttgtaaaaaaatcgcgttgaatgtgacaactttattcaaggacctgctgtagcttcttcccccacttattctcaaatttcttccatacrggggaggggtacaggtctcagttcatcttgccacatcacatccctaatctgtagattcactgatgcattgactcatttgttcttcatccagcaagctctc

SEQ ID NO: 54677 - DNA, 201 bp, Homo sapiens
aagccccactcttcacccgcttattacaatagaactttgcttcttgctcatgcactagtctgtgagaggacagcctgtgtagaggacagttttgtctgcamggtgattcatggacccagatgccttccatcctgtgattctatatccttcagagccttagagtccaaccaacagatggggaaggagaaggtgggaaagaca

SEQ ID NO: 54678 - DNA, 201 bp, Homo sapiens
agaactgttttagggtaaagaccctgaggcccacagagaatttccttgtgggtaaattatgagaaaggtatgtagctttttttttaaattgaagctttgtygctatcttatttagaaataaaatgggaagtagatttgcctgacttagttcccagcttgacttttccctttagcttagtgagggtctgagacagattttcc

SEQ ID NO: 54679 - DNA, 201 bp, Homo sapiens
ttgtgatacactgttgaatttccttctgtgacatcacccaggctgtgaaccctgctacatacagggccccagtacagtaactcttcctaacctgggtctgytgcagtcagtaatctctttcctcactctctgccaactgcagcaccattgcattaactcctggaaaaaagtcggtagtggagtgctatagggctctgttct

SEQ ID NO: 54680 - DNA, 201 bp, Homo sapiens
tgtgtgtgtgtgtgtgagaaagagggagaaacagacgtgagtggtaaaaatgtttttcttttaagtgtgtttatatatatatgcctttataggtgggccawaggatgaagaaaagatatcatctgtaccactcctctgcctcgaaacttctaccccaaacctctccccttggaagggaacattgcaacccttcctgtgcca

SEQ ID NO: 54681 - DNA, 201 bp, Homo sapiens
aaaccacattgtttgtacagttcaggcacagtgagccactctcatcaattctgagaagagtggaacccccctgaaatctaagtccccagataccagcccayggccaaccttgccagcaggcctttctgaggatatggtcgcaggcctgccgtgttagctgttttctatacaacaatgaaacaccccaaacatcacccccag

SEQ ID NO: 54682 - DNA, 201 bp, Homo sapiens; identical to SEQ ID NO: 54680

SEQ ID NO: 54683 - DNA, 201 bp, Homo sapiens
ctccagctggccccttgggctgggagaagggaaaggctaagaggaggatttttaggaagatccctctggtcacaggatggaaaatggttaggaggtaggaycccaagcaggaggctactgagatagtccagacaaaggggacagtggcctagacgaaggtggtggctgtcaggttggagagatgtgtctggatttggcagg

SEQ ID NO: 54684 - DNA, 201 bp, Homo sapiens
tgtgtgtgtgtgtgtgagaaagagggagaaacagacgtgagtggtaaaaatgtttttcttttaagtgtgtttatatatatatgcctttataggtgggccaraggatgaagaaaagatatcatctgtaccactcctctgcctcgaaacttctaccccaaacctctccccttggaagggaacattgcaacccttcctgtgcca

SEQ ID NO: 54685 - DNA, 201 bp, Homo sapiens
ggcagccagaggtgggcaaagactggaactggaaggtctgagagcatttttcctttcctccctgtctccagctggccccttgggctgggagaagggaaagyctaagaggaggatttttaggaagatccctctggtcacaggatggaaaatggttaggaggtaggagcccaagcaggaggctactgagatagtccagacaaa

SEQ ID NO: 54686 - DNA, 201 bp, Homo sapiens
tgaagagaggaattgtaagattatgaggaaacttgccacaatcatccaagaatttaaaatatccatttgaagtctgggaagtggagccaggaagcacgttmtggatgggcactcctggaagagagcatctctgtgtgcctagaaggagaagagctttgcaattcttttttatgaaccatgtgacgaagatgtaccaagaac

SEQ ID NO: 54687 - DNA, 201 bp, Homo sapiens
cttgccacaatcatccaagaatttaaaatatccatttgaagtctgggaagtggagccaggaagcacgttttggatgggcactcctggaagagagcatctcrgtgtgcctagaaggagaagagctttgcaattcttttttatgaaccatgtgacgaagatgtaccaagaactgcttctatcagtgaaggagacagcctggtt

SEQ ID NO: 54688 - DNA, 201 bp, Homo sapiens
tgaagtctgggaagtggagccaggaagcacgttttggatgggcactcctggaagagagcatctctgtgtgcctagaaggagaagagctttgcaattctttmttatgaaccatgtgacgaagatgtaccaagaactgcttctatcagtgaaggagacagcctggtttcagaggaaatgcatttacagtgattctttgctttt

SEQ ID NO: 54689 - DNA, 201 bp, Homo sapiens
ctactccacactctgccttcctccccatgcctggcatctgctctgctcacactgggctggaataatcaaggccaggcgtttctacctgctctcacctgcartggacagcaactcagccaccctggcatccagcaccacagcgtgttgggcaacgtgcagtgtagaggcctggccagggaatgctcccacccagctgtcatc

SEQ ID NO: 54690 - DNA, 201 bp, Homo sapiens
gaagtacttttaagaccaaaaggtggacgtttcaaagcagcagactccagcttaataagatcttttcaaccattggaaaatccacagatggctctcagtgstagtgagctctgtatccctggaggtatgtaagccagagctggcaatactgtgtgtcacagaaggaactcaagacctaggcagcagtgatgctcttaaaat

SEQ ID NO: 54691 - DNA, 201 bp, Homo sapiens
tatacatatgtaacaaacctgcatgttgtgcacatgtaccctaaaacttaaagtataataataataataaaatttaaaaaaaaaagaaaacaccaacaggyataataagagtcacttgggaaaggagattcccagaatcccacccacgggaagaaggagggagcctgagtgcagtggatggaaaagacctgaggctggaaa

SEQ ID NO: 54692 - DNA, 201 bp, Homo sapiens
tccacacagagccctggaagggggacactggatccattttcaggatgagaagagtaagacccagagaggggcacagcttgcccacagtcacacagctggcycgtggtggagctgggactcactctcatggtcttcctggctccaaagcccacgcttttccactgagcctggctcacttagcaagatggcagggtcggcctg

SEQ ID NO: 54693 - DNA, 201 bp, Homo sapiens
tgctcttaaaattccacaatttttcatggtatccttttgatgtattcacaacccagaatcatttctgcctcaaaatatacgtgtatttgaaaattatagaratatatatttaaaactggaaacatatctatataaaacaagtcacatatcatcaggaagacaattttaagacccaatctcctaactctttgttgaattcct

SEQ ID NO: 54694 - DNA, 201 bp, Homo sapiens
agtgcccaaatggagcttcagggctgccctgtggggagggagagtgacagagagtgcagaggcattcacacttcccgtgggtgggtgctagtctgtgattrcactacttcgagtggatgaggggccaggagacagctcagccatatgcaggccaagtacacacagtgcagagtgtatgtctccctggcacctgcccttcct

SEQ ID NO: 54695 - DNA, 201 bp, Homo sapiens
acacaggttttccaactcttcatgaagcacaaagatccgttatttgacttttccatcatcccatgatcaatgtttctaagaccctaggaagaaaaggagayaaagaattagagaacgtaagcctgctccgttacaatcaactatgtgttacatggaaggtgggggaaatgatccttcacttcgaatctctccccagcagga

SEQ ID NO: 54696 - DNA, 201 bp, Homo sapiens
tcttcatctgctaaaggcagggacattaacacctgtcctgccccatctcccagagttgggatcaagctttatgaacttaaaggactgtgcatagtaagggktctcaattcttattttaaaattgtaatcacctaaggatctatttttttaagataagatagcaaatattctcctttcttttttcattaaaaaagaaaaaaa

SEQ ID NO: 54697 - DNA, 201 bp, Homo sapiens
gcaaacatgccattctgtgatctccctggaagagagtaattacaaaaagacttctcatggaacaattcatttcaaaagtataaaaaagccacatgcaaatkcgtttctcactgtttgccctgctaaaaactacatctgcatacaaatctagtttgcatctaatttttaaaaacacacaaaaggggtcatctacacacacag

SEQ ID NO: 54698 - DNA, 201 bp, Homo sapiens
caaggcgctcctgagtctggtaaagcatcccacctaaaactaaatctccttcaaagggaaaaagttaggaatagaagagctacagccagctgtccacacgrtggggtaaagcaatggaatttgtttctgagggaataccattttagaaagaacactaagaccacacttcctgttattttcccaaaaggccatcttactcta

SEQ ID NO: 54699 - DNA, 201 bp, Homo sapiens
taggggttgggtaagggacggctggaattcacagttgaataaaacgtgtttctagcttttgaaaacctcacaactggaaagcgagagatgagatgtgaaaygcgtccctatagcatgaagaagatgtgatgagtgctagagaggaccctcagccaagttcagtggggctgggagaggagaagtgggagagaggagggaatg

SEQ ID NO: 54700 - DNA, 201 bp, Homo sapiens
tcttactctaggatggcagggctaaaagggacattgataacatccagttaaaatgccatactcacagatgaagggaccagggcccagagaggggaagggarctgttcaggtcacacagcaagttacagtcaggcagaggacagctgggaccctcatccctccttctacaacacacactaagtcacagagcaccactaatag

SEQ ID NO: 54701 - DNA, 201 bp, Homo sapiens
tgagatgtgaaaagcgtccctatagcatgaagaagatgtgatgagtgctagagaggaccctcagccaagttcagtggggctgggagaggagaagtgggagygaggagggaatgactttgggtcagggaggagcgaggaggagggcccagagaggcgataaggtctgagctaaagtttccacctgacctcatttgctgttta

SEQ ID NO: 54702 - DNA, 201 bp, Homo sapiens
tacaacacacactaagtcacagagcaccactaataggtcatagacaaatgaggtaaagagtcacagctgacacgagccctttcgaaattgcaaacatgccyttctgtgatctccctggaagagagtaattacaaaaagacttctcatggaacaattcatttcaaaagtataaaaaagccacatgcaaatccgtttctcact

SEQ ID NO: 54703 - DNA, 201 bp, Homo sapiens
cccctacagaccagaagtaaggccttgcacacagaaggtgtgcaacagtagtggctgaaagaataatataactaaaaccatggcaaaatccccctgctttmgagaaaccctatcagacttgtttctaatttttcctgttctattaagcacctgttgatcagccttggtaatggtgcctgttcaccactgctcccccattcc

SEQ ID NO: 54704 - DNA, 201 bp, Homo sapiens
aatttaatttttaaaaacaatggtggtgcttcacaactggcttgcagaattccttagagcatgacaattggttcttccaatttggcacaagccagcctcascacctctacatctacctcagacctccaaggcaggattctggggaatgaactaggggattcatgggattcacaaaggcagggcagggctggtgcagaatca

SEQ ID NO: 54705 - DNA, 201 bp, Homo sapiens
gtctctacaaaaaaaaaaaaaaaaaaaaaaaaaatagctgggtgtggtggggcatgcctgtggtcccagctactcaggaggctgaggtggaaggatcactrgagcccagaaagtggaggttgcagtgagccatgatcacgccactgcactccagcctgggtgatagagcgagaccctgtctcaaaataaaattttaaaaaa

SEQ ID NO: 54706 - DNA, 201 bp, Homo sapiens
ccaggtgtggtggcgggtgcctgtagtcccagctactcgggaggctgaggcaggagagtggcgtgaacccaggaggcagagcttgcagtgagccgagatcycaccactgcactccagcctgggtgacagagtgagactctgtctcaaaaaaaaaaaaaaaagattggtctgtaaatgggcggggcacacatcacatccgag

SEQ ID NO: 54707 - DNA, 201 bp, Homo sapiens
accgtttcttctgtgcccacaaggtggtcagcgccctgctcaatgagcacaatgagggacctcaaaagtcctgggcagctgatgcttctgatctctgctcrctgggcctcagttccctggcagagagtcccatggaattaatcaccattccctgagcctgtttggcaggcactggactggtctctgaggtgagaggtgagt

SEQ ID NO: 54708 - DNA, 201 bp, Homo sapiens
cagttttggaggtcagaggcccaaagggggctaagatcaaggtgccggcagggctgcattctttctgaaggctctcaggagactcattttcttgccttctrcagttcctagtggatgctggcactccttggctgtggccctttccaacatcatcaaagccagaaatggtgggtcaagtcctcctcacatcgaatcacttca

SEQ ID NO: 54709 - DNA, 201 bp, Homo sapiens
gtggctcaggagggcacctggcccatgctaggcaaaggtgctgggctttgggtcagtcttcctgcagtagggaagggtaagattggtcatggggccaggcytgggcagccgctctggctcctggttaaccaggtggggactgcaattcactgcacggtcaggggcccaaaggtagtggagtccttggcactttcagcccta

SEQ ID NO: 54710 - DNA, 201 bp, Homo sapiens; identical to SEQ ID NO: 54684

SEQ ID NO: 54711 - DNA, 201 bp, Homo sapiens
gtaaaatactgaaaatgacttagaacatgtacatttctccatcacatgcggtcatcgggagctgggaagtggaagctcctgtatttactcagatctagaakcgtcactgtgctgtgggactcagcctctcccaccatgttggctgcatggcactggtacacaccctcatcctcctttcgcagggggttgatctagaaatac

SEQ ID NO: 54712 - DNA, 201 bp, Homo sapiens
gtaaaatactgaaaatgacttagaacatgtacatttctccatcacatgcggtcatcgggagctgggaagtggaagctcctgtatttactcagatctagaaycgtcactgtgctgtgggactcagcctctcccaccatgttggctgcatggcactggtacacaccctcatcctcctttcgcagggggttgatctagaaatac

SEQ ID NO: 54713 - DNA, 201 bp, Homo sapiens
ctgactgggcctcttcacatgagggcttcaaaggaggtcggtggctcaggagggcacctggcccatgctaggcaaaggtgctgggctttgggtcagtcttrctgcagtagggaagggtaagattggtcatggggccaggcgtgggcagccgctctggctcctggttaaccaggtggggactgcaattcactgcacggtcag

SEQ ID NO: 54714 - DNA, 201 bp, Homo sapiens
aggatggaaaatggttaggaggtaggagcccaagcaggaggctactgagatagtccagacaaaggggacagtggcctagacgaaggtggtggctgtcaggmtggagagatgtgtctggatttggcagggattggagaggaaggagtggaggatgactttgggtccctgacttggatgaatgggttgggggtggtgccactc

SEQ ID NO: 54715 - DNA, 201 bp, Homo sapiens
cattcaccaacttctccccattcttccttctcccattccctccctggtttttggtaactactgttctacttctgtatcacctttttaaaagattctgcatktgagtaagatcatttggtatttgtctttctgtgtctggcttatttcacttaacataatgtcctccgggctcgtgcatgttgttgcaaatgataggattgc

SEQ ID NO: 54716 - DNA, 201 bp, Homo sapiens
atgtaaggtttgtgctgggaccacgtgtaggaaattgccaccttgtgggtaatgctggaattacagatctagaaatgatgatgttccttatttctgaattkagtatgtatttgctaataattacaagccacagtgctggaataaggagtctatcaggtggagagaacagaaatgcatacagaagtcagtgaatgttcagag

SEQ ID NO: 54717 - DNA, 201 bp, Homo sapiens
ctacttctgtatcacctttttaaaagattctgcatctgagtaagatcatttggtatttgtctttctgtgtctggcttatttcacttaacataatgtcctcrgggctcgtgcatgttgttgcaaatgataggattgcattcttttttatggctcaatagtattccactgtgtatgcaccacaatttctttatccattcattt

SEQ ID NO: 54718 - DNA, 201 bp, Homo sapiens
gcccttcctggggcttctatccaaatgtaaggtttgtgctgggaccacgtgtaggaaattgccaccttgtgggtaatgctggaattacagatctagaaatsatgatgttccttatttctgaattcagtatgtatttgctaataattacaagccacagtgctggaataaggagtctatcaggtggagagaacagaaatgcat

SEQ ID NO: 54719 - DNA, 201 bp, Homo sapiens
ggtggtggctgtcaggttggagagatgtgtctggatttggcagggattggagaggaaggagtggaggatgactttgggtccctgacttggatgaatgggtrgggggtggtgccactcctgagatgaggatgccaggggaggagcaggaagttggggtgttcagatggggcatgttcgactggggtgcccatgggacatcca

SEQ ID NO: 54720 - DNA, 201 bp, Homo sapiens
accaggggccacaggatgagccttttggaaagtccttctggttctcctttcctgtgtctcacaggctggagtgcagtggtgcaatcatagctcactggagrcttgaacttctggactcaagcaatcctcccaccttggcctcccaaagtgttgggattacaggcatgagccactgcacctggcccttcctggggcttctat

SEQ ID NO: 54721 - DNA, 201 bp, Homo sapiens
gtgtgattttcttcctcttcagcctccagcctgaaaacaaacacaacacagggaagactagccaatcccccattcagagcagatgtgtgcccacccggcayctgctgaagtgggtatgaatgtcccatccattaattcctcccttgaacgtagagataaatggcagatattctctgtccttggggagcttccagcacagag

SEQ ID NO: 54722 - DNA, 201 bp, Homo sapiens
agtctgcacacttcctccttttcagaataaggtaaaacttgctctatttctctccttgcattggctgccaaggagcacgcaggtaaatttccttcccaggyaccctcttgaaaggcacgctccctattgtggctctcatctgaatgattcctccgcacacctgccttttactgtgagctacctggtcttttgtattaaagg

SEQ ID NO: 54723 - DNA, 201 bp, Homo sapiens
cagaccatcagtctttcctggccagctgagaagcttggaaatagtgcaacctaggcttggccacagtagagcaggcctgtattgctttctgacagacagasacttcacaagtggaggggaaggggacagcacgtacccaccaggggccacaggatgagccttttggaaagtccttctggttctcctttcctgtgtctcaca

SEQ ID NO: 54724 - DNA, 201 bp, Homo sapiens
ttaaaaggaatgtagatcatatgtaaatgcgcctctgtgagattgtgtatcctaacctgcattaagcacacattaatttcattatgacaccgttcacttartcctcctttaatgtctgcataaaaagcaggcaaatcatttctgtacacatttatttctcaatcatgaccatgttttgtccagtccaggtctcagggtcgg

SEQ ID NO: 54725 - DNA, 201 bp, Homo sapiens
acctacctcgtaagattctagtaaaggttgagttaggtaatataaaatagcagagtacctgggacatagggacacaataaagtgacaccaatcagtgaaayctactatcataggtttaacttactactacagagtgatcatgttaggaccaaaaaaagcagaaggatgtgggagacgccaccccgcccctgccggcaaaga

SEQ ID NO: 54726 - DNA, 201 bp, Homo sapiens
ttatggtgtctatttactgcctccatgactgtctcctactccgccatggctgattcaatcaggggtgttatggactgaactgtatctccctcccgaattcrtgtgttgaagccctaactctcagtaccttagaatgtaactgtatttggagataggacatttaaagaggtaattacatcaaaatgaagctttatccttaaa

SEQ ID NO: 54727 - DNA, 201 bp, Homo sapiens
gcaatagaacaccagaatttattaatcttatttaattatcacttcatacccattcaccaacttctccccattcttccttctcccattccctccctggtttrtggtaactactgttctacttctgtatcacctttttaaaagattctgcatctgagtaagatcatttggtatttgtctttctgtgtctggcttatttcactt

SEQ ID NO: 54728 - DNA, 201 bp, Homo sapiens
gatgcagcatgtaggtgtatgtcactcttcagattgaccctcattgtatttatcctttaaaataaaaatttaattgacacattgtaattctacatatttarggaacacaatttgatgttttggtttatgcatgtgctgtacaatgatcaaatctggatagttagtatacctattgtcttacacatttatcatttatttatg

SEQ ID NO: 54729 - DNA, 201 bp, Homo sapiens
gttttgtgaaaagtcattaaacatgcatgcacagaaatttgttaaacatgcatgtgtgcacacacgcatctcaactgggtcataattgtaactatgagtcytgtgttatatatgtaacacatacaattgtgactggtagttaaaaaattttgtctggtccaatgtcctcattttacaaagtagggaaaaaggatttgtgca

SEQ ID NO: 54730 - DNA, 201 bp, Homo sapiens
tttgatgttttggtttatgcatgtgctgtacaatgatcaaatctggatagttagtatacctattgtcttacacatttatcatttatttatgttgagaacartaaaaacctctgcttcagctattttgtagtatacaataccttactgttagctagagttaccctactgtgcaatagaacaccagaatttattaatcttatt

SEQ ID NO: 54731 - DNA, 201 bp, Homo sapiens
aacactcaccaaaatccaggccgtggcctcatggtcagaagggccccctcgcacttggacagctatattgacatggtccccaggcagctcctccagtgctrgggtgccctcaggggacttcgtgacctacaggggacaggaatgccaggagggggcttagaaaaagcaattctggataaagaccatcccataggcttcctt

SEQ ID NO: 54732 - DNA, 201 bp, Homo sapiens
tctgtgatttcactacttcgagtggatgaggggccaggagacagctcagccatatgcaggccaagtacacacagtgcagagtgtatgtctccctggcaccrgcccttcctgcattctctccttccttccttccttccttcactcactcattcattcagcaagcacttacttggatttattatgtaccttgtctgaagtcca

SEQ ID NO: 54733 - DNA, 201 bp, Homo sapiens
ggggaggaacgacgaccacaggagctaggaggaggagacaaggagacgcagcctttaccctgcagggttccaagcaacccacctctaaattcccctgccgrggagagcccgctgtgatgtcctgacatgaggggagcggcacatcacgcttgggcaggaatcctaaaagagagatttcctcagacctggaaagctgccgac

SEQ ID NO: 54734 - DNA, 201 bp, Homo sapiens
ggtagtcatggacttcctcttattttattttaaaaatttaagctttttattatggaaatatgcaaacccatgcaaaagaaaagggaatagtatcatgaacrgccagcttcaacaactgtcaacacatggccaatcttgtttcattgatactcccccatcccctcctcctctcctaggcagcctattatttcatcacagttt

SEQ ID NO: 54735 - DNA, 201 bp, Homo sapiens
gcaggagccccatctgtgatgacaaagacagtctaatttattcacattgtcccgccagcgcctccccaaccacacaagcgctgggatgccgcctccagggyagcccaaaccagtgctccagtggctcgctgtggtgacagtcagaaagacctggataccaaggggactctcaatcagcctggtttacttttgttcatgtaa

SEQ ID NO: 54736 - DNA, 201 bp, Homo sapiens
ggtcaaaatgaatggagaagtcaaggcaaacacaacgagaacagagatttggacatacagagaagaaagagagaggctctgggagaaaatgaaataaaaargggatgtttatgtgtgggcttgattgcagaacttttccttgattctcagaaggtcacagaaagtggcagacatagagacaagccaacacacaaagagaga

SEQ ID NO: 54737 - DNA, 201 bp, Homo sapiens
agtgaggaggctgtgagcccagtgatgtggctccagatcccaagctcttctgaaccactgtgctaacaccatcctgccttttccctagaggacccttccargtacaccaccctttcatcctcatggcagccctgtgaggtagctgcttccatccccatttcacagatgagaaaaccaagactcagaaaggtaaagtgccca

SEQ ID NO: 54738 - DNA, 201 bp, Homo sapiens
cattgatggctggaatgaaaaaatcttcccaaatccctctgagatttctttaaagttaatggtgctagggaaagaaaggatatcaagtcattccccaggarcccatctgcttgtattaaaaagcacataaccaaagattttaataatcaacacactgaacagccctgataatttatgctaatagtcacgttatgatgtgga

SEQ ID NO: 54739 - DNA, 201 bp, Homo sapiens
ggcctagaagggggctgtgactttgtgactgtgtgctcagtacctggcacatagtcggctcccaatgatagccaatgttcactgagtgcttactgtctgtgaggtaccctgctaagtattttatatctactagctcatttcagccccactgtccataaggtggtcatagcttatcttagataaaactgaggctcagggagg

SEQ ID NO: 54740 - DNA, 201 bp, Homo sapiens
attcaaggctggcgggtgcacagcaccttactgatcaggttgctagcggctagctgtgcagcgcccatctgaaaatagcgaggcaggccaggcatggtggrgcacgcctgtaatcccagcactttgggaggccgaggcgggcagatcatgaggtaggagatcaagaccatcctgactaacacagtgaaaccccgtctctac

SEQ ID NO: 54741 - DNA, 201 bp, Homo sapiens
agtggaggatgactttgggtccctgacttggatgaatgggttgggggtggtgccactcctgagatgaggatgccaggggaggagcaggaagttggggtgtrcagatggggcatgttcgactggggtgcccatgggacatccagagacagataaccaggaggctgacaattggccttgtggtctggaattagagggaaagtc

SEQ ID NO: 54742 - DNA, 201 bp, Homo sapiens
tggcctagaagggggctgtgactttgtgactgtgtgctcagtacctggcacatagtcggctcccaatgatagccaatgttcactgagtgcttactgtctgacaggtaccctgctaagtattttatatctactagctcatttcagccccactgtccataaggtggtcatagcttatcttagataaaactgaggctcagggag

SEQ ID NO: 54743 - DNA, 201 bp, Homo sapiens
gggcagatcatgaggtaggagatcaagaccatcctgactaacacagtgaaaccccgtctctactaaaagtacaaaaaacaaaattagccaggcgtggtggrgggcgcctgtagtcccagctactctggaggctgaggcaggagaatggcgtgaacccaggaggtggagcttgcagtgagccaagatcacaccactgcactc

SEQ ID NO: 54744 - DNA, 201 bp, Homo sapiens
gggctgaaccccggggaggcctgacgcctgtcagtaatgagatcatgaaaaccagttctgagttgcttccatgtggccccacgaatatctttattccctgygtctgtgcctggggtgggcctcagatcccatagatcagagtgaaggggctgtcacatttacttgtcattcggtaattttcagtgaattaggggtatggag

SEQ ID NO: 54745 - DNA, 201 bp, Homo sapiens
atgtggccccacgaatatctttattccctgagtctgtgcctggggtgggcctcagatcccatagatcagagtgaaggggctgtcacatttacttgtcattrggtaattttcagtgaattaggggtatggagtttccatctgccatctggcctcactctggtaaccatggtaaccaccatctgcctgacttaatactattaa

SEQ ID NO: 54746 - DNA, 201 bp, Homo sapiens
gagtctatcaggtggagagaacagaaatgcatacagaagtcagtgaatgttcagaggtatgcctgaagcaataggttggtgagggaggtcatggaaagctwcagagatgacacctgcactgagtcaggtaaaaaggggtctttgggggccatattcactttccatcctgcagcacagaataggagaggactcactcaaggt

SEQ ID NO: 54747 - DNA, 201 bp, Homo sapiens
gacagctcagccatatgcaggccaagtacacacagtgcagagtgtatgtctccctggcacctgcccttcctgcattctctccttccttccttccttccttractcactcattcattcagcaagcacttacttggatttattatgtaccttgtctgaagtccagaagctcagggtaggggttgggtaagggacggctggaat

SEQ ID NO: 54748 - DNA, 201 bp, Homo sapiens
cttggcaaggagcatggagggggtcagaagtaggggtcaggggagttgacgtttgattacctcaaactgagccaccattcctgtagtacagtgcccgaccrtgagacctggactggacaaaacatggtcatgattgagaaataaatgtgtacagaaatgatttgcctgctttttatgcagacattaaaggaggagtaagtg

SEQ ID NO: 54749 - DNA, 201 bp, Homo sapiens
ttaaaaggaatgtagatcatatgtaaatgcgcctctgtgagattgtgtatcctaacctgcattaagcacacattaatttcattatgacaccgttcacttamtcctcctttaatgtctgcataaaaagcaggcaaatcatttctgtacacatttatttctcaatcatgaccatgttttgtccagtccaggtctcagggtcgg

SEQ ID NO: 54750 - DNA, 201 bp, Homo sapiens; identical to SEQ ID NO: 54724

SEQ ID NO: 54751 - DNA, 201 bp, Homo sapiens; identical to SEQ ID NO: 54749

SEQ ID NO: 54752 - DNA, 201 bp, Homo sapiens
gtaccaaaaggggtagcaggctcaccaaaaattcgactagcacagtgagtggcgtctccaaggattctcgccccagtctctctgagcacgaggagagatawgaaatactgctccctaaggggaaactgagtgccaggcagcgccgtccaccactgggcagggggatccttcgctccacaccccagagggttggaatccctc

SEQ ID NO: 54753 - DNA, 201 bp, Homo sapiens
tatacatggttggccttcagtttaaatgggtcccactcctggtgctctagaaatggcctttgcagaatctgatcttccgctcctgcctgttcacaggcccsatcatggtaactggtcacagccagctttctgatgcagtaatctcttcctttgtgatctgaattctgtctgtgtgaaattgcaaaacactaaaactctccc

SEQ ID NO: 54754 - DNA, 201 bp, Homo sapiens
agcagaacacgtatgttcccagcagatctgaaacctgccctgcctgcctcacagttactggaggggccagtgagaaatgggtaagaacagctttgaaacamgtaatgtgttgtagaaatataaaggatggtttataatggtcagtcaataatatccaataatcctaaacactcaccaaaatccaggccgtggcctcatggt

SEQ ID NO: 54755 - DNA, 201 bp, Homo sapiens
ctggcctagaagggggctgtgactttgtgactgtgtgctcagtacctggcacatagtcggctcccaatgatagccaatgttcactgagtgcttactgtctctcaggtaccctgctaagtattttatatctactagctcatttcagccccactgtccataaggtggtcatagcttatcttagataaaactgaggctcaggga

SEQ ID NO: 54756 - DNA, 201 bp, Homo sapiens; identical to SEQ ID NO: 54749

SEQ ID NO: 54757 - DNA, 201 bp, Homo sapiens
tctggcctagaagggggctgtgactttgtgactgtgtgctcagtacctggcacatagtcggctcccaatgatagccaatgttcactgagtgcttactgtcagtcaggtaccctgctaagtattttatatctactagctcatttcagccccactgtccataaggtggtcatagcttatcttagataaaactgaggctcaggg

SEQ ID NO: 54758 - DNA, 201 bp, Homo sapiens
ggggtgaacaaagggataactttgagttctgtctgtcctttgtactgcacgtgtgaagataagccatcaatttacatagccaaggtgaaattcaacagaastgttttagggtaaagaccctgaggcccacagagaatttccttgtgggtaaattatgagaaaggtatgtagctttttttttaaattgaagctttgtggcta

SEQ ID NO: 54759 - DNA, 201 bp, Homo sapiens
aaagtttgttttgccagggttaaggacacactcgtgatacagcctgaggaggtgctgacgacatgtgcccaaggtggtcggggcacagcttggttttatarattttaggaagagatgagacatcaatcaacatgtgtaagaagtacattggttctgtctggtgtggtgggacaagccaaagtgggggcttctcggtcatag

SEQ ID NO: 54760 - DNA, 201 bp, Homo sapiens
ataatgaaattaatgtgtgcttaatgcaggttaggatacacaatctcacagaggcgcatttacatatgatctacattccttttaaatggtagggagagtartatgtatgcataacgactctttgagaattaaatcagaagactcattttccaacactgagcctgtggcatcaaagcccctgtatctgggtggagaaaacat

SEQ ID NO: 54761 - DNA, 201 bp, Homo sapiens
gtgcacatctaatgtaatggcatatttgtaaatatgtgaatgtgtaaacatgcaaaaatttaagattgtttttaatgatgtgaaggaaacccttttttttwaaaaaaaaaaaaaaagagatggtacctcattctgctgcccaggttggagtgcaatgtcatgatcatagctcactgcagcctcaaactcctgagcctcaag

SEQ ID NO: 54762 - DNA, 201 bp, Homo sapiens
gtgttgtagaaatataaaggatggtttataatggtcagtcaataatatccaataatcctaaacactcaccaaaatccaggccgtggcctcatggtcagaakggccccctcgcacttggacagctatattgacatggtccccaggcagctcctccagtgcttgggtgccctcaggggacttcgtgacctacaggggacagga

SEQ ID NO: 54763 - DNA, 201 bp, Homo sapiens
tgtgtgtgtgtgtgtgagaaagagggagaaacagacgtgagtggtaaaaatgtttttcttttaagtgtgtttatatatatatgcctttataggtgggccamaggatgaagaaaagatatcatctgtaccactcctctgcctcgaaacttctaccccaaacctctccccttggaagggaacattgcaacccttcctgtgcca

SEQ ID NO: 54764 - DNA, 201 bp, Homo sapiens
tggagagatcccatgcacctgggtaagtaattaggcaacaagaatgggtgtgattttcttcctcttcagcctccagcctgaaaacaaacacaacacagggyagactagccaatcccccattcagagcagatgtgtgcccacccggcagctgctgaagtgggtatgaatgtcccatccattaattcctcccttgaacgtaga

SEQ ID NO: 54765 - DNA, 201 bp, Homo sapiens
tggagagaacagaaatgcatacagaagtcagtgaatgttcagaggtatgcctgaagcaataggttggtgagggaggtcatggaaagctacagagatgacakctgcactgagtcaggtaaaaaggggtctttgggggccatattcactttccatcctgcagcacagaataggagaggactcactcaaggtcacacagctctt

SEQ ID NO: 54766 - DNA, 201 bp, Homo sapiens
aaaataaaattttaaaaaagagaatgctaggctaacaaatggatgctctggtctccaaagacccagccaaggcgctcctgagtctggtaaagcatcccacktaaaactaaatctccttcaaagggaaaaagttaggaatagaagagctacagccagctgtccacacgctggggtaaagcaatggaatttgtttctgaggga

SEQ ID NO: 54767 - DNA, 201 bp, Homo sapiens
cagcctccagcctgaaaacaaacacaacacagggaagactagccaatcccccattcagagcagatgtgtgcccacccggcagctgctgaagtgggtatgaytgtcccatccattaattcctcccttgaacgtagagataaatggcagatattctctgtccttggggagcttccagcacagaggaagagaatagaagctcag

SEQ ID NO: 54768 - DNA, 201 bp, Homo sapiens
ggttggtgagggaggtcatggaaagctacagagatgacacctgcactgagtcaggtaaaaaggggtctttgggggccatattcactttccatcctgcagcycagaataggagaggactcactcaaggtcacacagctcttcagggcagagctggggcaagcacccaagtttctcggtatgtcagcccagagctctttctta

SEQ ID NO: 54769 - DNA, 201 bp, Homo sapiens
ggccatattcactttccatcctgcagcacagaataggagaggactcactcaaggtcacacagctcttcagggcagagctggggcaagcacccaagtttctsggtatgtcagcccagagctctttcttatacatggttggccttcagtttaaatgggtcccactcctggtgctctagaaatggcctttgcagaatctgatct

SEQ ID NO: 54770 - DNA, 20 bp, Homo sapiens
acccagtgcttgtatcagaa

SEQ ID NO: 54771 - DNA, 21 bp, Homo sapiens
tacccagtgcttgtatcagat

SEQ ID NO: 54772 - DNA, 20 bp, Homo sapiens
cagactctgggtcacagtga

SEQ ID NO: 54773 - DNA, 24 bp, Homo sapiens
acagagtaatctagaatgcaaagg

SEQ ID NO: 54774 - DNA, 24 bp, Homo sapiens
acagagtaatctagaatgcaaagc

SEQ ID NO: 54775 - DNA, 21 bp, Homo sapiens
tgcagtacccatcgtgtattt

SEQ ID NO: 54776 - DNA, 18 bp, Homo sapiens
aacaacattgcttcccaa

SEQ ID NO: 54777 - DNA, 18 bp, Homo sapiens
aacaacattgcttcccag

SEQ ID NO: 54778 - DNA, 20 bp, Homo sapiens
tgccctttttcttcagaatc

SEQ ID NO: 54779 - DNA, 19 bp, Homo sapiens
cagaaactccgaggagaca

SEQ ID NO: 54780 - DNA, 18 bp, Homo sapiens
agaaactccgaggagacg

SEQ ID NO: 54781 - DNA, 17 bp, Homo sapiens
ccctgggtgcagacatt

SEQ ID NO: 54782 - DNA, 23 bp, Homo sapiens
aaggcactgagagattcagtaac

SEQ ID NO: 54783 - DNA, 23 bp, Homo sapiens
aaggcactgagagattcagtaat

SEQ ID NO: 54784 - DNA, 25 bp, Homo sapiens
aaacaggagctgagagagaatacta

SEQ ID NO: 54785 - DNA, 19 bp, Homo sapiens
attgatggcacaactctga

SEQ ID NO: 54786 - DNA, 17 bp, Homo sapiens
tgatggcacaactctgc

SEQ ID NO: 54787 - DNA, 19 bp, Homo sapiens
tcagagggcttcctcttct

SEQ ID NO: 54788 - DNA, 21 bp, Homo sapiens
ccattcccactctagacttga

SEQ ID NO: 54789 - DNA, 20 bp, Homo sapiens
cattcccactctagacttgg

SEQ ID NO: 54790 - DNA, 24 bp, Homo sapiens
gacacttccatcaaagcagtatta

SEQ ID NO: 54791 - DNA, 17 bp, Homo sapiens
ccaaatgccactgaacg

SEQ ID NO: 54792 - DNA, 18 bp, Homo sapiens
accaaatgccactgaaca

SEQ ID NO: 54793 - DNA, 24 bp, Homo sapiens
tttgctaaacaattcctcactact

SEQ ID NO: 54794 - DNA, 25 bp, Homo sapiens
ttttagtaggcctataacttaaggg

SEQ ID NO: 54795 - DNA, 27 bp, Homo sapiens
aattttagtaggcctataacttaaggt

SEQ ID NO: 54796 - DNA, 22 bp, Homo sapiens
cagcagggacaaatctctaatc

SEQ ID NO: 54797 - DNA, 21 bp, Homo sapiens
ctgttgcttctttttgtcttg

SEQ ID NO: 54798 - DNA, 22 bp, Homo sapiens
tctgttgcttctttttgtcttc

SEQ ID NO: 54799 - DNA, 24 bp, Homo sapiens
caaatgatgacctctcagtctatt

SEQ ID NO: 54800 - DNA, 21 bp, Homo sapiens
acagtttcctcaatcttttcc

SEQ ID NO: 54801 - DNA, 23 bp, Homo sapiens
taacagtttcctcaatcttttca

SEQ ID NO: 54802 - DNA, 24 bp, Homo sapiens
catgttgccaaaatatgattataa

SEQ ID NO: 54803 - DNA, 16 bp, Homo sapiens
gctggacacgaaccat

SEQ ID NO: 54804 - DNA, 16 bp, Homo sapiens
gctggacacgaaccac

SEQ ID NO: 54805 - DNA, 16 bp, Homo sapiens
gcaccccctggaacag

SEQ ID NO: 54806 - DNA, 21 bp, Homo sapiens
agaagaagccctgtactcaac

SEQ ID NO: 54807 - DNA, 21 bp, Homo sapiens
agaagaagccctgtactcaag

SEQ ID NO: 54808 - DNA, 25 bp, Homo sapiens
ttgtggaatgcatttctaattatat

SEQ ID NO: 54809 - DNA, 24 bp, Homo sapiens
gaagttcttaccacactgactaca

SEQ ID NO: 54810 - DNA, 24 bp, Homo sapiens
gaagttcttaccacactgactacc

SEQ ID NO: 54811 - DNA, 26 bp, Homo sapiens
aataactgtgggaaaatacttaacac

SEQ ID NO: 54812 - DNA, 24 bp, Homo sapiens
gaagttcttaccacactgactaca

SEQ ID NO: 54813 - DNA, 24 bp, Homo sapiens
gaagttcttaccacactgactacc

SEQ ID NO: 54814 - DNA, 22 bp, Homo sapiens
gagaaaccctgtgaccataata

SEQ ID NO: 54815 - DNA, 17 bp, Homo sapiens
caacattgcaagatgcc

SEQ ID NO: 54816 - DNA, 18 bp, Homo sapiens
gcaacattgcaagatgct

SEQ ID NO: 54817 - DNA, 25 bp, Homo sapiens
ttttgacaaacaaagtcacttagac

SEQ ID NO: 54818 - DNA, 16 bp, Homo sapiens
tgggaaattcaaggcg

SEQ ID NO: 54819 - DNA, 17 bp, Homo sapiens
ctgggaaattcaaggca

SEQ ID NO: 54820 - DNA, 26 bp, Homo sapiens
tttaagtcctgggtaaactaaataga

SEQ ID NO: 54821 - DNA, 17 bp, Homo sapiens
ggcatggcaggactacg

SEQ ID NO: 54822 - DNA, 17 bp, Homo sapiens
ggcatggcaggactaca

SEQ ID NO: 54823 - DNA, 20 bp, Homo sapiens
ggactccaaaggaaggtcaa

SEQ ID NO: 54824 - DNA, 20 bp, Homo sapiens
acaatatgcctaagatcccg

SEQ ID NO: 54825 - DNA, 21 bp, Homo sapiens
aacaatatgcctaagatccca

SEQ ID NO: 54826 - DNA, 25 bp, Homo sapiens
cagatgaagaaactgagtcatagag

SEQ ID NO: 54827 - DNA, 26 bp, Homo sapiens
ataagtcttttatcacctttaggcta

SEQ ID NO: 54828 - DNA, 23 bp, Homo sapiens
agtcttttatcacctttaggctg

SEQ ID NO: 54829 - DNA, 24 bp, Homo sapiens
aatcaattggcaaataagaatgta

SEQ ID NO: 54830 - DNA, 17 bp, Homo sapiens
gggattccaagctgacg

SEQ ID NO: 54831 - DNA, 19 bp, Homo sapiens
aagggattccaagctgact

SEQ ID NO: 54832 - DNA, 18 bp, Homo sapiens
gggaaggccaggttctac

SEQ ID NO: 54833 - DNA, 23 bp, Homo sapiens
gatgtcccatctattagatgagt

SEQ ID NO: 54834 - DNA, 22 bp, Homo sapiens
atgtcccatctattagatgagc

SEQ ID NO: 54835 - DNA, 23 bp, Homo sapiens
cgcaaacctttctgaagatatta

SEQ ID NO: 54836 - DNA, 22 bp, Homo sapiens
taaattagcacaagggaacttc

SEQ ID NO: 54837 - DNA, 22 bp, Homo sapiens
taaattagcacaagggaacttt

SEQ ID NO: 54838 - DNA, 20 bp, Homo sapiens
aatggcatgcacagatctta

SEQ ID NO: 54839 - DNA, 14 bp, Homo sapiens
ggagccggcaagca

SEQ ID NO: 54840 - DNA, 13 bp, Homo sapiens
gagccggcaagcg

SEQ ID NO: 54841 - DNA, 18 bp, Homo sapiens
ggcctggtctggtttcag

SEQ ID NO: 54842 - DNA, 13 bp, Homo sapiens
gcaccgtccttcg

SEQ ID NO: 54843 - DNA, 14 bp, Homo sapiens
cgcaccgtccttca

SEQ ID NO: 54844 - DNA, 22 bp, Homo sapiens
gcaagtgtggagtagctttctg

SEQ ID NO: 54845 - DNA, 22 bp, Homo sapiens
tcatcaggtaactgatttcctc

SEQ ID NO: 54846 - DNA, 22 bp, Homo sapiens
tcatcaggtaactgatttcctt

SEQ ID NO: 54847 - DNA, 18 bp, Homo sapiens
tggcactgctgtgtgtct

SEQ ID NO: 54848 - DNA, 23 bp, Homo sapiens
aacagttgttcttgtgaatcatc

SEQ ID NO: 54849 - DNA, 22 bp, Homo sapiens
acagttgttcttgtgaatcatg

SEQ ID NO: 54850 - DNA, 19 bp, Homo sapiens
ccattgccagaaaatgact

SEQ ID NO: 54851 - DNA, 18 bp, Homo sapiens
ctttccgaacaatctggg

SEQ ID NO: 54852 - DNA, 20 bp, Homo sapiens
tactttccgaacaatctgga

SEQ ID NO: 54853 - DNA, 20 bp, Homo sapiens
agctctgggaaacaaatgtc

SEQ ID NO: 54854 - DNA, 18 bp, Homo sapiens
caggtccatgaccaacaa

SEQ ID NO: 54855 - DNA, 18 bp, Homo sapiens
caggtccatgaccaacac

SEQ ID NO: 54856 - DNA, 25 bp, Homo sapiens
ggacatcatccctacatctactagt

SEQ ID NO: 54857 - DNA, 17 bp, Homo sapiens
aggtgagtgtcaggtgc

SEQ ID NO: 54858 - DNA, 18 bp, Homo sapiens
caggtgagtgtcaggtgt

SEQ ID NO: 54859 - DNA, 24 bp, Homo sapiens
gaccttgagtttctgttcacatac

SEQ ID NO: 54860 - DNA, 20 bp, Homo sapiens
caaaggaatttcaggaggaa

SEQ ID NO: 54861 - DNA, 20 bp, Homo sapiens
caaaggaatttcaggaggag

SEQ ID NO: 54862 - DNA, 18 bp, Homo sapiens
gccatagccagcaatcac

SEQ ID NO: 54863 - DNA, 17 bp, Homo sapiens
ggggatacagtgcctga

SEQ ID NO: 54864 - DNA, 17 bp, Homo sapiens
ggggatacagtgcctgc

SEQ ID NO: 54865 - DNA, 20 bp, Homo sapiens
acctcctgaggacaagtcac

SEQ ID NO: 54866 - DNA, 19 bp, Homo sapiens
cgggagtactgagggagac

SEQ ID NO: 54867 - DNA, 19 bp, Homo sapiens
cgggagtactgagggagag

SEQ ID NO: 54868 - DNA, 20 bp, Homo sapiens
cagggtgaggatttcatcag

SEQ ID NO: 54869 - DNA, 20 bp, Homo sapiens
gagataaaggcaaggagtct

SEQ ID NO: 54870 - DNA, 19 bp, Homo sapiens
agataaaggcaaggagtca

SEQ ID NO: 54871 - DNA, 19 bp, Homo sapiens
tcctgaatgctgctcttct

SEQ ID NO: 54872 - DNA, 19 bp, Homo sapiens
gcctctgggatgaaaaaga

SEQ ID NO: 54873 - DNA, 18 bp, Homo sapiens
cctctgggatgaaaaagc

SEQ ID NO: 54874 - DNA, 17 bp, Homo sapiens
gcaggagcctgggttct

SEQ ID NO: 54875 - DNA, 22 bp, Homo sapiens
gagagtctcctctcctctaagg

SEQ ID NO: 54876 - DNA, 23 bp, Homo sapiens
ggagagtctcctctcctctaagt

SEQ ID NO: 54877 - DNA, 19 bp, Homo sapiens
tgcatcccaagatttgttg

SEQ ID NO: 54878 - DNA, 24 bp, Homo sapiens
taaagatttacctatttggtggag

SEQ ID NO: 54879 - DNA, 23 bp, Homo sapiens
aaagatttacctatttggtggaa

SEQ ID NO: 54880 - DNA, 22 bp, Homo sapiens
cagtcagggagaagagaagatc

SEQ ID NO: 54881 - DNA, 18 bp, Homo sapiens
ggttttcagtgacatcca

SEQ ID NO: 54882 - DNA, 17 bp, Homo sapiens
gttttcagtgacatccg

SEQ ID NO: 54883 - DNA, 25 bp, Homo sapiens
tgttctttttctctaaagtatcttt

SEQ ID NO: 54884 - DNA, 24 bp, Homo sapiens
ccttttaaatggtagggagagtat

SEQ ID NO: 54885 - DNA, 24 bp, Homo sapiens
ccttttaaatggtagggagagtac

SEQ ID NO: 54886 - DNA, 20 bp, Homo sapiens
caaagcttgggaatgttttc

SEQ ID NO: 54887 - DNA, 24 bp, Homo sapiens
ctactgtacctttccaacttatcc

SEQ ID NO: 54888 - DNA, 25 bp, Homo sapiens
gctactgtacctttccaacttatct

SEQ ID NO: 54889 - DNA, 25 bp, Homo sapiens
ttaacttgtttttgctgtcttacag

SEQ ID NO: 54890 - DNA, 19 bp, Homo sapiens
taggagggtgaaaagtgga

SEQ ID NO: 54891 - DNA, 17 bp, Homo sapiens
ggagggtgaaaagtggg

SEQ ID NO: 54892 - DNA, 16 bp, Homo sapiens
ggcagcgtgctcagac

SEQ ID NO: 54893 - DNA, 19 bp, Homo sapiens
ctaggcagtctgcctcaac

SEQ ID NO: 54894 - DNA, 19 bp, Homo sapiens
ctaggcagtctgcctcaag

SEQ ID NO: 54895 - DNA, 27 bp, Homo sapiens
aattaaagaatttgtgatcaatgtact

SEQ ID NO: 54896 - DNA, 20 bp, Homo sapiens
acttcctgaggctgtagatg

SEQ ID NO: 54897 - DNA, 21 bp, Homo sapiens
cacttcctgaggctgtagata

SEQ ID NO: 54898 - DNA, 23 bp, Homo sapiens
gccaacttaccatttgattttag

SEQ ID NO: 54899 - DNA, 24 bp, Homo sapiens
cagctacattgcttctcttactta

SEQ ID NO: 54900 - DNA, 23 bp, Homo sapiens
agctacattgcttctcttacttg

SEQ ID NO: 54901 - DNA, 24 bp, Homo sapiens
tgtcttacccaacaaaaagttagt

SEQ ID NO: 54902 - DNA, 20 bp, Homo sapiens
aaagccactttgaaatcctc

SEQ ID NO: 54903 - DNA, 19 bp, Homo sapiens
aagccactttgaaatcctg

SEQ ID NO: 54904 - DNA, 21 bp, Homo sapiens
agttcctgctttgctttacag

SEQ ID NO: 54905 - DNA, 16 bp, Homo sapiens
ccatggtgattgcctc

SEQ ID NO: 54906 - DNA, 16 bp, Homo sapiens
ccatggtgattgcctt

SEQ ID NO: 54907 - DNA, 20 bp, Homo sapiens
attcctcgagctgtgagatt

SEQ ID NO: 54908 - DNA, 23 bp, Homo sapiens
ctatcaaaccgtatgctcttaag

SEQ ID NO: 54909 - DNA, 23 bp, Homo sapiens
ctatcaaaccgtatgctcttaac

SEQ ID NO: 54910 - DNA, 25 bp, Homo sapiens
aatcgtaaatgggagatagatactc

SEQ ID NO: 54911 - DNA, 15 bp, Homo sapiens
tggcagcgtgtgtgg

SEQ ID NO: 54912 - DNA, 17 bp, Homo sapiens
tttggcagcgtgtgtgt

SEQ ID NO: 54913 - DNA, 21 bp, Homo sapiens
tctagtccccctgactctgtt

SEQ ID NO: 54914 - DNA, 18 bp, Homo sapiens
cgcaattccattcctagc

SEQ ID NO: 54915 - DNA, 19 bp, Homo sapiens
ccgcaattccattcctagt

SEQ ID NO: 54916 - DNA, 16 bp, Homo sapiens
gccagggcagcaatct

SEQ ID NO: 54917 - DNA, 18 bp, Homo sapiens
ttgcaggtccttatccaa

SEQ ID NO: 54918 - DNA, 19 bp, Homo sapiens
cttgcaggtccttatccat

SEQ ID NO: 54919 - DNA, 20 bp, Homo sapiens
gagggacaaattccttcttg

SEQ ID NO: 54920 - DNA, 18 bp, Homo sapiens
aagcagtccaggatggta

SEQ ID NO: 54921 - DNA, 17 bp, Homo sapiens
agcagtccaggatggtg

SEQ ID NO: 54922 - DNA, 21 bp, Homo sapiens
tctacgtgggatgaacagaag

SEQ ID NO: 54923 - DNA, 22 bp, Homo sapiens
ccaatacttcctctttagcttg

SEQ ID NO: 54924 - DNA, 23 bp, Homo sapiens
accaatacttcctctttagcttt

SEQ ID NO: 54925 - DNA, 20 bp, Homo sapiens
tcaggtggtggacatcatac

SEQ ID NO: 54926 - DNA, 18 bp, Homo sapiens
gggcacttaacaatggag

SEQ ID NO: 54927 - DNA, 18 bp, Homo sapiens
gggcacttaacaatggaa

SEQ ID NO: 54928 - DNA, 23 bp, Homo sapiens
gggtggtacattctcaagtaaaa

SEQ ID NO: 54929 - DNA, 21 bp, Homo sapiens
atggctcactttttattccat

SEQ ID NO: 54930 - DNA, 21 bp, Homo sapiens
atggctcactttttattccac

SEQ ID NO: 54931 - DNA, 22 bp, Homo sapiens
ctgcagacgctgagaactatag

SEQ ID NO: 54932 - DNA, 21 bp, Homo sapiens
gcttacttgttggtctgtgac

SEQ ID NO: 54933 - DNA, 21 bp, Homo sapiens
gcttacttgttggtctgtgat

SEQ ID NO: 54934 - DNA, 22 bp, Homo sapiens
cctgaacctggtttcaaatata

SEQ ID NO: 54935 - DNA, 26 bp, Homo sapiens
tacactacactttctgtttcaactta

SEQ ID NO: 54936 - DNA, 23 bp, Homo sapiens
actacactttctgtttcaacttg

SEQ ID NO: 54937 - DNA, 24 bp, Homo sapiens
cttgaggttcatgagaatgtaatc

SEQ ID NO: 54938 - DNA, 20 bp, Homo sapiens
tcccttctgggttgtttatc

SEQ ID NO: 54939 - DNA, 20 bp, Homo sapiens
tcccttctgggttgtttatt

SEQ ID NO: 54940 - DNA, 20 bp, Homo sapiens
tcctccaaacagaacaggtt

SEQ ID NO: 54941 - DNA, 17 bp, Homo sapiens
gggttttggtctgagca

SEQ ID NO: 54942 - DNA, 17 bp, Homo sapiens
gggttttggtctgagcg

SEQ ID NO: 54943 - DNA, 22 bp, Homo sapiens
tcaacgtccaaatctgacttta

SEQ ID NO: 54944 - DNA, 19 bp, Homo sapiens
agcgactcctgagtgactt

SEQ ID NO: 54945 - DNA, 19 bp, Homo sapiens
agcgactcctgagtgactc

SEQ ID NO: 54946 - DNA, 21 bp, Homo sapiens
acatagcctgggagtaatgaa

SEQ ID NO: 54947 - DNA, 21 bp, Homo sapiens
tttattcttcatctggcattc

SEQ ID NO: 54948 - DNA, 23 bp, Homo sapiens
attttattcttcatctggcatta

SEQ ID NO: 54949 - DNA, 25 bp, Homo sapiens
tgaacacagggctttatactagata

SEQ ID NO: 54950 - DNA, 21 bp, Homo sapiens
atcttgaaaggttacgtgatg

SEQ ID NO: 54951 - DNA, 23 bp, Homo sapiens
caatcttgaaaggttacgtgata

SEQ ID NO: 54952 - DNA, 25 bp, Homo sapiens
aaccttagcaacactaatttgttct

SEQ ID NO: 54953 - DNA, 17 bp, Homo sapiens
ccctgggctttatttcc

SEQ ID NO: 54954 - DNA, 17 bp, Homo sapiens
ccctgggctttatttcg

SEQ ID NO: 54955 - DNA, 22 bp, Homo sapiens
tgctgagtcccaaagactattt

SEQ ID NO: 54956 - DNA, 19 bp, Homo sapiens
aattgtggaaatgctgtcg

SEQ ID NO: 54957 - DNA, 20 bp, Homo sapiens
aaattgtggaaatgctgtca

SEQ ID NO: 54958 - DNA, 20 bp, Homo sapiens
ctttgaggtgctcaatgtca

SEQ ID NO: 54959 - DNA, 19 bp, Homo sapiens
gaccctacagagcagcaga

SEQ ID NO: 54960 - DNA, 18 bp, Homo sapiens
accctacagagcagcagg

SEQ ID NO: 54961 - DNA, 23 bp, Homo sapiens
cattgctactattccttgatgtg

SEQ ID NO: 54962 - DNA, 20 bp, Homo sapiens
aactcagacgaaattgaccc

SEQ ID NO: 54963 - DNA, 21 bp, Homo sapiens
gaactcagacgaaattgacct

SEQ ID NO: 54964 - DNA, 26 bp, Homo sapiens
aataggtactccatgaaaatatgttg

SEQ ID NO: 54965 - DNA, 20 bp, Homo sapiens
ccacattcccttgtttagtc

SEQ ID NO: 54966 - DNA, 20 bp, Homo sapiens
ccacattcccttgtttagtt

SEQ ID NO: 54967 - DNA, 22 bp, Homo sapiens
ccttactctggctttcaatcac

SEQ ID NO: 54968 - DNA, 20 bp, Homo sapiens
catcagagctttttcctttg

SEQ ID NO: 54969 - DNA, 20 bp, Homo sapiens
catcagagctttttcctttc

SEQ ID NO: 54970 - DNA, 19 bp, Homo sapiens
ccacttcccctcttctttc

SEQ ID NO: 54971 - DNA, 24 bp, Homo sapiens
cgtaaggtttttcttctgttacct

SEQ ID NO: 54972 - DNA, 23 bp, Homo sapiens
gtaaggtttttcttctgttaccc

SEQ ID NO: 54973 - DNA, 26 bp, Homo sapiens
tgtttcccttcctctagagatatact

SEQ ID NO: 54974 - DNA, 31 bp, Homo sapiens
aagaaaacctattaccaagtatttactatat

SEQ ID NO: 54975 - DNA, 30 bp, Homo sapiens
agaaaacctattaccaagtatttactatac

SEQ ID NO: 54976 - DNA, 23 bp, Homo sapiens
cctgaggttgtttcacaattaac

SEQ ID NO: 54977 - DNA, 20 bp, Homo sapiens
ggtcataatctggtcatcag

SEQ ID NO: 54978 - DNA, 20 bp, Homo sapiens
ggtcataatctggtcatcaa

SEQ ID NO: 54979 - DNA, 27 bp, Homo sapiens
gaagctagaataaacgatcagaactat

SEQ ID NO: 54980 - DNA, 16 bp, Homo sapiens
ggagattcccagaatg

SEQ ID NO: 54981 - DNA, 17 bp, Homo sapiens
gggagattcccagaata

SEQ ID NO: 54982 - DNA, 19 bp, Homo sapiens
gctccatagcatcttgtac

SEQ ID NO: 54983 - DNA, 25 bp, Homo sapiens
atgctagacagtttaattatctggt

SEQ ID NO: 54984 - DNA, 23 bp, Homo sapiens
gctagacagtttaattatctggc

SEQ ID NO: 54985 - DNA, 23 bp, Homo sapiens
catacacaggcagatgatttaca

SEQ ID NO: 54986 - DNA, 18 bp, Homo sapiens
cctgagatgcctctttgg

SEQ ID NO: 54987 - DNA, 20 bp, Homo sapiens
gtcctgagatgcctctttgt

SEQ ID NO: 54988 - DNA, 22 bp, Homo sapiens
tcacagagctctctgaaacatc

SEQ ID NO: 54989 - DNA, 21 bp, Homo sapiens
gattttaaagccaggaacatt

SEQ ID NO: 54990 - DNA, 20 bp, Homo sapiens
attttaaagccaggaacatg

SEQ ID NO: 54991 - DNA, 22 bp, Homo sapiens
gcccattttgtttctctacatt

SEQ ID NO: 54992 - DNA, 22 bp, Homo sapiens
cggagctccttaagaattacat

SEQ ID NO: 54993 - DNA, 22 bp, Homo sapiens
cggagctccttaagaattacaa

SEQ ID NO: 54994 - DNA, 19 bp, Homo sapiens
tccagatgcaggcatgtac

SEQ ID NO: 54995 - DNA, 20 bp, Homo sapiens
tggcttctttgatttcaggt

SEQ ID NO: 54996 - DNA, 19 bp, Homo sapiens
ggcttctttgatttcaggg

SEQ ID NO: 54997 - DNA, 20 bp, Homo sapiens
caatcaccagcattcctctt

SEQ ID NO: 54998 - DNA, 19 bp, Homo sapiens
acatacacaacccgcatta

SEQ ID NO: 54999 - DNA, 18 bp, Homo sapiens
catacacaacccgcattc

SEQ ID NO: 55000 - DNA, 25 bp, Homo sapiens
gatgtcattctttggagtgttacta

SEQ ID NO: 55001 - DNA, 22 bp, Homo sapiens
aaattctgtggagaatcttcag

SEQ ID NO: 55002 - DNA, 22 bp, Homo sapiens
aaattctgtggagaatcttcaa

SEQ ID NO: 55003 - DNA, 21 bp, Homo sapiens
cctcgatgattcacaatacaa

SEQ ID NO: 55004 - DNA, 21 bp, Homo sapiens
agggtttctcctctgtatgac

SEQ ID NO: 55005 - DNA, 21 bp, Homo sapiens
agggtttctcctctgtatgag

SEQ ID NO: 55006 - DNA, 22 bp, Homo sapiens
gaatggccagttaaaagaatct

SEQ ID NO: 55007 - DNA, 21 bp, Homo sapiens
cccttcctgaatttgtctaaa

SEQ ID NO: 55008 - DNA, 21 bp, Homo sapiens
cccttcctgaatttgtctaag

SEQ ID NO: 55009 - DNA, 20 bp, Homo sapiens
ggcttgcccttctttaaaac

SEQ ID NO: 55010 - DNA, 15 bp, Homo sapiens
cttcagcggctcacg

SEQ ID NO: 55011 - DNA, 16 bp, Homo sapiens
ccttcagcggctcaca

SEQ ID NO: 55012 - DNA, 23 bp, Homo sapiens
tccacatcctcttgtgtctatct

SEQ ID NO: 55013 - DNA, 23 bp, Homo sapiens
catgactaatgactcttccacat

SEQ ID NO: 55014 - DNA, 23 bp, Homo sapiens
catgactaatgactcttccacac

SEQ ID NO: 55015 - DNA, 20 bp, Homo sapiens
tcttttccagcagatcaatg

SEQ ID NO: 55016 - DNA, 20 bp, Homo sapiens
gcttagacgctgctggatat

SEQ ID NO: 55017 - DNA, 20 bp, Homo sapiens
gcttagacgctgctggatac

SEQ ID NO: 55018 - DNA, 25 bp, Homo sapiens
ctaccttagtgcatcaaacattaat

SEQ ID NO: 55019 - DNA, 27 bp, Homo sapiens
accattatagaaagactcactttaaga

SEQ ID NO: 55020 - DNA, 26 bp, Homo sapiens
ccattatagaaagactcactttaagg

SEQ ID NO: 55021 - DNA, 23 bp, Homo sapiens
tcttgcattcaatcaatttgtat

SEQ ID NO: 55022 - DNA, 21 bp, Homo sapiens
ccagctcattgtaatccagac

SEQ ID NO: 55023 - DNA, 21 bp, Homo sapiens
ccagctcattgtaatccagat

SEQ ID NO: 55024 - DNA, 17 bp, Homo sapiens
cggatgcctcccacagt

SEQ ID NO: 55025 - DNA, 21 bp, Homo sapiens
ccagctcattgtaatccagac

SEQ ID NO: 55026 - DNA, 21 bp, Homo sapiens
ccagctcattgtaatccagat

SEQ ID NO: 55027 - DNA, 17 bp, Homo sapiens
cggtgcctttggtgaag

SEQ ID NO: 55028 - DNA, 20 bp, Homo sapiens
agtgggctgtgaaactacag

SEQ ID NO: 55029 - DNA, 20 bp, Homo sapiens
agtgggctgtgaaactacaa

SEQ ID NO: 55030 - DNA, 20 bp, Homo sapiens
aagtgtggtggctgatactg

SEQ ID NO: 55031 - DNA, 15 bp, Homo sapiens
gccatcagccgaaca

SEQ ID NO: 55032 - DNA, 15 bp, Homo sapiens
gccatcagccgaacc

SEQ ID NO: 55033 - DNA, 20 bp, Homo sapiens
ccatctgggcctgacttata

SEQ ID NO: 55034 - DNA, 16 bp, Homo sapiens
ctgctcttggtggaca

SEQ ID NO: 55035 - DNA, 15 bp, Homo sapiens
tgctcttggtggacg

SEQ ID NO: 55036 - DNA, 23 bp, Homo sapiens
gctatataagctgcttctctctt

SEQ ID NO: 55037 - DNA, 19 bp, Homo sapiens
cagccagatttcctctgtt

SEQ ID NO: 55038 - DNA, 19 bp, Homo sapiens
cagccagatttcctctgtc

SEQ ID NO: 55039 - DNA, 18 bp, Homo sapiens
tcgggatgcactgttctt

SEQ ID NO: 55040 - DNA, 16 bp, Homo sapiens
cccacaggtggaacca

SEQ ID NO: 55041 - DNA, 15 bp, Homo sapiens
ccacaggtggaaccg

SEQ ID NO: 55042 - DNA, 17 bp, Homo sapiens
cagcgctggactcaaaa

SEQ ID NO: 55043 - DNA, 18 bp, Homo sapiens
gagctgcctgccaatagt

SEQ ID NO: 55044 - DNA, 16 bp, Homo sapiens
gctgcctgccaatagc

SEQ ID NO: 55045 - DNA, 18 bp, Homo sapiens
gggccatcgtcttgtaga

SEQ ID NO: 55046 - DNA, 19 bp, Homo sapiens
caagatgcatacagtgctg

SEQ ID NO: 55047 - DNA, 20 bp, Homo sapiens
ccaagatgcatacagtgcta

SEQ ID NO: 55048 - DNA, 24 bp, Homo sapiens
ccaagctaacagttccatacaaac

SEQ ID NO: 55049 - DNA, 24 bp, Homo sapiens
tggatgattactgatatgtgtgtc

SEQ ID NO: 55050 - DNA, 24 bp, Homo sapiens
tggatgattactgatatgtgtgtt

SEQ ID NO: 55051 - DNA, 22 bp, Homo sapiens
gaaggattgccttcaataaaga

SEQ ID NO: 55052 - DNA, 15 bp, Homo sapiens
ggccacgtggttagt

SEQ ID NO: 55053 - DNA, 14 bp, Homo sapiens
gccacgtggttagc

SEQ ID NO: 55054 - DNA, 18 bp, Homo sapiens
gctaggctgcacatttat

SEQ ID NO: 55055 - DNA, 20 bp, Homo sapiens
ccaagcaaacctaatgacac

SEQ ID NO: 55056 - DNA, 20 bp, Homo sapiens
ccaagcaaacctaatgacat

SEQ ID NO: 55057 - DNA, 24 bp, Homo sapiens
ggctcacctttttcttaaatatct

SEQ ID NO: 55058 - DNA, 25 bp, Homo sapiens
tctctaaagtccatctattttcact

SEQ ID NO: 55059 - DNA, 24 bp, Homo sapiens
ctctaaagtccatctattttcacc

SEQ ID NO: 55060 - DNA, 20 bp, Homo sapiens
gaaaggaagccaggagtaaa

SEQ ID NO: 55061 - DNA, 20 bp, Homo sapiens
ccacttcagtcctgaagagc

SEQ ID NO: 55062 - DNA, 20 bp, Homo sapiens
ccacttcagtcctgaagagg

SEQ ID NO: 55063 - DNA, 20 bp, Homo sapiens
tcgtagtgctgggagtttct

SEQ ID NO: 55064 - DNA, 19 bp, Homo sapiens
gacttgtgttctcatccag

SEQ ID NO: 55065 - DNA, 19 bp, Homo sapiens
gacttgtgttctcatccac

SEQ ID NO: 55066 - DNA, 18 bp, Homo sapiens
aagaagcaagctgagaaa

SEQ ID NO: 55067 - DNA, 17 bp, Homo sapiens
agtgggtgcaaagttcc

SEQ ID NO: 55068 - DNA, 19 bp, Homo sapiens
agagtgggtgcaaagttct

SEQ ID NO: 55069 - DNA, 24 bp, Homo sapiens
caaggatgaagtagaatttgtttt

SEQ ID NO: 55070 - DNA, 20 bp, Homo sapiens
ccaagaaaaagtgcacagac

SEQ ID NO: 55071 - DNA, 20 bp, Homo sapiens
ccaagaaaaagtgcacagag

SEQ ID NO: 55072 - DNA, 23 bp, Homo sapiens
tcaggcaaagaaaggtaactagt

SEQ ID NO: 55073 - DNA, 25 bp, Homo sapiens
cttagattccatctctacaaagaac

SEQ ID NO: 55074 - DNA, 25 bp, Homo sapiens
cttagattccatctctacaaagaat

SEQ ID NO: 55075 - DNA, 17 bp, Homo sapiens
gccagggaccaaactga

SEQ ID NO: 55076 - DNA, 24 bp, Homo sapiens
ataaacaccttttatcaggaattg

SEQ ID NO: 55077 - DNA, 24 bp, Homo sapiens
ataaacaccttttatcaggaattc

SEQ ID NO: 55078 - DNA, 19 bp, Homo sapiens
cgattccacgggttagatc

SEQ ID NO: 55079 - DNA, 22 bp, Homo sapiens
gtatcatcagcctcaaaagaag

SEQ ID NO: 55080 - DNA, 21 bp, Homo sapiens
tatcatcagcctcaaaagaaa

SEQ ID NO: 55081 - DNA, 19 bp, Homo sapiens
gggcacattttccacatag

SEQ ID NO: 55082 - DNA, 18 bp, Homo sapiens
ggacggggtatcactctc

SEQ ID NO: 55083 - DNA, 18 bp, Homo sapiens
ggacggggtatcactctt

SEQ ID NO: 55084 - DNA, 18 bp, Homo sapiens
gctggtgcccactacttg

SEQ ID NO: 55085 - DNA, 16 bp, Homo sapiens
ccccagattcccaaac

SEQ ID NO: 55086 - DNA, 16 bp, Homo sapiens
ccccagattcccaaaa

SEQ ID NO: 55087 - DNA, 15 bp, Homo sapiens
cccgcccatcagaga

SEQ ID NO: 55088 - DNA, 25 bp, Homo sapiens
tgtagctctttgtgatgtatagaga

SEQ ID NO: 55089 - DNA, 26 bp, Homo sapiens
ctgtagctctttgtgatgtatagagt

SEQ ID NO: 55090 - DNA, 18 bp, Homo sapiens
tcactggcccgattttac

SEQ ID NO: 55091 - DNA, 21 bp, Homo sapiens
aatatccagaggcatttatcg

SEQ ID NO: 55092 - DNA, 22 bp, Homo sapiens
caatatccagaggcatttatca

SEQ ID NO: 55093 - DNA, 24 bp, Homo sapiens
tgcagcactttgatactatctaca

SEQ ID NO: 55094 - DNA, 21 bp, Homo sapiens
atggtcctttgaaagagctag

SEQ ID NO: 55095 - DNA, 21 bp, Homo sapiens
atggtcctttgaaagagctaa

SEQ ID NO: 55096 - DNA, 21 bp, Homo sapiens
cattatccccagaggagttgt

SEQ ID NO: 55097 - DNA, 20 bp, Homo sapiens
ggcctatgagagatgattcc

SEQ ID NO: 55098 - DNA, 22 bp, Homo sapiens
gaggcctatgagagatgattct

SEQ ID NO: 55099 - DNA, 20 bp, Homo sapiens
tctgaattggctcaatgatg

SEQ ID NO: 55100 - DNA, 20 bp, Homo sapiens
agctgagaaggtgagcacta

SEQ ID NO: 55101 - DNA, 18 bp, Homo sapiens
ctgagaaggtgagcactg

SEQ ID NO: 55102 - DNA, 24 bp, Homo sapiens
catacctgatgttccaaaaactac

SEQ ID NO: 55103 - DNA, 18 bp, Homo sapiens
cctcggctttctcaaagt

SEQ ID NO: 55104 - DNA, 17 bp, Homo sapiens
ctcggctttctcaaagc

SEQ ID NO: 55105 - DNA, 16 bp, Homo sapiens
gcacgccagcaagttg

SEQ ID NO: 55106 - DNA, 20 bp, Homo sapiens
ctcacaccttacttttccag

SEQ ID NO: 55107 - DNA, 20 bp, Homo sapiens
ctcacaccttacttttccaa

SEQ ID NO: 55108 - DNA, 17 bp, Homo sapiens
cctgccgaccctctctt

SEQ ID NO: 55109 - DNA, 17 bp, Homo sapiens
cacaaaggtgacttcca

SEQ ID NO: 55110 - DNA, 17 bp, Homo sapiens
cacaaaggtgacttccg

SEQ ID NO: 55111 - DNA, 17 bp, Homo sapiens
tgcccctgtttttgaca

SEQ ID NO: 55112 - DNA, 15 bp, Homo sapiens
aggccttgggcagaa

SEQ ID NO: 55113 - DNA, 16 bp, Homo sapiens
aaggccttgggcagat

SEQ ID NO: 55114 - DNA, 19 bp, Homo sapiens
gtcactgccacctctttga

SEQ ID NO: 55115 - DNA, 18 bp, Homo sapiens
cagtggatgccttcacac

SEQ ID NO: 55116 - DNA, 18 bp, Homo sapiens
cagtggatgccttcacat

SEQ ID NO: 55117 - DNA, 20 bp, Homo sapiens
gagtgcagcttccaagaaac

SEQ ID NO: 55118 - DNA, 20 bp, Homo sapiens
aacccagataccaagaggac

SEQ ID NO: 55119 - DNA, 20 bp, Homo sapiens
aacccagataccaagaggaa

SEQ ID NO: 55120 - DNA, 21 bp, Homo sapiens
gctgtgtgagcacacacttct

SEQ ID NO: 55121 - DNA, 20 bp, Homo sapiens
ggaaaagaagaggcaacatg

SEQ ID NO: 55122 - DNA, 20 bp, Homo sapiens
ggaaaagaagaggcaacatt

SEQ ID NO: 55123 - DNA, 17 bp, Homo sapiens
aactcgccagcatcaca

SEQ ID NO: 55124 - DNA, 19 bp, Homo sapiens
gccatggttttggaagagt

SEQ ID NO: 55125 - DNA, 19 bp, Homo sapiens
gccatggttttggaagaga

SEQ ID NO: 55126 - DNA, 25 bp, Homo sapiens
ttcctttaactttcatgatcactaa

SEQ ID NO: 55127 - DNA, 22 bp, Homo sapiens
caataattttttccaggttgtc

SEQ ID NO: 55128 - DNA, 22 bp, Homo sapiens
caataattttttccaggttgtg

SEQ ID NO: 55129 - DNA, 24 bp, Homo sapiens
cacactatgattgtcagaaacatg

SEQ ID NO: 55130 - DNA, 21 bp, Homo sapiens
catatgaatggtagagatggg

SEQ ID NO: 55131 - DNA, 21 bp, Homo sapiens
catatgaatggtagagatggc

SEQ ID NO: 55132 - DNA, 21 bp, Homo sapiens
agatgccctagactcaactca

SEQ ID NO: 55133 - DNA, 27 bp, Homo sapiens
tcgaagattaattgtagacatacatag

SEQ ID NO: 55134 - DNA, 27 bp, Homo sapiens
tcgaagattaattgtagacatacatat

SEQ ID NO: 55135 - DNA, 20 bp, Homo sapiens
tggtggaatcctggctatta

SEQ ID NO: 55136 - DNA, 15 bp, Homo sapiens
cgagccacatcgctc

SEQ ID NO: 55137 - DNA, 15 bp, Homo sapiens
cgagccacatcgctg

SEQ ID NO: 55138 - DNA, 17 bp, Homo sapiens
ccgcaaggctcgtagac

SEQ ID NO: 55139 - DNA, 21 bp, Homo sapiens
catttaccttcccagatgttc

SEQ ID NO: 55140 - DNA, 21 bp, Homo sapiens
catttaccttcccagatgttt

SEQ ID NO: 55141 - DNA, 24 bp, Homo sapiens
ttttcttcagcttgaaagatctaa

SEQ ID NO: 55142 - DNA, 17 bp, Homo sapiens
gtgaagcctgccacact

SEQ ID NO: 55143 - DNA, 16 bp, Homo sapiens
tgaagcctgccacacc

SEQ ID NO: 55144 - DNA, 18 bp, Homo sapiens
gccagtggcaatggtaac

SEQ ID NO: 55145 - DNA, 20 bp, Homo sapiens
ataaaactgggctgcatatc

SEQ ID NO: 55146 - DNA, 21 bp, Homo sapiens
gataaaactgggctgcatata

SEQ ID NO: 55147 - DNA, 24 bp, Homo sapiens
aaagatgcacacattaaggttatc

SEQ ID NO: 55148 - DNA, 16 bp, Homo sapiens
ggcagctaggccgtct

SEQ ID NO: 55149 - DNA, 15 bp, Homo sapiens
gcagctaggccgtcc

SEQ ID NO: 55150 - DNA, 18 bp, Homo sapiens
gacccccacaggaagaag

SEQ ID NO: 55151 - DNA, 16 bp, Homo sapiens
ggcagctaggccgtct

SEQ ID NO: 55152 - DNA, 16 bp, Homo sapiens
ggcagctaggccgtcc

SEQ ID NO: 55153 - DNA, 17 bp, Homo sapiens
acccccacaggaagaag

SEQ ID NO: 55154 - DNA, 21 bp, Homo sapiens
gaaggtagggagaggaatgac

SEQ ID NO: 55155 - DNA, 21 bp, Homo sapiens
gaaggtagggagaggaatgag

SEQ ID NO: 55156 - DNA, 25 bp, Homo sapiens
cactctgtctggcagaataattata

SEQ ID NO: 55157 - DNA, 26 bp, Homo sapiens
aaacaatgtttccagtaaactagtag

SEQ ID NO: 55158 - DNA, 26 bp, Homo sapiens
aaacaatgtttccagtaaactagtac

SEQ ID NO: 55159 - DNA, 22 bp, Homo sapiens
gatcacccctgaaagactattt

SEQ ID NO: 55160 - DNA, 18 bp, Homo sapiens
ccgtctgcactgaatctg

SEQ ID NO: 55161 - DNA, 19 bp, Homo sapiens
accgtctgcactgaatctc

SEQ ID NO: 55162 - DNA, 19 bp, Homo sapiens
cgaactggcctagagtcaa

SEQ ID NO: 55163 - DNA, 19 bp, Homo sapiens
ctttccagtggctatggac

SEQ ID NO: 55164 - DNA, 18 bp, Homo sapiens
tttccagtggctatggaa

SEQ ID NO: 55165 - DNA, 17 bp, Homo sapiens
tgctggtggcactgaat

SEQ ID NO: 55166 - DNA, 16 bp, Homo sapiens
acccttttggctccct

SEQ ID NO: 55167 - DNA, 14 bp, Homo sapiens
ccttttggctcccc

SEQ ID NO: 55168 - DNA, 22 bp, Homo sapiens
tgctggtgctgagtatatcatg

SEQ ID NO: 55169 - DNA, 23 bp, Homo sapiens
cagatcttaattttgtcacgatg

SEQ ID NO: 55170 - DNA, 24 bp, Homo sapiens
acagatcttaattttgtcacgatt

SEQ ID NO: 55171 - DNA, 20 bp, Homo sapiens
ccttccaagctgatgattct

SEQ ID NO: 55172 - DNA, 24 bp, Homo sapiens
ataaactctggattttgctaatgt

SEQ ID NO: 55173 - DNA, 22 bp, Homo sapiens
aaactctggattttgctaatga

SEQ ID NO: 55174 - DNA, 20 bp, Homo sapiens
cagttcccccaacagtaaca

SEQ ID NO: 55175 - DNA, 21 bp, Homo sapiens
cagcatgaatgcctatttatc

SEQ ID NO: 55176 - DNA, 21 bp, Homo sapiens
cagcatgaatgcctatttatt

SEQ ID NO: 55177 - DNA, 20 bp, Homo sapiens
cccaaaatgctgggattata

SEQ ID NO: 55178 - DNA, 18 bp, Homo sapiens
gtggtaggggaggaagtg

SEQ ID NO: 55179 - DNA, 19 bp, Homo sapiens
ggtggtaggggaggaagta

SEQ ID NO: 55180 - DNA, 27 bp, Homo sapiens
acagcttactgtctttatcattatcac

SEQ ID NO: 55181 - DNA, 15 bp, Homo sapiens
cgggggatacaaggg

SEQ ID NO: 55182 - DNA, 16 bp, Homo sapiens
ccgggggatacaagga

SEQ ID NO: 55183 - DNA, 17 bp, Homo sapiens
cgcctcgctggatagac

SEQ ID NO: 55184 - DNA, 16 bp, Homo sapiens
cgtttgcaagctggaa

SEQ ID NO: 55185 - DNA, 16 bp, Homo sapiens
cgtttgcaagctggag

SEQ ID NO: 55186 - DNA, 21 bp, Homo sapiens
cctcaaatgctcatttcttct

SEQ ID NO: 55187 - DNA, 24 bp, Homo sapiens
ttctacaatgtctgaagaagtgaa

SEQ ID NO: 55188 - DNA, 24 bp, Homo sapiens
ttctacaatgtctgaagaagtgac

SEQ ID NO: 55189 - DNA, 25 bp, Homo sapiens
ctgaactcctacctctttttcttag

SEQ ID NO: 55190 - DNA, 16 bp, Homo sapiens
tgccatgatgcctacg

SEQ ID NO: 55191 - DNA, 17 bp, Homo sapiens
ttgccatgatgcctaca

SEQ ID NO: 55192 - DNA, 22 bp, Homo sapiens
actgcactagcatcagatgtct

SEQ ID NO: 55193 - DNA, 24 bp, Homo sapiens
agaaatgacttgtaagatcattca

SEQ ID NO: 55194 - DNA, 25 bp, Homo sapiens
gagaaatgacttgtaagatcattct

SEQ ID NO: 55195 - DNA, 22 bp, Homo sapiens
gctttgtggaaaacattctgta

SEQ ID NO: 55196 - DNA, 21 bp, Homo sapiens
aatccagggaaacctctagtt

SEQ ID NO: 55197 - DNA, 20 bp, Homo sapiens
atccagggaaacctctagtg

SEQ ID NO: 55198 - DNA, 18 bp, Homo sapiens
ggatgggagcaaagatga

SEQ ID NO: 55199 - DNA, 20 bp, Homo sapiens
acaggtacagcagtgctttt

SEQ ID NO: 55200 - DNA, 20 bp, Homo sapiens
acaggtacagcagtgctttc

SEQ ID NO: 55201 - DNA, 23 bp, Homo sapiens
ataaggtcctgatcagaatcatc

SEQ ID NO: 55202 - DNA, 19 bp, Homo sapiens
tcctcattattggcaggtg

SEQ ID NO: 55203 - DNA, 19 bp, Homo sapiens
tcctcattattggcaggtc

SEQ ID NO: 55204 - DNA, 23 bp, Homo sapiens
ggcatctgcagtttacaattatt

SEQ ID NO: 55205 - DNA, 23 bp, Homo sapiens
aataattccgaatctagtttgac

SEQ ID NO: 55206 - DNA, 23 bp, Homo sapiens
aataattccgaatctagtttgat

SEQ ID NO: 55207 - DNA, 23 bp, Homo sapiens
atctcaaccttctgtcttgatct

SEQ ID NO: 55208 - DNA, 18 bp, Homo sapiens
ggatagttccatctgcct

SEQ ID NO: 55209 - DNA, 17 bp, Homo sapiens
gatagttccatctgccc

SEQ ID NO: 55210 - DNA, 20 bp, Homo sapiens
ggtgttgctgttaagagaaa

SEQ ID NO: 55211 - DNA, 20 bp, Homo sapiens
cagaatggcctaaagtctga

SEQ ID NO: 55212 - DNA, 20 bp, Homo sapiens
cagaatggcctaaagtctgt

SEQ ID NO: 55213 - DNA, 21 bp, Homo sapiens
caggtgtttgggaatttaaag

SEQ ID NO: 55214 - DNA, 19 bp, Homo sapiens
cgggagtaccagaaagggt

SEQ ID NO: 55215 - DNA, 18 bp, Homo sapiens
gggagtaccagaaagggc

SEQ ID NO: 55216 - DNA, 23 bp, Homo sapiens
gcattagcactgcacattacatt

SEQ ID NO: 55217 - DNA, 22 bp, Homo sapiens
gaagacatggtttctctgtttc

SEQ ID NO: 55218 - DNA, 22 bp, Homo sapiens
gaagacatggtttctctgtttt

SEQ ID NO: 55219 - DNA, 20 bp, Homo sapiens
acatttggcggaagtactct

SEQ ID NO: 55220 - DNA, 20 bp, Homo sapiens
gacgattctggaatggttac

SEQ ID NO: 55221 - DNA, 20 bp, Homo sapiens
gacgattctggaatggttat

SEQ ID NO: 55222 - DNA, 23 bp, Homo sapiens
cctagtccctagactcctctgtt

SEQ ID NO: 55223 - DNA, 18 bp, Homo sapiens
tggttctagggaggtaac

SEQ ID NO: 55224 - DNA, 19 bp, Homo sapiens
atggttctagggaggtaat

SEQ ID NO: 55225 - DNA, 18 bp, Homo sapiens
tccaaagagcagtgttct

SEQ ID NO: 55226 - DNA, 16 bp, Homo sapiens
tgcagtcccccatcct

SEQ ID NO: 55227 - DNA, 15 bp, Homo sapiens
gcagtcccccatccc

SEQ ID NO: 55228 - DNA, 27 bp, Homo sapiens
tggaatatggaatactccttttatcta

SEQ ID NO: 55229 - DNA, 16 bp, Homo sapiens
ggcgactgggtgacag

SEQ ID NO: 55230 - DNA, 16 bp, Homo sapiens
ggcgactgggtgacaa

SEQ ID NO: 55231 - DNA, 17 bp, Homo sapiens
ggctgccaggaacaagt

SEQ ID NO: 55232 - DNA, 14 bp, Homo sapiens
ccccggcaaggttg

SEQ ID NO: 55233 - DNA, 14 bp, Homo sapiens
ccccggcaaggttc

SEQ ID NO: 55234 - DNA, 17 bp, Homo sapiens
tgctgggcttccatgta

SEQ ID NO: 55235 - DNA, 21 bp, Homo sapiens
attgttgagtgttggcaatac

SEQ ID NO: 55236 - DNA, 21 bp, Homo sapiens
attgttgagtgttggcaatat

SEQ ID NO: 55237 - DNA, 23 bp, Homo sapiens
caaacacagcaatcaagtgtatg

SEQ ID NO: 55238 - DNA, 19 bp, Homo sapiens
caggaagcttcgtgatttg

SEQ ID NO: 55239 - DNA, 20 bp, Homo sapiens
ccaggaagcttcgtgattta

SEQ ID NO: 55240 - DNA, 25 bp, Homo sapiens
ttgaggacaataattttctttacac

SEQ ID NO: 55241 - DNA, 19 bp, Homo sapiens
caccaaacggggttactag

SEQ ID NO: 55242 - DNA, 19 bp, Homo sapiens
caccaaacggggttactac

SEQ ID NO: 55243 - DNA, 23 bp, Homo sapiens
cagagggttgattttctttctat

SEQ ID NO: 55244 - DNA, 14 bp, Homo sapiens
cggcctcggtctcg

SEQ ID NO: 55245 - DNA, 14 bp, Homo sapiens
cggcctcggtctca

SEQ ID NO: 55246 - DNA, 19 bp, Homo sapiens
tgcatctcgctcaacagac

SEQ ID NO: 55247 - DNA, 15 bp, Homo sapiens
cggctttctggtggg

SEQ ID NO: 55248 - DNA, 16 bp, Homo sapiens
acggctttctggtgga

SEQ ID NO: 55249 - DNA, 16 bp, Homo sapiens
ggctccgaggacgaga

SEQ ID NO: 55250 - DNA, 20 bp, Homo sapiens
cggctgatgttgttaaatat

SEQ ID NO: 55251 - DNA, 20 bp, Homo sapiens
cggctgatgttgttaaatac

SEQ ID NO: 55252 - DNA, 22 bp, Homo sapiens
gcacactagttgacaccatact

SEQ ID NO: 55253 - DNA, 24 bp, Homo sapiens
atacctaccaagaacataatcctt

SEQ ID NO: 55254 - DNA, 24 bp, Homo sapiens
atacctaccaagaacataatcctc

SEQ ID NO: 55255 - DNA, 19 bp, Homo sapiens
accaacagcctctgaacaa

SEQ ID NO: 55256 - DNA, 21 bp, Homo sapiens
ttttcgctcaagttgttgtaa

SEQ ID NO: 55257 - DNA, 22 bp, Homo sapiens
attttcgctcaagttgttgtac

SEQ ID NO: 55258 - DNA, 22 bp, Homo sapiens
aggtgcccttgatagtctgtat

SEQ ID NO: 55259 - DNA, 18 bp, Homo sapiens
gtgaaggtccgcttcttc

SEQ ID NO: 55260 - DNA, 17 bp, Homo sapiens
tgaaggtccgcttcttg

SEQ ID NO: 55261 - DNA, 19 bp, Homo sapiens
cccaccagagctgaagatc

SEQ ID NO: 55262 - DNA, 15 bp, Homo sapiens
ccccaggctgcacac

SEQ ID NO: 55263 - DNA, 15 bp, Homo sapiens
ccccaggctgcacat

SEQ ID NO: 55264 - DNA, 20 bp, Homo sapiens
catcacaaccaaccctactg

SEQ ID NO: 55265 - DNA, 13 bp, Homo sapiens
cgccctcgcacag

SEQ ID NO: 55266 - DNA, 13 bp, Homo sapiens
cgccctcgcacaa

SEQ ID NO: 55267 - DNA, 20 bp, Homo sapiens
aggatcccaagggaaatact

SEQ ID NO: 55268 - DNA, 23 bp, Homo sapiens
cagattctcataactagcaccat

SEQ ID NO: 55269 - DNA, 23 bp, Homo sapiens
cagattctcataactagcaccac

SEQ ID NO: 55270 - DNA, 20 bp, Homo sapiens
tgaaaagctggatgacatga

SEQ ID NO: 55271 - DNA, 24 bp, Homo sapiens
cctatactctagtcccagagacaa

SEQ ID NO: 55272 - DNA, 24 bp, Homo sapiens
cctatactctagtcccagagacac

SEQ ID NO: 55273 - DNA, 22 bp, Homo sapiens
ttccacttggcatgagtataga

SEQ ID NO: 55274 - DNA, 17 bp, Homo sapiens
gcaaacctgggactcag

SEQ ID NO: 55275 - DNA, 17 bp, Homo sapiens
gcaaacctgggactcaa

SEQ ID NO: 55276 - DNA, 25 bp, Homo sapiens
gctccatacttgctacctcttacta

SEQ ID NO: 55277 - DNA, 25 bp, Homo sapiens
agtggtcaataaattgattctagac

SEQ ID NO: 55278 - DNA, 25 bp, Homo sapiens
agtggtcaataaattgattctagat

SEQ ID NO: 55279 - DNA, 21 bp, Homo sapiens
gttttcccaattcaaacttga

SEQ ID NO: 55280 - DNA, 17 bp, Homo sapiens
tcaatctccggaacctg

SEQ ID NO: 55281 - DNA, 19 bp, Homo sapiens
gttcaatctccggaaccta

SEQ ID NO: 55282 - DNA, 23 bp, Homo sapiens
ctgctgggttagagaagacttac

SEQ ID NO: 55283 - DNA, 18 bp, Homo sapiens
aaaacaccctcgcttagc

SEQ ID NO: 55284 - DNA, 19 bp, Homo sapiens
caaaacaccctcgcttagt

SEQ ID NO: 55285 - DNA, 25 bp, Homo sapiens
aactgcagtggagagtatataaggt

SEQ ID NO: 55286 - DNA, 21 bp, Homo sapiens
cacaatgtctagaggtgggta

SEQ ID NO: 55287 - DNA, 20 bp, Homo sapiens
acaatgtctagaggtgggtg

SEQ ID NO: 55288 - DNA, 25 bp, Homo sapiens
tggacgtagaagaacagtaagtaca

SEQ ID NO: 55289 - DNA, 20 bp, Homo sapiens
gttcatgtcgtcgaagtctt

SEQ ID NO: 55290 - DNA, 20 bp, Homo sapiens
gttcatgtcgtcgaagtctc

SEQ ID NO: 55291 - DNA, 20 bp, Homo sapiens
ggagcaaatggctcaatgta

SEQ ID NO: 55292 - DNA, 17 bp, Homo sapiens
cacattccctctctccg

SEQ ID NO: 55293 - DNA, 18 bp, Homo sapiens
ccacattccctctctcca

SEQ ID NO: 55294 - DNA, 21 bp, Homo sapiens
ttcagaggcacacaactatga

SEQ ID NO: 55295 - DNA, 26 bp, Homo sapiens
cacctcagttcaacagtttatattta

SEQ ID NO: 55296 - DNA, 25 bp, Homo sapiens
acctcagttcaacagtttatatttt

SEQ ID NO: 55297 - DNA, 25 bp, Homo sapiens
aaagaaagaaagtgttaggatgtct

SEQ ID NO: 55298 - DNA, 19 bp, Homo sapiens
ggaaggtagcccctaagac

SEQ ID NO: 55299 - DNA, 19 bp, Homo sapiens
ggaaggtagcccctaagag

SEQ ID NO: 55300 - DNA, 18 bp, Homo sapiens
cgtgttcgctgttcagtg

SEQ ID NO: 55301 - DNA, 23 bp, Homo sapiens
cacacgttgtctcaaaatgagta

SEQ ID NO: 55302 - DNA, 21 bp, Homo sapiens
cacgttgtctcaaaatgagtg

SEQ ID NO: 55303 - DNA, 20 bp, Homo sapiens
gatatgggcaggtttcactg

SEQ ID NO: 55304 - DNA, 22 bp, Homo sapiens
cttctcattgcttttctcctat

SEQ ID NO: 55305 - DNA, 22 bp, Homo sapiens
cttctcattgcttttctcctac

SEQ ID NO: 55306 - DNA, 23 bp, Homo sapiens
gctgaccgagaatataatcatct

SEQ ID NO: 55307 - DNA, 21 bp, Homo sapiens
ttctcattgcttttctcctat

SEQ ID NO: 55308 - DNA, 21 bp, Homo sapiens
ttctcattgcttttctcctac

SEQ ID NO: 55309 - DNA, 23 bp, Homo sapiens
gctgaccgagaatataatcatct

SEQ ID NO: 55310 - DNA, 21 bp, Homo sapiens
ggcttttaaaacttcaaatgc

SEQ ID NO: 55311 - DNA, 23 bp, Homo sapiens
aaggcttttaaaacttcaaatgt

SEQ ID NO: 55312 - DNA, 24 bp, Homo sapiens
gccactgagattatcaaactaact

SEQ ID NO: 55313 - DNA, 17 bp, Homo sapiens
atgacgctgaccacagg

SEQ ID NO: 55314 - DNA, 18 bp, Homo sapiens
catgacgctgaccacaga

SEQ ID NO: 55315 - DNA, 20 bp, Homo sapiens
gccgcttacccaaagtaatt

SEQ ID NO: 55316 - DNA, 14 bp, Homo sapiens
cgcagctcccacca

SEQ ID NO: 55317 - DNA, 14 bp, Homo sapiens
cgcagctcccaccg

SEQ ID NO: 55318 - DNA, 18 bp, Homo sapiens
cctgcccacgttctctat

SEQ ID NO: 55319 - DNA, 20 bp, Homo sapiens
agaccaagtggagacagaca

SEQ ID NO: 55320 - DNA, 19 bp, Homo sapiens
gaccaagtggagacagacg

SEQ ID NO: 55321 - DNA, 23 bp, Homo sapiens
ccttttctcccttcttttctaac

SEQ ID NO: 55322 - DNA, 20 bp, Homo sapiens
tggtcaggtgatagatctgc

SEQ ID NO: 55323 - DNA, 22 bp, Homo sapiens
tgtggtcaggtgatagatctgt

SEQ ID NO: 55324 - DNA, 21 bp, Homo sapiens
cctcattggacaatgagagac

SEQ ID NO: 55325 - DNA, 18 bp, Homo sapiens
ggcagggctctgatacag

SEQ ID NO: 55326 - DNA, 18 bp, Homo sapiens
ggcagggctctgatacaa

SEQ ID NO: 55327 - DNA, 19 bp, Homo sapiens
gcggttcttctggtgatta

SEQ ID NO: 55328 - DNA, 21 bp, Homo sapiens
caacgagtgattctttcacac

SEQ ID NO: 55329 - DNA, 21 bp, Homo sapiens
caacgagtgattctttcacag

SEQ ID NO: 55330 - DNA, 23 bp, Homo sapiens
aattcccttcactctttcttttc

SEQ ID NO: 55331 - DNA, 22 bp, Homo sapiens
acaggctgtgtctagttctcac

SEQ ID NO: 55332 - DNA, 22 bp, Homo sapiens
acaggctgtgtctagttctcat

SEQ ID NO: 55333 - DNA, 17 bp, Homo sapiens
ctcagaggccggaagtc

SEQ ID NO: 55334 - DNA, 14 bp, Homo sapiens
cggggagggagacc

SEQ ID NO: 55335 - DNA, 15 bp, Homo sapiens
ccggggagggagact

SEQ ID NO: 55336 - DNA, 23 bp, Homo sapiens
taaaagccattttcagacactaa

SEQ ID NO: 55337 - DNA, 22 bp, Homo sapiens
cgtgtgacatttctgaaatcaa

SEQ ID NO: 55338 - DNA, 22 bp, Homo sapiens
cgtgtgacatttctgaaatcag

SEQ ID NO: 55339 - DNA, 25 bp, Homo sapiens
accattctctccttatcactttatt

SEQ ID NO: 55340 - DNA, 21 bp, Homo sapiens
ttaagaaacagcctttcaaca

SEQ ID NO: 55341 - DNA, 20 bp, Homo sapiens
taagaaacagcctttcaacg

SEQ ID NO: 55342 - DNA, 21 bp, Homo sapiens
gcagcattcctgacagaacta
